United States Patent Application Publication US 2022/0211838 A1 - sequence listing, part 4

SEQ ID NO: 5026 - protein, 1378 aa, Artificial Sequence
  SARS-CoV-2/India/1-27/2020__EPI_ISL_413522 spike protein (1-1210)(I711C_T1076C) Ferritin construct
MFVFLVLLPLVSSQCVNLTTRTQLPPAYTNSFTRGVYYPDKVFRSSVLHSTQDLFLPFFSNVTWFHAIHVSGTNGTKRFDNPVLPFNDGVYFASTEKSNIIRGWIFGTTLDSKTQSLLIVNNATNVVIKVCEFQFCNDPFLGVYHKNNKSWMESEFRVYSSANNCTFEYVSQPFLMDLEGKQGNFKNLREFVFKNIDGYFKIYSKHTPINLVRDLPQGFSALEPLVDLPIGINITRFQTLLALHRSYLTPGDSSSGWTAGAAAYYVGYLQPRTFLLKYNENGTITDAVDCALDPLSETKCTLKSFTVEKGIYQTSNFRVQPTESIVRFPNITNLCPFGEVFNATRFASVYAWNRKRISNCVADYSVLYNSASFSTFKCYGVSPTKLNDLCFTNVYADSFVIRGDEVIQIAPGQTGKIADYNYKLPDDFTGCVIAWNSNNLDSKVGGNYNYLYRLFRKSNLKPFERDISTEIYQAGSTPCNGVEGFNCYFPLQSYGFQPTNGVGYQPYRVVVLSFELLHAPATVCGPKKSTNLVKNKCVNFNFNGLTGTGVLTESNKKFLPFQQFGRDIADTTDAVRDPQTLEILDITPCSFGGVSVITPGTNTSNQVAVLYQDVNCTEVPVAIHADQLTPTWRVYSTGSNVFQTRAGCLIGAEHVNNSYECDIPIGAGICASYQTQTNSPRRARSVASQSIIAYTMSLGAENSVAYSNNSCAIPTNFTISVTTEILPVSMTKTSVDCTMYICGDSTECSNLLLQYGSFCTQLNRALTGIAVEQDKNTQEVFAQVKQIYKTPPIKDFGGFNFSQILPDPSKPSKRSFIEDLLFNKVTLADAGFIKQYGDCLGDIAARDLICAQKFNGLTVLPPLLTDEMIAQYTSALLAGTITSGWTFGAGAALQIPFAMQMAYRFNGIGVTQNVLYENQKLIANQFNSAIGKIQDSLSSTASALGKLQDVVNQNAQALNTLVKQLSSNFGAISSVLNDILSRLDKVEAEVQIDRLITGRLQSLQTYVTQQLIRAAEIRASANLAATKMSECVLGQSKRVDFCGKGYHLMSFPQSAPHGVVFLHVTYVPAQEKNFTCAPAICHDGKAHFPREGVFVSNGTHWFVTQRNFYEPQIITTDNTFVSGNCDVVIGIVNNTVYDPLQPELDSFKEELDKYFKNHTSPDVDLGDISGINASVVNIQKEIDRLNEVAKNLNESLIDLQELGKYEQYIKGGGGSDIIKLLNEQVNKEMQSSNLYMSMSSWCYTHSLDGAGLFLFDHAAEEYEHAKKLIIFLNENNVPVQLTSISAPEHKFEGLTQIFQKAYEHEQHISESINNIVDHAIKSKDHATFNFLQWYVAEQHEEEVLFKDILDKIELIGNENHGLYLADQYVKGIAKSRKS

SEQ ID NO: 5027 - protein, 1373 aa, Artificial Sequence
  SARS-CoV-2/pangolin/Guangxi/P4L/2017__EPI_ISL_410538 spike protein (1-1205)(I706C_T1071C) Ferritin construct
MFVFLFVLPLVSSQCVNLTTRTGIPPGYTNSSTRGVYYPDKVFRSSILHLTQDLFLPFFSNVTWFNTINYQGGFKKFDNPVLPFNDGVYFASTEKSNIIRGWIFGTTLDARTQSLLIVNNATNVVIKVCEFQFCTDPFLGVYYHNNNKTWVENEFRVYSSANNCTFEYISQPFLMDLEGKQGNFKNLREFVFKNVDGYFKIYSKHTPIDLVRDLPRGFAALEPLVDLPIGINITRFQTLLALHRSYLTPGNLESGWTTGAAAYYVGYLQQRTFLLSYNQNGTITDAVDCSLDPLSETKCTLKSLTVEKGIYQTSNFRVQPTISIVRFPNITNLCPFGEVFNASKFASVYAWNRKRISNCVADYSVLYNSTSFSTFKCYGVSPTKLNDLCFTNVYADSFVVKGDEVRQIAPGQTGVIADYNYKLPDDFTGCVIAWNSVKQDALTGGNYGYLYRLFRKSKLKPFERDISTEIYQAGSTPCNGQVGLNCYYPLERYGFHPTTGVNYQPFRVVVLSFELLNGPATVCGPKLSTTLVKDKCVNFNFNGLTGTGVLTTSKKQFLPFQQFGRDISDTTDAVRDPQTLEILDITPCSFGGVSVITPGTNTSNQVAVLYQDVNCTEVPMAIHAEQLTPAWRVYSAGANVFQTRAGCLVGAEHVNNSYECDIPVGAGICASYHSMSSLRSVNQRSIIAYTMSLGAENSVAYSNNSCAIPTNFTISVTTEILPVSMTKTSVDCTMYICGDSIECSNLLLQYGSFCTQLNRALTGIAVEQDKNTQEVFAQVKQIYKTPPIKDFGGFNFSQILPDPSKPSKRSFIEDLLFNKVTLADAGFIKQYGDCLGDIAARDLICAQKFNGLTVLPPLLTDEMIAQYTSALLAGTITSGWTFGAGAALQIPFAMQMAYRFNGIGVTQNVLYENQKLIANQFNSAIGKIQDSLSSTASALGKLQDVVNQNAQALNTLVKQLSSNFGAISSVLNDILSRLDKVEAEVQIDRLITGRLQSLQTYVTQQLIRAAEIRASANLAATKMSECVLGQSKRVDFCGKGYHLMSFPQSAPHGVVFLHVTYVPAQEKNFTCAPAICHEGKAHFPREGVFVSNGTHWFITQRNFYEPQIITTDNTFVSGSCDVVIGIVNNTVYDPLQPELDSFKEELDKYFKNHTSPDVDLGDISGINASVVNIQKEIDRLNEVAKNLNESPIDLQELGKYEQYIKGGGGSDIIKLLNEQVNKEMQSSNLYMSMSSWCYTHSLDGAGLFLFDHAAEEYEHAKKLIIFLNENNVPVQLTSISAPEHKFEGLTQIFQKAYEHEQHISESINNIVDHAIKSKDHATFNFLQWYVAEQHEEEVLFKDILDKIELIGNENHGLYLADQYVKGIAKSRKS

SEQ ID NO: 5028 - protein, 1373 aa, Artificial Sequence
  SARS-CoV-2/pangolin/Guangxi/P5L/2017__EPI_ISL_410540 spike protein (1-1205)(I706C_T1071C) Ferritin construct
MFVFLFVLPLVSSQCVNLTTRTGIPPGYTNSSTRGVYYPDKVFRSSILHLTQDLFLPFFSNVTWFNTINYQGGFKKFDNPVLPFNDGVYFASTEKSNIIRGWIFGTTLDARTQSLLIVNNATNVVIKVCEFQFCTDPFLGVYYHNNNKTWVENEFRVYSSANNCTFEYISQPFLMDLEGKQGNFKNLREFVFKNVDGYFKIYSKHTPIDLVRDLPRGFAALEPLVDLPIGINITRFQTLLALHRSYLTPGKLESGWTTGAAAYYVGYLQQRTFLLSYNQNGTITDAVDCSLDPLSETKCTLKSLTVEKGIYQTSNFRVQPTISIVRFPNITNLCPFGEVFNASKFASVYAWNRKRISNCVADYSVLYNSTSFSTFKCYGVSPTKLNDLCFTNVYADSFVVKGDEVRQIAPGQTGVIADYNYKLPDDFTGCVIAWNSVKQDALTGGNYGYLYRLFRKSKLKPFERDISTEIYQAGSTPCNGQVGLNCYYPLERYGFHPTTGVNYQPFRVVVLSFELLNGPATVCGPKLSTTLVKDKCVNFNFNGLTGTGVLTTSKKQFLPFQQFGRDISDTTDAVRDPQTLEILDITPCSFGGVSVITPGTNTSNQVAVLYQDVNCTEVPMAIHAEQLTPAWRVYSAGANVFQTRAGCLVGAEHVNNSYECDIPVGAGICASYHSMSSFRSVNQRSIIAYTMSLGAENSVAYSNNSCAIPTNFTISVTTEILPVSMTKTSVDCTMYICGDSIECSNLLLQYGSFCTQLNRALTGIAVEQDKNTQEVFAQVKQIYKTPPIKDFGGFNFSQILPDPSKPSKRSFIEDLLFNKVTLADAGFIKQYGDCLGDIAARDLICAQKFNGLTVLPPLLTDEMIAQYTSALLAGTITSGWTFGAGAALQIPFAMQMAYRFNGIGVTQNVLYENQKLIANQFNSAIGKIQDSLSSTASALGKLQDVVNQNAQALNTLVKQLSSNFGAISSVLNDILSRLDKVEAEVQIDRLITGRLQSLQTYVTQQLIRAAEIRASANLAATKMSECVLGQSKRVDFCGKGYHLMSFPQSAPHGVVFLHVTYVPAQEKNFTCAPAICHEGKAHFPREGVFVSNGTHWFITQRNFYEPQIITTDNTFVSGSCDVVIGIVNNTVYDPLQPELDSFKEELDKYFKNHTSPDVDLGDISGINASVVNIQKEIDRLNEVAKNLNESLIDLQELGKYEQYIKGGGGSDIIKLLNEQVNKEMQSSNLYMSMSSWCYTHSLDGAGLFLFDHAAEEYEHAKKLIIFLNENNVPVQLTSISAPEHKFEGLTQIFQKAYEHEQHISESINNIVDHAIKSKDHATFNFLQWYVAEQHEEEVLFKDILDKIELIGNENHGLYLADQYVKGIAKSRKS

SEQ ID NO: 5029 - protein, 1373 aa, Artificial Sequence
  SARS-CoV-2/pangolin/Guangxi/P5E/2017__EPI_ISL_410541 spike protein (1-1205)(I706C_T1071C) Ferritin construct
MFVFLFVLPLVSSQCVNLTTRTGIPPGYTNSSTRGVYYPDKVFRSSILHLTQDLFLPFFSNVTWFNTITYQGGSKKFDNPVLPFNDGVYFASTEKSNIIRGWIFGTTLDARTQSLLIVNNATNVVIKVCEFQFCTDPFLGVYYHNNNKTWVENEFRVYSSANNCTFEYISQPFLMDLEGKQGNFKNLREFVFKNVDGYFKIYSKHTPIDLVRDLPRGFAALEPLVDLPIGINITRFQTLLALHRSYLTPGKLESGWTTGAAAYYVGYLQQRTFLLSYNQNGTITDAVDCSLDPLSETKCTLKSLTVEKGIYQTSNFRVQPTISIVRFPNITNLCPFGEVFNASKFASVYAWNRKRISNCVADYSVLYNSTSFSTFKCYGVSPTKLNDLCFTNVYADSFVVKGDEVRQIAPGQTGVIADYNYKLPDDFTGCVIAWNSVKQDALTGDNYGYLYRLFRKSKLKPFERDISTEIYQAGSTPCNGQVGLNCYYPLERYGFHPTTGVNYQPFRVVVLSFELLNGPATVCGPKLSTTLVKDKCVNFNFNGLTGTGVLTTSKKQFLPFQQFGRDISDTTDAVRDPQTLEILDITPCSFGGVSVITPGTNTSNQVAVLYQDVNCTEVPMAIHAEQLTPAWRVYSAGANVFQTRAGCLVGAEHVNNSYECDIPVGAGICASYHSMSSFRSVNQRSIIAYTMSLGAENSVAYSNNSCAIPTNFTISVTTEILPVSMTKTSVDCTMYICGDSIECSNLLLQYGSFCTQLNRALTGIAVEQDKNTQEVFAQVKQIYKTPPIKDFGGFNFSQILPDPSKPSKRSFIEDLLFNKVTLADAGFIKQYGDCLGDIAARDLICAQKFNGLTVLPPLLTDEMIAQYTSALLAGTITSGWTFGAGAALQIPFAMQMAYRFNGIGVTQNVLYENQKLIANQFNSAIGKIQDSLSSTASALGKLQDVVNQNAQALNTLVKQLSSNFGAISSVLNDILSRLDKVEAEVQIDRLITGRLQSLQTYVTQQLIRAAEIRASANLAATKMSECVLGQSKRVDFCGKGYHLMSFPQSAPHGVVFLHVTYVPAQEKNFTCAPAICHEGKAHFPREGVFVSNGTHWFITQRNFYEPQIITTDNTFVSGSCDVVIGIVNNTVYDPLQPELDSFKEELDKYFKNHTSPDVDLGDISGINASVVNIQKEIDRLNEVAKNLNESLIDLQELGKYEQYIKGGGGSDIIKLLNEQVNKEMQSSNLYMSMSSWCYTHSLDGAGLFLFDHAAEEYEHAKKLIIFLNENNVPVQLTSISAPEHKFEGLTQIFQKAYEHEQHISESINNIVDHAIKSKDHATFNFLQWYVAEQHEEEVLFKDILDKIELIGNENHGLYLADQYVKGIAKSRKS

SEQ ID NO: 5030 - protein, 1371 aa, Artificial Sequence
  SARS-CoV-2/pangolin/Guangxi/P1E/2017__EPI_ISL_410539 spike protein (1-1203)(I704C_T1069C) Ferritin construct
MFVFLFVLPLVSSQCVNLTTRTGIQPGYTNSSTRGVYYPDKVFRSSILHLTQDLFLPFFSNVTWFNTINYQGGFKKFDNPVLPFNDGVYFASTEKSNIIRGWIFGTTLDARTQSLLIVNNATNVVIKVCEFQFCTDPFLGVYYHNNNKTWVENEFRVYSSANNCTFEYISQPFLMDLEGKQGNFKNLREFVFKNVDGYFKIYSKHTPIDLVRDLPRGFAALEPLVDLPIGINITRFQTLLALHRSYLTPGKLESGWTTGAAAYYVGYLQQRTFLLSYNQNGTITDAVDCSLDPLSETKCTLKSLTVEKGIYQTSNFRVQPTISIVRFPNITNLCPFGEVFNASKFASVYAWNRKRISNCVADYSVLYNSTSFSTFKCYGVSPTKLNDLCFTNVYADSFVVKGDEVRQIAPGQTGVIADYNYKLPDDFTGCVIAWNSVKQDALTGGNYLYRLFRKSKLKPFERDISTEIYQAGSTPCNGQVGLNCYYPLERYGFHPTTGVNYQPFRVVVLSFELLNGPATVCGPKLSTTLVKDKCVNFNFNGLTGTGVLTTSKKQFLPFQQFGRDISDTTDAVRDPQTLEILDITPCSFGGVSVITPGTNTSNQVAVLYQDVNCTEVPMAIHAEQLTPAWRVYSAGANVFQTRAGCLVGAEHVNNSYECDIPVGAGICASYHSMSSLRSVNQRSIIAYTMSLGAENSVAYSNNSCAIPTNFTISVTTEILPVSMTKTSVDCTMYICGDSIECSNLLLQYGSFCTQLNRALTGIAVEQDKNTQEVFAQVKQIYKTPPIKDFGGFNFSQILPDPSKPSKRSFIEDLLFNKVTLADAGFIKQYGDCLGDIAARDLICAQKFNGLTVLPPLLTDEMIAQYTSALLAGTITSGWTFGAGAALQIPFAMQMAYRFNGIGVTQNVLYENQKLIANQFNSAIGKIQDSLSSTASALGKLQDVVNQNAQALNTLVKQLSSNFGAISSVLNDILSRLDKVEAEVQIDRLITGRLQSLQTYVTQQLIRAAEIRASANLAATKMSECVLGQSKRVDFCGKGYHLMSFPQSAPHGVVFLHVTYVPAQEKNFTCAPAICHEGKAHFPREGVFVSNGTHWFITQRNFYEPQIITTDNTFVSGSCDVVIGIVNNTVYDPLQPELDSFKEELDKYFKNHTSPDVDLGDISGINASVVNIQKEIDRLNEVAKNLNESLIDLQELGKYEQYIKGGGGSDIIKLLNEQVNKEMQSSNLYMSMSSWCYTHSLDGAGLFLFDHAAEEYEHAKKLIIFLNENNVPVQLTSISAPEHKFEGLTQIFQKAYEHEQHISESINNIVDHAIKSKDHATFNFLQWYVAEQHEEEVLFKDILDKIELIGNENHGLYLADQYVKGIAKSRKS

SEQ ID NO: 5031 - protein, 1379 aa, Artificial Sequence
  SARS-CoV-2/Wuhan/WIV05/2019__EPI_ISL_402128 spike protein (1-1211)(I714C_Y1110C) Ferritin construct
MFVFLVLLPLVSSQCVNLTTRTQLPPAYTNSFTRGVYYPDKVFRSSVLHSTQDLFLPFFSNVTWFHAIHVSGTNGTKRFDNPVLPFNDGVYFASTEKSNIIRGWIFGTTLDSKTQSLLIVNNATNVVIKVCEFQFCNDPFLGVYYHKNNKSWMESEFRVYSSANNCTFEYVSQPFLMDLEGKQGNFKNLREFVFKNIDGYFKIYSKHTPINLVRDLPQGFSALEPLVDLPIGINITRFQTLLALHRSYLTPGDSSSGWTAGAAAYYVGYLQPRTFLLKYNENGTITDAVDCALDPLSETKCTLKSFTVEKGIYQTSNFRVQPTESIVRFPNITNLCPFGEVFNATRFASVYAWNRKRISNCVADYSVLYNSASFSTFKCYGVSPTKLNDLCFTNVYADSFVIRGDEVRQIAPGQTGKIADYNYKLPDDFTGCVIAWNSNNLDSKVGGNYNYLYRLFRKSNLKPFERDISTEIYQAGSTPCNGVEGFNCYFPLQSYGFQPTNGVGYQPYRVVVLSFELLHAPATVCGPKKSTNLVKNKCVNFNFNGLTGTGVLTESNKKFLPFQQFGRDIADTTDAVRDPQTLEILDITPCSFGGVSVITPGTNTSNQVAVLYQDVNCTEVPVAIHADQLTPTWRVYSTGSNVFQTRAGCLIGAEHVNNSYECDIPIGAGICASYQTQTNSPRRARSVASQSIIAYTMSLGAENSVAYSNNSIACPTNFTISVTTEILPVSMTKTSVDCTMYICGDSTECSNLLLQYGSFCTQLNRALTGIAVEQDKNTQEVFAQVKQIYKTPPIKDFGGFNFSQILPDPSKPSKRSFIEDLLFNKVTLADAGFIKQYGDCLGDIAARDLICAQKFNGLTVLPPLLTDEMIAQYTSALLAGTITSGWTFGAGAALQIPFAMQMAYRFNGIGVTQNVLYENQKLIANQFNSAIGKIQDSLSSTASALGKLQDVVNQNAQALNTLVKQLSSNFGAISSVLNDILSRLDKVEAEVQIDRLITGRLQSLQTYVTQQLIRAAEIRASANLAATKMSECVLGQSKRVDFCGKGYHLMSFPQSAPHGVVFLHVTYVPAQEKNFTTAPAICHDGKAHFPREGVFVSNGTHWFVTQRNFCEPQIITTDNTFVSGNCDVVIGIVNNTVYDPLQPELDSFKEELDKYFKNHTSPDVDLGDISGINASVVNIQKEIDRLNEVAKNLNESLIDLQELGKYEQYIKGGGGSDIIKLLNEQVNKEMQSSNLYMSMSSWCYTHSLDGAGLFLFDHAAEEYEHAKKLIIFLNENNVPVQLTSISAPEHKFEGLTQIFQKAYEHEQHISESINNIVDHAIKSKDHATFNFLQWYVAEQHEEEVLFKDILDKIELIGNENHGLYLADQYVKGIAKSRKS

SEQ ID NO: 5032 - protein, 1375 aa, Artificial Sequence
  SARS-CoV-2/bat/Yunnan/RaTG13/2013__EPI_ISL_402131 spike protein (1-1207)(I710C_Y1106C) Ferritin construct
MFVFLVLLPLVSSQCVNLTTRTQLPPAYTNSSTRGVYYPDKVFRSSVLHLTQDLFLPFFSNVTWFHAIHVSGTNGIKRFDNPVLPFNDGVYFASTEKSNIIRGWIFGTTLDSKTQSLLIVNNATNVVIKVCEFQFCNDPFLGVYYHKNNKSWMESEFRVYSSANNCTFEYVSQPFLMDLEGKQGNFKNLREFVFKNIDGYFKIYSKHTPINLVRDLPPGFSALEPLVDLPIGINITRFQTLLALHRSYLTPGDSSSGWTAGAAAYYVGYLQPRTFLLKYNENGTITDAVDCALDPLSETKCTLKSFTVEKGIYQTSNFRVQPTDSIVRFPNITNLCPFGEVFNATTFASVYAWNRKRISNCVADYSVLYNSTSFSTFKCYGVSPTKLNDLCFTNVYADSFVITGDEVRQIAPGQTGKIADYNYKLPDDFTGCVIAWNSKHIDAKEGGNFNYLYRLFRKANLKPFERDISTEIYQAGSKPCNGQTGLNCYYPLYRYGFYPTDGVGHQPYRVVVLSFELLNAPATVCGPKKSTNLVKNKCVNFNFNGLTGTGVLTESNKKFLPFQQFGRDIADTTDAVRDPQTLEILDITPCSFGGVSVITPGTNASNQVAVLYQDVNCTEVPVAIHADQLTPTWRVYSTGSNVFQTRAGCLIGAEHVNNSYECDIPIGAGICASYQTQTNSRSVASQSIIAYTMSLGAENSVAYSNNSIACPTNFTISVTTEILPVSMTKTSVDCTMYICGDSTECSNLLLQYGSFCTQLNRALTGIAVEQDKNTQEVFAQVKQIYKTPPIKDFGGFNFSQILPDPSKPSKRSFIEDLLFNKVTLADAGFIKQYGDCLGDIAARDLICAQKFNGLTVLPPLLTDEMIAQYTSALLAGTITSGWTFGAGAALQIPFAMQMAYRFNGIGVTQNVLYENQKLIANQFNSAIGKIQDSLSSTASALGKLQDVVNQNAQALNTLVKQLSSNFGAISSVLNDILSRLDKVEAEVQIDRLITGRLQSLQTYVTQQLIRAAEIRASANLAATKMSECVLGQSKRVDFCGKGYHLMSFPQSAPHGVVFLHVTYVPAQEKNFTTAPAICHDGKAHFPREGVFVSNGTHWFVTQRNFCEPQIITTDNTFVSGSCDVVIGIVNNTVYDPLQPELDSFKEELDKYFKNHTSPDVDLGDISGINASVVNIQKEIDRLNEVAKNLNESLIDLQELGKYEQYIKGGGGSDIIKLLNEQVNKEMQSSNLYMSMSSWCYTHSLDGAGLFLFDHAAEEYEHAKKLIIFLNENNVPVQLTSISAPEHKFEGLTQIFQKAYEHEQHISESINNIVDHAIKSKDHATFNFLQWYVAEQHEEEVLFKDILDKIELIGNENHGLYLADQYVKGIAKSRKS

SEQ ID NO: 5033 - protein, 1379 aa, Artificial Sequence
  SARS-CoV-2/Wuhan/HBCDC-HB-01/2019__EPI_ISL_402132 spike protein (1-1211)(I714C_Y1110C) Ferritin construct
MFVFLVLLPLVSSQCVNLTTRTQLPPAYTNSITRGVYYPDKVFRSSVLHSTQDLFLPFFSNVTWFHAIHVSGTNGTKRFDNPVLPFNDGVYFASTEKSNIIRGWIFGTTLDSKTQSLLIVNNATNVVIKVCEFQFCNDPFLGVYYHKNNKSWMESEFRVYSSANNCTFEYVSQPFLMDLEGKQGNFKNLREFVFKNIDGYFKIYSKHTPINLVRDLPQGFSALEPLVDLPIGINITRFQTLLALHRSYLTPGDSSSGWTAGAAAYYVGYLQPRTFLLKYNENGTITDAVDCALDPLSETKCTLKSFTVEKGIYQTSNFRVQPTESIVRFPNITNLCPFGEVFNATRFASVYAWNRKRISNCVADYSVLYNSASFSTFKCYGVSPTKLNDLCFTNVYADSFVIRGDEVRQIAPGQTGKIADYNYKLPDDFTGCVIAWNSNNLDSKVGGNYNYLYRLFRKSNLKPFERDISTEIYQAGSTPCNGVEGFNCYFPLQSYGFQPTNGVGYQPYRVVVLSFELLHAPATVCGPKKSTNLVKNKCVNFNFNGLTGTGVLTESNKKFLPFQQFGRDIADTTDAVRDPQTLEILDITPCSFGGVSVITPGTNTSNQVAVLYQDVNCTEVPVAIHADQLTPTWRVYSTGSNVFQTRAGCLIGAEHVNNSYECDIPIGAGICASYQTQTNSPRRARSVASQSIIAYTMSLGAENSVAYSNNSIACPTNFTISVTTEILPVSMTKTSVDCTMYICGDSTECSNLLLQYGSFCTQLNRALTGIAVEQDKNTQEVFAQVKQIYKTPPIKDFGGFNFSQILPDPSKPSKRSFIEDLLFNKVTLADAGFIKQYGDCLGDIAARDLICAQKFNGLTVLPPLLTDEMIAQYTSALLAGTITSGWTFGAGAALQIPFAMQMAYRFNGIGVTQNVLYENQKLIANQFNSAIGKIQDSLSSTASALGKLQDVVNQNAQALNTLVKQLSSNFGAISSVLNDILSRLDKVEAEVQIDRLITGRLQSLQTYVTQQLIRAAEIRASANLAATKMSECVLGQSKRVDFCGKGYHLMSFPQSAPHGVVFLHVTYVPAQEKNFTTAPAICHDGKAHFPREGVFVSNGTHWFVTQRNFCEPQIITTDNTFVSGNCDVVIGIVNNTVYDPLQPELDSFKEELDKYFKNHTSPDVDLGDISGINASVVNIQKEIDRLNEVAKNLNESLIDLQELGKYEQYIKGGGGSDIIKLLNEQVNKEMQSSNLYMSMSSWCYTHSLDGAGLFLFDHAAEEYEHAKKLIIFLNENNVPVQLTSISAPEHKFEGLTQIFQKAYEHEQHISESINNIVDHAIKSKDHATFNFLQWYVAEQHEEEVLFKDILDKIELIGNENHGLYLADQYVKGIAKSRKS

SEQ ID NO: 5034 - protein, 1379 aa, Artificial Sequence
  SARS-CoV-2/Guangdong/20SF028/2020__EPI_ISL_403936 spike protein (1-1211)(I714C_Y1110C) Ferritin construct
MFVFLVLLPLVSSQCVNLTTRTQLPPAYTNSFTRGVYYPDKVFRSSVLYSTQDLFLPFFSNVTWFHAIHVSGTNGTKRFDNPVLPFNDGVYFASTEKSNIIRGWIFGTTLDSKTQSLLIVNNATNVVIKVCEFQFCNDPFLGVYYHKNNKSWMESEFRVYSSANNCTFEYVSQPFLMDLEGKQGNFKNLREFVFKNIDGYFKIYSKHTPINLVRDLPQGFSALEPLVDLPIGINITRFQTLLALHRSYLTPGDSSSGWTAGAAAYYVGYLQPRTFLLKYNENGTITDAVDCALDPLSETKCTLKSFTVEKGIYQTSNFRVQPTESIVRFPNITNLCPFGEVFNATRFASVYAWNRKRISNCVADYSVLYNSASFSTFKCYGVSPTKLNDLCFTNVYADSFVIRGDEVRQIAPGQTGKIADYNYKLPDDFTGCVIAWNSNNLDSKVGGNYNYLYRLFRKSNLKPFERDISTEIYQAGSTPCNGVEGFNCYFPLQSYGFQPTNGVGYQPYRVVVLSFELLHAPATVCGPKKSTNLVKNKCVNFNFNGLTGTGVLTESNKKFLPFQQFGRDIADTTDAVRDPQTLEILDITPCSFGGVSVITPGTNTSNQVAVLYQDVNCTEVPVAIHADQLTPTWRVYSTGSNVFQTRAGCLIGAEHVNNSYECDIPIGAGICASYQTQTNSPRRARSVASQSIIAYTMSLGAENSVAYSNNSIACPTNFTISVTTEILPVSMTKTSVDCTMYICGDSTECSNLLLQYGSFCTQLNRALTGIAVEQDKNTQEVFAQVKQIYKTPPIKDFGGFNFSQILPDPSKPSKRSFIEDLLFNKVTLADAGFIKQYGDCLGDIAARDLICAQKFNGLTVLPPLLTDEMIAQYTSALLAGTITSGWTFGAGAALQIPFAMQMAYRFNGIGVTQNVLYENQKLIANQFNSAIGKIQDSLSSTASALGKLQDVVNQNAQALNTLVKQLSSNFGAISSVLNDILSRLDKVEAEVQIDRLITGRLQSLQTYVTQQLIRAAEIRASANLAATKMSECVLGQSKRVDFCGKGYHLMSFPQSAPHGVVFLHVTYVPAQEKNFTTAPAICHDGKAHFPREGVFVSNGTHWFVTQRNFCEPQIITTDNTFVSGNCDVVIGIVNNTVYDPLQPELDSFKEELDKYFKNHTSPDVDLGDISGINASVVNIQKEIDRLNEVAKNLNESLIDLQELGKYEQYIKGGGGSDIIKLLNEQVNKEMQSSNLYMSMSSWCYTHSLDGAGLFLFDHAAEEYEHAKKLIIFLNENNVPVQLTSISAPEHKFEGLTQIFQKAYEHEQHISESINNIVDHAIKSKDHATFNFLQWYVAEQHEEEVLFKDILDKIELIGNENHGLYLADQYVKGIAKSRKS

SEQ ID NO: 5035 - protein, 1379 aa, Artificial Sequence
  SARS-CoV-2/Shenzhen/SZTH-001/2020__EPI_ISL_406592 spike protein (1-1211)(I714C_Y1110C) Ferritin construct
MFVFLVLLPLVSSQCVNLTTRTQLPPAYTNSFTRGVYYPDKVFRSSVLHSTQDLFLPFFSNVTWFHAIHVSGTNGTKRFDNPVLPFNDGVYFASTEKSNIIRGWIFGTTLDSKTQSLLIVNNATNVVIKVCEFQFCNDPFLGVYYHKNNKSWMESEFRVYSSANNCTFEYVSQPFLMDLEGKQGNFKNLREFVFKNIDGYFKIYSKHTPINLVRDLPQGFSALEPLVDLPIGINITRFQTLLALHRSYLTPGDSSSGWTAGAAAYYVGYLQPRTFLLKYNENGTITDAVDCALDPLSETKCTLKSFTVEKGIYQTSNFRVQPTESIVRFPNITNLCPFGEVFNATRFASVYAWNRKRISNCVADYSVLYNSASFSTFKCYGVSPTKLNDLCFTNVYADSFVIRGDEVRQIAPGQTGKIADYNYKLPDDFTGCVIAWNSNNLDSKVGGNYNYLYRLFRKSNLKPFERDISTEIYQAGSTPCNGVEGFNCYFPLQSYGFQPTNGVGYQPYRVVVLSFELLHAPATVCGPKKSTNLVKNKCVNFNFNGLTGTGVLTESNKKFLPFQQFGRDIADTTDAVRDPQTLEILDITPCSFGGVSVITPGTNTSNQVAVLYQDVNCTEVPVAIHADQLTPTWRVYSTGSNVFQTRAGCLIGAEHVNNSYECDIPIGAGICASYQTQTNSPRRARSVASQSIIAYTMSLGAENSVAYSNNSIACPTNFTISVTTEILPVSMTKTSVDCTMYICGDSTECSNLLLQYGSFCTQLNRALTGIAVEQDKNTQEVFAQVKQIYKTPPIKDFGGFNFSQILPDPSKPSKRSFIEDLLFNKVTLADAGFIKQYGDCLGDIAARDLICAQKFNGLTVLPPLLTDEMIAQYTSALLAGTITSGWTFGAGAALQIPFAMQMAYRFNGIGVTQNVLYENQKLIANQFNSAIGKIQDSLSSTASALGKLQDVVNQNAQALNTLVKQLSSNFGAISSVLNDILSRLDKVEAEVQIDRLITGRLQSLQTYVTQQLIRAAEIRASANLAATKMSECVLGQSKRVDFCGKGYHLMSFPQSAPHGVVFLHVTYVPAQEKNFTTAPAICHDGKAHFPREGVFVSNGTHWFVTQRNFCEPQIITTDNTFVSGNCDVLIGIVNNTVYDPLQPELDSFKEELDKYFKNHTSPDVDLGDISGINASVVNIQKEIDRLNEVAKNLNESLIDLQELGKYEQYIKGGGGSDIIKLLNEQVNKEMQSSNLYMSMSSWCYTHSLDGAGLFLFDHAAEEYEHAKKLIIFLNENNVPVQLTSISAPEHKFEGLTQIFQKAYEHEQHISESINNIVDHAIKSKDHATFNFLQWYVAEQHEEEVLFKDILDKIELIGNENHGLYLADQYVKGIAKSRKS

SEQ ID NO: 5036 - protein, 1379 aa, Artificial Sequence
  SARS-CoV-2/Shenzhen/SZTH-004/2020__EPI_ISL_406595 spike protein (1-1211)(I714C_Y1110C) Ferritin construct
MFVFLVLLPLVSSQCVNLTTRTQLPPAYTNSFTRGVYYPDKVFRSSVLHSTQDLFLPFFSNVTWFHAIHVSGTNGTKRFDNPVLPFNDGVYFASTEKSNIIRGWIFGTTLDSKTQSLLIVNNATNVVIKVCEFQFCNDPFLGVYYHKNNKSWMESEFRVYSSANNCTFEYVSQPFLMDLEGKQGNFKNLREFVFKNIDGYFKIYSKHTPINLVRDLPQGFSALEPLVDLPIGINITRFQTLLALHRSYLTPGDSSSGWTAGAAAYYVGYLQPRTFLLKYNENGTITDAVDCALDPLSETKCTLKSFTVEKGIYQTSNFRVQPTESIVRFPNITNLCPFGEVFNATRFASVYAWDRKRISNCVAYYSVLYNSASFSTFKCYGVSPTKLNDLCFTNVYADSFVIRGDEVRQIAPGQTGKIADYNYKLPDDFTGCVIAWNSNNLDSKVGGNYNYLYRLFRKSNLKPFERDISTEIYQAGSTPCNGVEGFNCYFPLQSYGFQPTNGVGYQPYRVVVLSFELLHAPATVCGPKKSTNLVKNKCVNFNFNGLTGTGVLTESNKKFLPFQQFGRDIADTTDAVRDPQTLEILDITPCSFGGVSVITPGTNTSNQVAVLYQDVNCTEVPVAIHADQLTPTWRVYSTGSNVFQTRAGCLIGAEHVNNSYECDIPIGAGICASYQTQTNSPRRARSVASQSIIAYTMSLGAENSVAYSNNSIACPTNFTISVTTEILPVSMTKTSVDCTMYICGDSTECSNLLLQYGSFCTQLNRALTGIAVEQDKNTQEVFAQVKQIYKTPPIKDFGGFNFSQILPDPSKPSKRSFIEDLLFNKVTLADAGFIKQYGDCLGDIAARDLICAQKFNGLTVLPPLLTDEMIAQYTSALLAGTITSGWTFGAGAALQIPFAMQMAYRFNGIGVTQNVLYENQKLIANQFNSAIGKIQDSLSSTASALGKLQDVVNQNAQALNTLVKQLSSNFGAISSVLNDILSRLDKVEAEVQIDRLITGRLQSLQTYVTQQLIRAAEIRASANLAATKMSECVLGQSKRVDFCGKGYHLMSFPQSAPHGVVFLHVTYVPAQEKNFTTAPAICHDGKAHFPREGVFVSNGTHWFVTQRNFCEPQIITTDNTFVSGNCDVVIGIVNNTVYDPLQPELDSFKEELDKYFKNHTSPDVDLGDISGINASVVNIQKEIDRLNEVAKNLNESLIDLQELGKYEQYIKGGGGSDIIKLLNEQVNKEMQSSNLYMSMSSWCYTHSLDGAGLFLFDHAAEEYEHAKKLIIFLNENNVPVQLTSISAPEHKFEGLTQIFQKAYEHEQHISESINNIVDHAIKSKDHATFNFLQWYVAEQHEEEVLFKDILDKIELIGNENHGLYLADQYVKGIAKSRKS

SEQ ID NO: 5037 - protein, 1379 aa, Artificial Sequence
  SARS-CoV-2/France/IDF0372/2020__EPI_ISL_406596 spike protein (1-1211)(I714C_Y1110C) Ferritin construct
MFVFLVLLPLVSSQCVNLTTRTQLPPAYTNSFTRGVYYPDKVFRSSVLHSTQDLFLPFFSNVTWFHAIHVSGTNGTKRFDNPVLPFNDGVYFASTEKSNIIRGWIFGTTLDSKTQSLLIVNNATNVVIKVCEFQFCNDPFLGVYYHKNNKSWMESEFRVYSSANNCTFEYVSQPFLMDLEGKQGNFKNLREFVFKNIDGYFKIYSKHTPINLVRDLPQGFSALEPLVDLPIGINITRFQTLLALHRSYLTPGDSSSGWTAGAAAYYVGYLQPRTFLLKYNENGTITDAVDCALDPLSETKCTLKSFTVEKGIYQTSNFRVQPTESIVRFPNITNLCPFGEVFNATRFASVYAWNRKRISNCVADYSFLYNSASFSTFKCYGVSPTKLNDLCFTNVYADSFVIRGDEVRQIAPGQTGKIADYNYKLPDDFTGCVIAWNSNNLDSKVGGNYNYLYRLFRKSNLKPFERDISTEIYQAGSTPCNGVEGFNCYFPLQSYGFQPTNGVGYQPYRVVVLSFELLHAPATVCGPKKSTNLVKNKCVNFNFNGLTGTGVLTESNKKFLPFQQFGRDIADTTDAVRDPQTLEILDITPCSFGGVSVITPGTNTSNQVAVLYQDVNCTEVPVAIHADQLTPTWRVYSTGSNVFQTRAGCLIGAEHVNNSYECDIPIGAGICASYQTQTNSPRRARSVASQSIIAYTMSLGAENSVAYSNNSIACPTNFTISVTTEILPVSMTKTSVDCTMYICGDSTECSNLLLQYGSFCTQLNRALTGIAVEQDKNTQEVFAQVKQIYKTPPIKDFGGFNFSQILPDPSKPSKRSFIEDLLFNKVTLADAGFIKQYGDCLGDIAARDLICAQKFNGLTVLPPLLTDEMIAQYTSALLAGTITSGWTFGAGAALQIPFAMQMAYRFNGIGVTQNVLYENQKLIANQFNSAIGKIQDSLSSTASALGKLQDVVNQNAQALNTLVKQLSSNFGAISSVLNDILSRLDKVEAEVQIDRLITGRLQSLQTYVTQQLIRAAEIRASANLAATKMSECVLGQSKRVDFCGKGYHLMSFPQSAPHGVVFLHVTYVPAQEKNFTTAPAICHDGKAHFPREGVFVSNGTHWFVTQRNFCEPQIITTDNTFVSGNCDVVIGIVNNTVYDPLQPELDSFKEELDKYFKNHTSPDVDLGDISGINASVVNIQKEIDRLNEVAKNLNESLIDLQELGKYEQYIKGGGGSDIIKLLNEQVNKEMQSSNLYMSMSSWCYTHSLDGAGLFLFDHAAEEYEHAKKLIIFLNENNVPVQLTSISAPEHKFEGLTQIFQKAYEHEQHISESINNIVDHAIKSKDHATFNFLQWYVAEQHEEEVLFKDILDKIELIGNENHGLYLADQYVKGIAKSRKS

SEQ ID NO: 5038 - protein, 1379 aa, Artificial Sequence
  SARS-CoV-2/Australia/VIC01/2020__EPI_ISL_406844 spike protein (1-1211)(I714C_Y1110C) Ferritin construct
MFVFLVLLPLVSSQCVNLTTRTQLPPAYTNSFTRGVYYPDKVFRSSVLHSTQDLFLPFFSNVTWFHAIHVSGTNGTKRFDNPVLPFNDGVYFASTEKSNIIRGWIFGTTLDSKTQSLLIVNNATNVVIKVCEFQFCNDPFLGVYYHKNNKSWMESEFRVYSSANNCTFEYVSQPFLMDLEGKQGNFKNLREFVFKNIDGYFKIYSKHTPINLVRDLPQGFSALEPLVDLPIGINITRFQTLLALHRRYLTPGDSSSGWTAGAAAYYVGYLQPRTFLLKYNENGTITDAVDCALDPLSETKCTLKSFTVEKGIYQTSNFRVQPTESIVRFPNITNLCPFGEVFNATRFASVYAWNRKRISNCVADYSVLYNSASFSTFKCYGVSPTKLNDLCFTNVYADSFVIRGDEVRQIAPGQTGKIADYNYKLPDDFTGCVIAWNSNNLDSKVGGNYNYLYRLFRKSNLKPFERDISTEIYQAGSTPCNGVEGFNCYFPLQSYGFQPTNGVGYQPYRVVVLSFELLHAPATVCGPKKSTNLVKNKCVNFNFNGLTGTGVLTESNKKFLPFQQFGRDIADTTDAVRDPQTLEILDITPCSFGGVSVITPGTNTSNQVAVLYQDVNCTEVPVAIHADQLTPTWRVYSTGSNVFQTRAGCLIGAEHVNNSYECDIPIGAGICASYQTQTNSPRRARSVASQSIIAYTMSLGAENSVAYSNNSIACPTNFTISVTTEILPVSMTKTSVDCTMYICGDSTECSNLLLQYGSFCTQLNRALTGIAVEQDKNTQEVFAQVKQIYKTPPIKDFGGFNFSQILPDPSKPSKRSFIEDLLFNKVTLADAGFIKQYGDCLGDIAARDLICAQKFNGLTVLPPLLTDEMIAQYTSALLAGTITSGWTFGAGAALQIPFAMQMAYRFNGIGVTQNVLYENQKLIANQFNSAIGKIQDSLSSTASALGKLQDVVNQNAQALNTLVKQLSSNFGAISSVLNDILSRLDKVEAEVQIDRLITGRLQSLQTYVTQQLIRAAEIRASANLAATKMSECVLGQSKRVDFCGKGYHLMSFPQSAPHGVVFLHVTYVPAQEKNFTTAPAICHDGKAHFPREGVFVSNGTHWFVTQRNFCEPQIITTDNTFVSGNCDVVIGIVNNTVYDPLQPELDSFKEELDKYFKNHTSPDVDLGDISGINASVVNIQKEIDRLNEVAKNLNESLIDLQELGKYEQYIKGGGGSDIIKLLNEQVNKEMQSSNLYMSMSSWCYTHSLDGAGLFLFDHAAEEYEHAKKLIIFLNENNVPVQLTSISAPEHKFEGLTQIFQKAYEHEQHISESINNIVDHAIKSKDHATFNFLQWYVAEQHEEEVLFKDILDKIELIGNENHGLYLADQYVKGIAKSRKS

SEQ ID NO: 5039 - protein, 1379 aa, Artificial Sequence
  SARS-CoV-2/Germany/BavPat1/2020__EPI_ISL_406862 spike protein (1-1211)(I714C_Y1110C) Ferritin construct
MFVFLVLLPLVSSQCVNLTTRTQLPPAYTNSFTRGVYYPDKVFRSSVLHSTQDLFLPFFSNVTWFHAIHVSGTNGTKRFDNPVLPFNDGVYFASTEKSNIIRGWIFGTTLDSKTQSLLIVNNATNVVIKVCEFQFCNDPFLGVYYHKNNKSWMESEFRVYSSANNCTFEYVSQPFLMDLEGKQGNFKNLREFVFKNIDGYFKIYSKHTPINLVRDLPQGFSALEPLVDLPIGINITRFQTLLALHRSYLTPGDSSSGWTAGAAAYYVGYLQPRTFLLKYNENGTITDAVDCALDPLSETKCTLKSFTVEKGIYQTSNFRVQPTESIVRFPNITNLCPFGEVFNATRFASVYAWNRKRISNCVADYSVLYNSASFSTFKCYGVSPTKLNDLCFTNVYADSFVIRGDEVRQIAPGQTGKIADYNYKLPDDFTGCVIAWNSNNLDSKVGGNYNYLYRLFRKSNLKPFERDISTEIYQAGSTPCNGVEGFNCYFPLQSYGFQPTNGVGYQPYRVVVLSFELLHAPATVCGPKKSTNLVKNKCVNFNFNGLTGTGVLTESNKKFLPFQQFGRDIADTTDAVRDPQTLEILDITPCSFGGVSVITPGTNTSNQVAVLYQGVNCTEVPVAIHADQLTPTWRVYSTGSNVFQTRAGCLIGAEHVNNSYECDIPIGAGICASYQTQTNSPRRARSVASQSIIAYTMSLGAENSVAYSNNSIACPTNFTISVTTEILPVSMTKTSVDCTMYICGDSTECSNLLLQYGSFCTQLNRALTGIAVEQDKNTQEVFAQVKQIYKTPPIKDFGGFNFSQILPDPSKPSKRSFIEDLLFNKVTLADAGFIKQYGDCLGDIAARDLICAQKFNGLTVLPPLLTDEMIAQYTSALLAGTITSGWTFGAGAALQIPFAMQMAYRFNGIGVTQNVLYENQKLIANQFNSAIGKIQDSLSSTASALGKLQDVVNQNAQALNTLVKQLSSNFGAISSVLNDILSRLDKVEAEVQIDRLITGRLQSLQTYVTQQLIRAAEIRASANLAATKMSECVLGQSKRVDFCGKGYHLMSFPQSAPHGVVFLHVTYVPAQEKNFTTAPAICHDGKAHFPREGVFVSNGTHWFVTQRNFCEPQIITTDNTFVSGNCDVVIGIVNNTVYDPLQPELDSFKEELDKYFKNHTSPDVDLGDISGINASVVNIQKEIDRLNEVAKNLNESLIDLQELGKYEQYIKGGGGSDIIKLLNEQVNKEMQSSNLYMSMSSWCYTHSLDGAGLFLFDHAAEEYEHAKKLIIFLNENNVPVQLTSISAPEHKFEGLTQIFQKAYEHEQHISESINNIVDHAIKSKDHATFNFLQWYVAEQHEEEVLFKDILDKIELIGNENHGLYLADQYVKGIAKSRKS

SEQ ID NO: 5040 - protein, 1379 aa, Artificial Sequence
  SARS-CoV-2/Wuhan/HBCDC-HB-02/2020__EPI_ISL_412978 spike protein (1-1211)(I714C_Y1110C) Ferritin construct
MFVFLVLLPLVSSQCVNLTTRTQLPPAYTNSFTRGVYYPDKVFRSSVLHSTQDLFLPFFSNVTWFHAIHVSGTNGTKRFDNPVLPFNDGVYFASTEKSNIIRGWIFGTTLDSKTQSLLIVNNATNVVIKVCEFQFCNDPFLGVYYHKNNKSWMESEFRVYSSANNCTFEYVSQPFLMDLEGKQGNFKNLREFVFKNIDGYFKIYSKHTPINLVRDLPQGFSALEPLVDLPIGINITRFQTLLALHRSYLTPGDSSSGWTAGAAAYYVGYLQPRTFLLKYNENGTITDAVDCALDPLSETKCTLKSFTVEKGIYQTSNFRVQPTESIVRFPNITNLCPFGEVFNATRFASVYAWNRKRISNCVADYSVLYNSASFSTFKCYGVSPTKLNDLCFTNVYADSFVIRGDEVRQIAPGQTGKIADYNYKLPDDFTGCVIAWNSNNLDSKVGGNYNYLYRLFRKSNLKPFERDISTEIYQAGSTPCNGVEGFNCYFPLQSYGFQPTNGVGYQPYRVVVLSFELLHAPATVCGPKKSTNLVKNKCVNFNFNGLTGTGVLTESNKKFLPFQQFGRDIADTTDAVRDPQTLEILDITPCSFGGVSVITPGTNTSNQVAVLYQDVNCTEVPVAIHADQLTPTWRVYSTGSNVFQTRAGCLIGAEHVNNSYECDIPIGAGICASYQTQTNSPRRARSVASQSIIAYTMSLGAENSVAYSNNSIACPTNFTISVTTEILPVSMTKTSVDCTMYICGDSTECSNFLLQYGSFCTQLNRALTGIAVEQDKNTQEVFAQVKQIYKTPPIKDFGGFNFSQILPDPSKPSKRSFIEDLLFNKVTLADAGFIKQYGDCLGDIAARDLICAQKFNGLTVLPPLLTDEMIAQYTSALLAGTITSGWTFGAGAALQIPFAMQMAYRFNGIGVTQNVLYENQKLIANQFNSAIGKIQDSLSSTASALGKLQDVVNQNAQALNTLVKQLSSNFGAISSVLNDILSRLDKVEAEVQIDRLITGRLQSLQTYVTQQLIRAAEIRASANLAATKMSECVLGQSKRVDFCGKGYHLMSFPQSAPHGVVFLHVTYVPAQEKNFTTAPAICHDGKAHFPREGVFVSNGTHWFVTQRNFCEPQIITTDNTFVSGNCDVVIGIVNNTVYDPLQPELDSFKEELDKYFKNHTSPDVDLGDISGINASVVNIQKEIDRLNEVAKNLNESLIDLQELGKYEQYIKGGGGSDIIKLLNEQVNKEMQSSNLYMSMSSWCYTHSLDGAGLFLFDHAAEEYEHAKKLIIFLNENNVPVQLTSISAPEHKFEGLTQIFQKAYEHEQHISESINNIVDHAIKSKDHATFNFLQWYVAEQHEEEVLFKDILDKIELIGNENHGLYLADQYVKGIAKSRKS

SEQ ID NO: 5041 - protein, 1379 aa, Artificial Sequence
  SARS-CoV-2/Australia/QLD02/2020__EPI_ISL_407896 spike protein (1-1211)(I714C_Y1110C) Ferritin construct
MFVFLVLLPLVSSQCVNLTTRTQLPPAYTNSFTRGVYYPDKVFRSSVLHSTQDLFLPFFSNVTWFHAIHVSGTNGTKRFDNPVLPFNDGVYFASTEKSNIIRGWIFGTTLDSKTQSLLIVNNATNVVIKVCEFQFCNDPFLGVYYHKNNKSWMESEFRVYSSANNCTFEYVSQPFLMDLEGKQGNFKNLREFVFKNIDGYFKIYSKHTPINLVRDLPQGFSALEPLVDLPIGINITRFQTLLALHRSYLTPGDSSSGWTAGAAAYYVGYLQPRTFLLKYNENGTITDAVDCALDPLSETKCTLKSFTVEKGIYQTSNFRVQPTESIVRFPNITNLCPFGEVFNATRFASVYAWNRKRISNCVADYSVLYNSASFSTFKCYGVSPTKLNDLCFTNVYADSFVIRGDEVRQIAPGQTGKIADYNYKLPDDFTGCVIAWNSNNLDSKVGGNYNYLYRLFRKSNLKPFERDISTEIYQAGSTPCNGVEGFNCYFPLQSYGFQPTNGVGYQPYRVVVLSFELLHAPATVCGPKKSTNLVKNKCVNFNFNGLTGTGVLTESNKKFLPFQQFGRDIADTTDAVRDPQTLEILDITPCSFGGVSVITPGTNTSNQVAVLYQDVNCTEVPVAIHADQLTPTWRVYSTGSNVFQTRAGCLIGAEHVNNSYECDIPIGAGICASYQTQTNSPRRARSVASQSIIAYTMSLGAENSVAYSNNSIACPTNFTISVTTEILPVSMTKTSVDCTMYICGDSTECSNLLLQYGSFCTQLNRALTGIAVEQDKNTQEVFAQVKQIYKTPPIKDFGGFNFSQILPDPSKPSKRSFIEDLLFNKVTLADAGFIKQYGDCLGDIAARDLICAQKFNGLTVLPPLLTDEMIAQYTSALLAGTITSGWTFGAGAALQIPFAMQMAYRFNGIGVTQNVLYENQKLIANQFNSAIGKIQDSLSSTASALGKLQDVVNQNAQALNTLVKQLSSNFGAISSVLNDILSRLDKVEAEVQIDRLITGRLQSLQTYVTQQLIRAAEIRASANLAATKMSECVLGQSKRVDFCGKGYHLMSFPQSAPHGVVFLHVTYVPAQEKNFTTAPAICHDGKAHFPREGVFVSNGTHWFVTQRNFCEPQIITTDNTFVSGNCDVVIGIVNNTVYDPLQLELDSFKEELDKYFKNHTSPDVDLGDISGINASVVNIQKEIDRLNEVAKNLNESLIDLQELGKYEQYIKGGGGSDIIKLLNEQVNKEMQSSNLYMSMSSWCYTHSLDGAGLFLFDHAAEEYEHAKKLIIFLNENNVPVQLTSISAPEHKFEGLTQIFQKAYEHEQHISESINNIVDHAIKSKDHATFNFLQWYVAEQHEEEVLFKDILDKIELIGNENHGLYLADQYVKGIAKSRKS

SEQ ID NO: 5042 - protein, 1379 aa, Artificial Sequence
  SARS-CoV-2/India/1-31/2020__EPI_ISL_413523 spike protein (1-1211)(I714C_Y1110C) Ferritin construct
MFVFLVLLPLVSSQCVNLTTRTQLPPAYTNSFTRGVYYPDKVFRSSVLHSTQDLFLPFFSNVTWFHAIHVSGTNGTKRFDNPVLPFNDGVYFASTEKSNIIRGWIFGTTLDSKTQSLLIVNNATNVVIKVCEFQFCNDPFLGVYYHKNNKSWMESEFRVYSSANNCTFEYVSQPFLMDLEGKQGNFKNLREFVFKNIDGYFKIYSKHTPINLVRDLPQGFSALEPLVDLPIGINITRFQTLLALHRSYLTPGDSSSGWTAGAAAYYVGYLQPRTFLLKYNENGTITDAVDCALDPLSETKCTLKSFTVEKGIYQTSNFRVQPTESIVRFPNITNLCPFGEVFNATRFASVYAWNRKRISNCVADYSVLYNSASFSTFKCYGVSPTKLNDLCFTNVYADSFVIRGDEVRQIAPGQTGKIADYNYKLPDDFTGCVIAWNSNNLDSKVGGNYNYLYRLFRKSNLKPFERDISTEIYQAGSTPCNGVEGFNCYFPLQSYGFQPTNGVGYQPYRVVVLSFELLHAPATVCGPKKSTNLVKNKCVNFNFNGLTGTGVLTESNKKFLPFQQFGRDIADTTDAVRDPQTLEILDITPCSFGGVSVITPGTNTSNQVAVLYQDVNCTEVPVAIHADQLTPTWRVYSTGSNVFQTRAGCLIGAEHVNNSYECDIPIGAGICASYQTQTNSPRRARSVASQSIIAYTMSLGAENSVAYSNNSIACPTNFTISVTTEILPVSMTKTSVDCTMYICGDSTECSNLLLQYGSFCTQLNRALTGIAVEQDKNTQEVFAQVKQIYKTPPIKDFGGFNFSQILPDPSKPSKRSFIEDLLFNKVTLADAGFIKQYGDCLGDIAARDLICAQKFNGLTVLPPLLTDEMIAQYTSALLAGTITSGWTFGAGAALQIPFAMQMAYRFNGIGVTQNVLYENQKLIANQFNSVIGKIQDSLSSTASALGKLQDVVNQNAQALNTLVKQLSSNFGAISSVLNDILSRLDKVEAEVQIDRLITGRLQSLQTYVTQQLIRAAEIRASANLAATKMSECVLGQSKRVDFCGKGYHLMSFPQSAPHGVVFLHVTYVPAQEKNFTTAPAICHDGKAHFPREGVFVSNGTHWFVTQRNFCEPQIITTDNTFVSGNCDVVIGIVNNTVYDPLQPELDSFKEELDKYFKNHTSPDVDLGDISGINASVVNIQKEIDRLNEVAKNLNESLIDLQELGKYEQYIKGGGGSDIIKLLNEQVNKEMQSSNLYMSMSSWCYTHSLDGAGLFLFDHAAEEYEHAKKLIIFLNENNVPVQLTSISAPEHKFEGLTQIFQKAYEHEQHISESINNIVDHAIKSKDHATFNFLQWYVAEQHEEEVLFKDILDKIELIGNENHGLYLADQYVKGIAKSRKS

SEQ ID NO: 5043 - protein, 1379 aa, Artificial Sequence
  SARS-CoV-2/Guangdong/GD2020087-P0008/2020__EPI_ISL_413863 spike protein (1-1211)(I714C_Y1110C) Ferritin construct
MFVFLVLLPLVSSQCVNLTTRTQLPPAYTNSFTRGVYYPDKVFRSSVLHSTQDLFLPFFSNVTWFHAIHVSGTNGTKRFDNPVLPFNDGVYFASTEKSNIIRGWIFGTTLDSKTQSLLIVNNATNVVIKVCEFQFCNDPFLGVYYHKNNKSWMESEFRVYSSANNCTFEYVSQPFLMDLEGKQGNFKNLREFVFKNIDGYFKIYSKHTPINLVRDLPQGFSALEPLVDLPIGINITRFQTLLALHRSYLTPGDSSSGWTAGAAAYYVGYLQPRTFLLKYNENGTITDAVDCALDPLSETKCTLKSFTVEKGIYQTSNFRVQPTESIVRFPNITNLCPFGEVFNATRFASVYAWNRKRISNCVADYSVLYNSASFSTFKCYGVSPTKLNDLCFTNVYADSFVIRGDEVREIAPGQTGKIADYNYKLPDDFTGCVIAWNSNNLDSKVGGNYNYLYRLFRKSNLKPFERDISTEIYQAGSTPCNGVEGFNCYFPLQSYGFQPTNGVGYQPYRVVVLSFELLHAPATVCGPKKSTNLVKNKCVNFNFNGLTGTGVLTESNKKFLPFQQFGRDIADTTDAVRDPQTLEILDITPCSFGGVSVITPGTNTSNQVAVLYQDVNCTEVPVAIHADQLTPTWRVYSTGSNVFQTRAGCLIGAEHVNNSYECDIPIGAGICASYQTQTNSPRRARSVASQSIIAYTMSLGAENSVAYSNNSIACPTNFTISVTTEILPVSMTKTSVDCTMYICGDSTECSNLLLQYGSFCTQLNRALTGIAVEQDKNTQEVFAQVKQIYKTPPIKDFGGFNFSQILPDPSKPSKRSFIEDLLFNKVTLADAGFIKQYGDCLGDIAARDLICAQKFNGLTVLPPLLTDEMIAQYTSALLAGTITSGWTFGAGAALQIPFAMQMAYRFNGIGVTQNVLYENQKLIANQFNSAIGKIQDSLSSTASALGKLQDVVNQNAQALNTLVKQLSSNFGAISSVLNDILSRLDKVEAEVQIDRLITGRLQSLQTYVTQQLIRAAEIRASANLAATKMSECVLGQSKRVDFCGKGYHLMSFPQSAPHGVVFLHVTYVPAQEKNFTTAPAICHDGKAHFPREGVFVSNGTHWFVTQRNFCEPQIITTDNTFVSGNCDVVIGIVNNTVYDPLQPELDSFKEELDKYFKNHTSPDVDLGDISGINASVVNIQKEIDRLNEVAKNLNESLIDLQELGKYEQYIKGGGGSDIIKLLNEQVNKEMQSSNLYMSMSSWCYTHSLDGAGLFLFDHAAEEYEHAKKLIIFLNENNVPVQLTSISAPEHKFEGLTQIFQKAYEHEQHISESINNIVDHAIKSKDHATFNFLQWYVAEQHEEEVLFKDILDKIELIGNENHGLYLADQYVKGIAKSRKS

SEQ ID NO: 5044 - protein, 1379 aa, Artificial Sequence
  SARS-CoV-2/Sweden/01/2020__EPI_ISL_411951 spike protein (1-1211)(I714C_Y1110C) Ferritin construct
MFVFLVLLPLVSSQCVNLTTRTQLPPAYTNSFTRGVYYPDKVFRSSVLHSTQDLFLPFFSNVTWFHAIHVSGTNGTKRFDNPVLPFNDGVYFASTEKSNIIRGWIFGTTLDSKTQSLLIVNNATNVVIKVCEFQFCNDPFLGVYYHKNNKSWMESEFRVYSSANNCTFEYVSQPFLMDLEGKQGNFKNLREFVFKNIDGYFKIYSKHTPINLVRDLPQGFSALEPLVDLPIGINITRFQTLLALHRSYLTPGDSSSGWTAGAAAYYVGYLQPRTFLLKYNENGTITDAVDCALDPLSETKCTLKSFTVEKGIYQTSNFRVQPTESIVRFPNITNLCPFGEVFNATRFASVYAWNRKRISNCVADYSVLYNSASFSTFKCYGVSPTKLNDLCFTNVYADSFVIRGDEVRQIAPGQTGKIADYNYKLPDDFTGCVIAWNSNNLDSKVGGNYNYLYRLFRKSNLKPFERDISTEIYQAGSTPCNGVEGFNCYFPLQSYGFQPTNGVGYQPYRVVVLSFELLHAPATVCGPKKSTNLVKNKCVNFNFNGLTGTGVLTESNKKFLPFQQFGRDIADTTDAVRDPQTLEILDITPCSFGGVSVITPGTNTSNQVAVLYQDVNCTEVPVAIHADQLTPTWRVYSTGSNVFQTRAGCLIGAEHVNNSYECDIPIGAGICASYQTQTNSPRRARSVASQSIIAYTMSLGAENSVAYSNNSIACPTNFTISVTTEILPVSMTKTSVDCTMYICGDSTECSNLLLQYGSFCTQLNRALTGIAVEQDKNTQEVFAQVKQIYKTPPIKDCGGFNFSQILPDPSKPSKRSFIEDLLFNKVTLADAGFIKQYGDCLGDIAARDLICAQKFNGLTVLPPLLTDEMIAQYTSALLAGTITSGWTFGAGAALQIPFAMQMAYRFNGIGVTQNVLYENQKLIANQFNSAIGKIQDSLSSTASALGKLQDVVNQNAQALNTLVKQLSSNFGAISSVLNDILSRLDKVEAEVQIDRLITGRLQSLQTYVTQQLIRAAEIRASANLAATKMSECVLGQSKRVDFCGKGYHLMSFPQSAPHGVVFLHVTYVPAQEKNFTTAPAICHDGKAHFPREGVFVSNGTHWFVTQRNFCEPQIITTDNTFVSGNCDVVIGIVNNTVYDPLQPELDSFKEELDKYFKNHTSPDVDLGDISGINASVVNIQKEIDRLNEVAKNLNESLIDLQELGKYEQYIKGGGGSDIIKLLNEQVNKEMQSSNLYMSMSSWCYTHSLDGAGLFLFDHAAEEYEHAKKLIIFLNENNVPVQLTSISAPEHKFEGLTQIFQKAYEHEQHISESINNIVDHAIKSKDHATFNFLQWYVAEQHEEEVLFKDILDKIELIGNENHGLYLADQYVKGIAKSRKS

SEQ ID NO: 5045 - protein, 1379 aa, Artificial Sequence
  SARS-CoV-2/Tianmen/HBCDC-HB-07/2020__EPI_ISL_412983 spike protein (1-1211)(I714C_Y1110C) Ferritin construct
MFVFLVLLPLVSSQCVNLTTRTQLPPAYTNSFTRGVYYPDKVFRSSVLHSTQDLFLPFFSNVTWFHAIHVSGTNGTKRFDNPVLPFNDGVYFASTEKSNIIRGWIFGTTLDSKTQSLLIVNNATNVVIKVCEFQFCNDPFLGVYYHKNNKSWMESEFRVYSSANNCTFEYVSQPFLMDLEGKQGNFKNLREFVFKNIDGYFKIYSKHTPINLVRDLPQGFSALEPLVDLPIGINITRFQTLLALHRSYLTPGDSSSGWTAGAAAYYVGYLQPRTFLLKYNENGTITDAVDCALDPLSETKCTLKSFTVEKGIYQTSNFRVQPTESIVRFPNITNLCPFGEVFNATRFASVYAWNRKRISNCVADYSVLYNSASFSTFKCYGVSPTKLNDLCFTNVYADSFVIRGDEVRQIAPGQTGKIADYNYKLPDDFTGCVIAWNSNNLDSKVGGNYNYLYRLFRKSNLKPFERDISTEIYQAGSTPCNGVEGFNCYFPLQSYGFQPTNGVGYQPYRVVVLSFELLHAPATVCGPKKSTNLVKNKCVNFNFNGLTGTGVLTESNKKFLPFQQFGRDIADTTDAVRDPQTLEILDITPCSFGGVSVITPGTNTSNQVAVLYQDLNCTEVPVAIHADQLTPTWRVYSTGSNVFQTRAGCLIGAEHVNNSYECDIPIGAGICASYQTQTNSPRRARSVASQSIIAYTMSLGAENSVAYSNNSIACPTNFTISVTTEILPVSMTKTSVDCTMYICGDSTECSNLLLQYGSFCTQLNRALTGIAVEQDKNTQEVFAQVKQIYKTPPIKDFGGFNFSQILPDPSKPSKRSFIEDLLFNKVTLADAGFIKQYGDCLGDIAARDLICAQKFNGLTVLPPLLTDEMIAQYTSALLAGTITSGWTFGAGAALQIPFAMQMAYRFNGIGVTQNVLYENQKLIANQFNSAIGKIQDSLSSTASALGKLQDVVNQNAQALNTLVKQLSSNFGAISSVLNDILSRLDKVEAEVQIDRLITGRLQSLQTYVTQQLIRAAEIRASANLAATKMSECVLGQSKRVDFCGKGYHLMSFPQSAPHGVVFLHVTYVPAQEKNFTTAPAICHDGKAHFPREGVFVSNGTHWFVTQRNFCEPQIITTDNTFVSGNCDVVIGIVNNTVYDPLQPELDSFKEELDKYFKNHTSPDVDLGDISGINASVVNIQKEIDRLNEVAKNLNESLIDLQELGKYEQYIKGGGGSDIIKLLNEQVNKEMQSSNLYMSMSSWCYTHSLDGAGLFLFDHAAEEYEHAKKLIIFLNENNVPVQLTSISAPEHKFEGLTQIFQKAYEHEQHISESINNIVDHAIKSKDHATFNFLQWYVAEQHEEEVLFKDILDKIELIGNENHGLYLADQYVKGIAKSRKS

SEQ ID NO: 5046 - protein, 1379 aa, Artificial Sequence
  SARS-CoV-2/Hong Kong/case42_VM20002493/2020__EPI_ISL_414527 spike protein (1-1211)(I714C_Y1110C) Ferritin construct
MFVFLVLLPLVSSQCVNLTTRTQLPPAYTNSFTRGVYYPDKVFRSSVLHSTQDLFLPFFSNVTWFHAIHVSGTNGTKRFDNPVLPFNDGVYFASTEKSNIIRGWIFGTTLDSKTQSLLIVNNATNVVIKVCEFQFCNDPFLGVYYHKNNKSWMESEFRVYSSANNCTFEYVSQPFLMDLEGKQGNFKNLREFVFKNIDGYFKIYSKHTPINLVRDLPQGFSALEPLVDLPIGINITRFQTLLALHRSYLTPGDSSSGWTAGAAAYYVGYLQPRTFLLKYNENGTITDAVDCALDPLSETKCTLKSFTVEKGIYQTSNFRVQPTESIVRFPNITNLCPFGEVFNATRFASVYAWNRKRISNCVADYSVLYNSASFSTFKCYGVSPTKLNDLCFTNVYADSFVIRGDEVRQIAPGQTGKIADYNYKLPDDFTGCVIAWNSNNLDSKVGGNYNYLYRLFRKSNLKPFERDISTEIYQAGSTPCNGVEGFNCYFPLQSYGFQPTNGVGYQPYRVVVLSFELLHAPATVCGPKKSTNLVKNKCVNFNFNGLTGTGVLTESNKKFLPFQQFGRDIADTTDAVRDPQTLEILDITPCSFGGVSVITPGTNTSNQVAVLYQDVNCTEVPVAIHADQLTPTWRVYSTGSNVFQTRAGCLIGAEHVNNSYECDIPIGAGICASYQTQTNSPRRARSVASQSIIAYTMSLGAENSVAYSNNSIACPTNFAISVTTEILPVSMTKTSVDCTMYICGDSTECSNLLLQYGSFCTQLNRALTGIAVEQDKNTQEVFAQVKQIYKTPPIKDFGGFNFSQILPDPSKPSKRSFIEDLLFNKVTLADAGFIKQYGDCLGDIAARDLICAQKFNGLTVLPPLLTDEMIAQYTSALLAGTITSGWTFGAGAALQIPFAMQMAYRFNGIGVTQNVLYENQKLIANQFNSAIGKIQDSLSSTASALGKLQDVVNQNAQALNTLVKQLSSNFGAISSVLNDILSRLDKVEAEVQIDRLITGRLQSLQTYVTQQLIRAAEIRASANLAATKMSECVLGQSKRVDFCGKGYHLMSFPQSAPHGVVFLHVTYVPAQEKNFTTAPAICHDGKAHFPREGVFVSNGTHWFVTQRNFCEPQIITTDNTFVSGNCDVVIGIVNNTVYDPLQPELDSFKEELDKYFKNHTSPDVDLGDISGINASVVNIQKEIDRLNEVAKNLNESLIDLQELGKYEQYIKGGGGSDIIKLLNEQVNKEMQSSNLYMSMSSWCYTHSLDGAGLFLFDHAAEEYEHAKKLIIFLNENNVPVQLTSISAPEHKFEGLTQIFQKAYEHEQHISESINNIVDHAIKSKDHATFNFLQWYVAEQHEEEVLFKDILDKIELIGNENHGLYLADQYVKGIAKSRKS

SEQ ID NO: 5047 - protein, 1379 aa, Artificial Sequence
  SARS-CoV-2/USA/CruiseA-23/2020__EPI_ISL_414482 spike protein (1-1211)(I714C_Y1110C) Ferritin construct
MFVFLVLLPLVSSQCVNLTTRTQLPPAYTNSFTRGVYYPDKVFRSSVLHSTQDLFLPFFSNVTWFHAIHVSGTNGTKRFDNPVLPFNDGVYFASTEKSNIIRGWIFGTTLDSKTQSLLIVNNATNVVIKVCEFQFCNDPFLGVYYHKNNKSWMESEFRVYSSANNCTFEYVSQPFLMDLEVKQGNFKNLREFVFKNIDGYFKIYSKHTPINLVRDLPQGFSALEPLVDLPIGINITRFQTLLALHRSYLTPGDSSSGWTAGAAAYYVGYLQPRTFLLKYNENGTITDAVDCALDPLSETKCTLKSFTVEKGIYQTSNFRVQPTESIVRFPNITNLCPFGEVFNATRFASVYAWNRKRISNCVADYSVLYNSASFSTFKCYGVSPTKLNDLCFTNVYADSFVIRGDEVRQIAPGQTGKIADYNYKLPDDFTGCVIAWNSNNLDSKVGGNYNYLYRLFRKSNLKPFERDISTEIYQAGSTPCNGVEGFNCYFPLQSYGFQPTNGVGYQPYRVVVLSFELLHAPATVCGPKKSTNLVKNKCVNFNFNGLTGTGVLTESNKKFLPFQQFGRDIADTTDAVRDPQTLEILDITPCSFGGVSVITPGTNTSNQVAVLYQDVNCTEVPVAIHADQLTPTWRVYSTGSNVFQTRAGCLIGAEHVNNSYECDIPIGAGICASYQTQTNSPRRARSVASQSIIAYTMSLGAENSVAYSNNSIACPTNFTISVTTEILPVSMTKTSVDCTMYICGDSTECSNLLLQYGSFCTQLNRALTGIAVEQDKNTQEVFAQVKQIYKTPPIKDFGGFNFSQILPDPSKPSKRSFIEDLLFNKVTLADAGFIKQYGDCLGDIAARDLICAQKFNGLTVLPPLLTDEMIAQYTSALLAGTITSGWTFGAGAALQIPFAMQMAYRFNGIGVTQNVLYENQKLIANQFNSAIGKIQDSLSSTASALGKLQDVVNQNAQALNTLVKQLSSNFGAISSVLNDILSRLDKVEAEVQIDRLITGRLQSLQTYVTQQLIRAAEIRASANLAATKMSECVLGQSKRVDFCGKGYHLMSFPQSAPHGVVFLHVTYVPAQEKNFTTAPAICHDGKAHFPREGVFVSNGTHWFVTQRNFCEPQIITTDNTFVSGNCDVVIGIVNNTVYDPLQPELDSFKEELDKYFKNHTSPDVDLGDISGINASVVNIQKEIDRLNEVAKNLNESLIDLQELGKYEQYIKGGGGSDIIKLLNEQVNKEMQSSNLYMSMSSWCYTHSLDGAGLFLFDHAAEEYEHAKKLIIFLNENNVPVQLTSISAPEHKFEGLTQIFQKAYEHEQHISESINNIVDHAIKSKDHATFNFLQWYVAEQHEEEVLFKDILDKIELIGNENHGLYLADQYVKGIAKSRKS

SEQ ID NO: 5048 - protein, 1379 aa, Artificial Sequence
  SARS-CoV-2/Hong Kong/case85_VM20002868/2020__EPI_ISL_414519 spike protein (1-1211)(I714C_Y1110C) Ferritin construct
MFVFLVLVPLVSSQCVNLTTRTQLPPAYTNSFTRGVYYPDKVFRSSVLHSTQDLFLPFFSNVTWFHAIHVSGTNGTKRFDNPVLPFNDGVYFASTEKSNIIRGWIFGTTLDSKTQSLLIVNNATNVVIKVCEFQFCNDPFLGVYYHKNNKSWMESEFRVYSSANNCTFEYVSQPFLMDLEGKQGNFKNLREFVFKNIDGYFKIYSKHTPINLVRDLPQGFSALEPLVDLPIGINITRFQTLLALHRSYLTPGDSSSGWTAGAAAYYVGYLQPRTFLLKYNENGTITDAVDCALDPLSETKCTLKSFTVEKGIYQTSNFRVQPTESIVRFPNITNLCPFGEVFNATRFASVYAWNRKRISNCVADYSVLYNSASFSTFKCYGVSPTKLNDLCFTNVYADSFVIRGDEVRQIAPGQTGKIADYNYKLPDDFTGCVIAWNSNNLDSKVGGNYNYLYRLFRKSNLKPFERDISTEIYQAGSTPCNGVEGFNCYFPLQSYGFQPTNGVGYQPYRVVVLSFELLHAPATVCGPKKSTNLVKNKCVNFNFNGLTGTGVLTESNKKFLPFQQFGRDIADTTDAVRDPQTLEILDITPCSFGGVSVITPGTNTSNQVAVLYQDVNCTEVPVAIHADQLTPTWRVYSTGSNVFQTRAGCLIGAEHVNNSYECDIPIGAGICASYQTQTNSPRRARSVASQSIIAYTMSLGAENSVAYSNNSIACPTNFTISVTTEILPVSMTKTSVDCTMYICGDSTECSNLLLQYGSFCTQLNRALTGIAVEQDKNTQEVFAQVKQIYKTPPIKDFGGFNFSQILPDPSKPSKRSFIEDLLFNKVTLADAGFIKQYGDCLGDIAARDLICAQKFNGLTVLPPLLTDEMIAQYTSALLAGTITSGWTFGAGAALQIPFAMQMAYRFNGIGVTQNVLYENQKLIANQFNSAIGKIQDSLSSTASALGKLQDVVNQNAQALNTLVKQLSSNFGAISSVLNDILSRLDKVEAEVQIDRLITGRLQSLQTYVTQQLIRAAEIRASANLAATKMSECVLGQSKRVDFCGKGYHLMSFPQSAPHGVVFLHVTYVPAQEKNFTTAPAICHDGKAHFPREGVFVSNGTHWFVTQRNFCEPQIITTDNTFVSGNCDVVIGIVNNTVYDPLQPELDSFKEELDKYFKNHTSPDVDLGDISGINASVVNIQKEIDRLNEVAKNLNESLIDLQELGKYEQYIKGGGGSDIIKLLNEQVNKEMQSSNLYMSMSSWCYTHSLDGAGLFLFDHAAEEYEHAKKLIIFLNENNVPVQLTSISAPEHKFEGLTQIFQKAYEHEQHISESINNIVDHAIKSKDHATFNFLQWYVAEQHEEEVLFKDILDKIELIGNENHGLYLADQYVKGIAKSRKS

SEQ ID NO: 5049 - protein, 1379 aa, Artificial Sequence; identical to SEQ ID NO: 5039
  SARS-CoV-2/England/200990660/2020__EPI_ISL_414523 spike protein (1-1211)(I714C_Y1110C) Ferritin construct

SEQ ID NO: 5050 - protein, 1379 aa, Artificial Sequence
  SARS-CoV-2/Australia/NSW09/2020__EPI_ISL_413595 spike protein (1-1211)(I714C_Y1110C) Ferritin construct
MFVFLVLLPLVSSQCVNLTTRTQLPPAYTNSFTRGVYYPDKVFRSSVLHSTQDLFLPFFSNVTWFHAIHVSGTNGTKRFDNPVLPFNDGVYFASTEKSNIIRGWIFGTTLDSKTQSLLIVNNATNVVIKVCEFQFCNDPFLGVYYHKNNKSWMESEFRVYSSANNCTFEYVSQPFLMDLEGKQGNFKNLREFVFKNIDGYFKIYSKHTPINLVRDLPQGFSALEPLVDLPIGINITRFQTLLALHRSYLTPGDSSSGWTAGAAAYYVGYLQPRTFLLKYNENGTITDAVDCALDPLSETKCTLKSFTVEKGIYQTSNFRVQPTESIVRFPNITNLCPFGEVFNATRFASVYAWNRKRISNCVADYSVLYNSASFSTFKCYGVSPTKLNDLCFTNVYADSFVIRGDEVRQIAPGQTGKIADYNYKLPDDFTGCVIAWNSNNLDSKVGGNYNYLYRLFRKSNLKPFERDISTEIYQAGSTPCNGVEGFNCYFPLQSYGFQPTNGVGYQPYRVVVLSFELLHAPATVCGPKKSTNLVKNKCVNFNFNGLTGTGVLTESNKKFLPFQQFGRDIADTTDAVRDPQTLEILDITPCSFGGVSVITPGTNTSNQVAVLYQDVNCTEVPVAIHADQLTPTWRVYSTGSNVFQTRAGCLIGAEHVNNSYECDIPIGAGICASYQTQTNSPRRARSVASQSIIAYTMSLGAENSVAYSNNSIACPTNFTISVTTEILPVSMTKTSVDCTMYICGDSTECSNLLLQYGSFCTQLNRALTGIAVEQDKNTQEVFAQVKQIYKTPPIKDFGGFNFSQILPDPSKPSKRSFIEDLLFNKVTLADAGFIKQYGDCLGDIAARDLICAQKFNGLTVLPPLLTDEMIAQYTSALLAGTITSGWTFGAGAALQIPFAMQMAYRFNGIGVTQNVLYENQKLIANQFNSAIGKIQDSLSFTASALGKLQDVVNQNAQALNTLVKQLSSNFGAISSVLNDILSRLDKVEAEVQIDRLITGRLQSLQTYVTQQLIRAAEIRASANLAATKMSECVLGQSKRVDFCGKGYHLMSFPQSAPHGVVFLHVTYVPAQEKNFTTAPAICHDGKAHFPREGVFVSNGTHWFVTQRNFCEPQIITTDNTFVSGNCDVVIGIVNNTVYDPLQPELDSFKEELDKYFKNHTSPDVDLGDISGINASVVNIQKEIDRLNEVAKNLNESLIDLQELGKYEQYIKGGGGSDIIKLLNEQVNKEMQSSNLYMSMSSWCYTHSLDGAGLFLFDHAAEEYEHAKKLIIFLNENNVPVQLTSISAPEHKFEGLTQIFQKAYEHEQHISESINNIVDHAIKSKDHATFNFLQWYVAEQHEEEVLFKDILDKIELIGNENHGLYLADQYVKGIAKSRKS

SEQ ID NO: 5051 - protein, 1379 aa, Artificial Sequence; identical to SEQ ID NO: 5031
  SARS-CoV-2/Australia/NSW10/2020__EPI_ISL_413596 spike protein (1-1211)(I714C_Y1110C) Ferritin construct

SEQ ID NO: 5052 - protein, 1379 aa, Artificial Sequence
  SARS-CoV-2/Switzerland/1000477797/2020__EPI_ISL_413023 spike protein (1-1211)(I714C_Y1110C) Ferritin construct
MFVFLVLLPLVSSQCVNLTTRTQLPPAYTNSFTRGVYYPDKVFRSSVLHSTQDLFLPFFSNVTWFHAIHVSGTNGTKRFDNPVLPFNDGVYFASTEKSNIIRGWIFGTTLDSKTQSLLIVNNATNVVIKVCEFQFCNDPFLGVYYHKNNKSWMESEFRVYSSANNCTFEYVSQPFLMDLEGKQGNFKNLREFVFKNIDGYFNIYSKHTPINLVRDLPQGFSALEPLVDLPIGINITRFQTLLALHRSYLTPGDSSSGWTAGAAAYYVGYLQPRTFLLKYNENGTITDAVDCALDPLSETKCTLKSFTVEKGIYQTSNFRVQPTESIVRFPNITNLCPFGEVFNATRFASVYAWNRKRISNCVADYSVLYNSASFSTFKCYGVSPTKLNDLCFTNVYADSFVIRGDEVRQIAPGQTGKIADYNYKLPDDFTGCVIAWNSNNLDSKVGGNYNYLYRLFRKSNLKPFERDISTEIYQAGSTPCNGVEGFNCYFPLQSYGFQPTNGVGYQPYRVVVLSFELLHAPATVCGPKKSTNLVKNKCVNFNFNGLTGTGVLTESNKKFLPFQQFGRDIADTTDAVRDPQTLEILDITPCSFGGVSVITPGTNTSNQVAVLYQGVNCTEVPVAIHADQLTPTWRVYSTGSNVFQTRAGCLIGAEHVNNSYECDIPIGAGICASYQTQTNSPRRARSVASQSIIAYTMSLGAENSVAYSNNSIACPTNFTISVTTEILPVSMTKTSVDCTMYICGDSTECSNLLLQYGSFCTQLNRALTGIAVEQDKNTQEVFAQVKQIYKTPPIKDFGGFNFSQILPDPSKPSKRSFIEDLLFNKVTLADAGFIKQYGDCLGDIAARDLICAQKFNGLTVLPPLLTDEMIAQYTSALLAGTITSGWTFGAGAALQIPFAMQMAYRFNGIGVTQNVLYENQKLIANQFNSAIGKIQDSLSSTASALGKLQDVVNQNAQALNTLVKQLSSNFGAISSVLNDILSRLDKVEAEVQIDRLITGRLQSLQTYVTQQLIRAAEIRASANLAATKMSECVLGQSKRVDFCGKGYHLMSFPQSAPHGVVFLHVTYVPAQEKNFTTAPAICHDGKAHFPREGVFVSNGTHWFVTQRNFCEPQIITTDNTFVSGNCDVVIGIVNNTVYDPLQPELDSFKEELDKYFKNHTSPDVDLGDISGINASVVNIQKEIDRLNEVAKNLNESLIDLQELGKYEQYIKGGGGSDIIKLLNEQVNKEMQSSNLYMSMSSWCYTHSLDGAGLFLFDHAAEEYEHAKKLIIFLNENNVPVQLTSISAPEHKFEGLTQIFQKAYEHEQHISESINNIVDHAIKSKDHATFNFLQWYVAEQHEEEVLFKDILDKIELIGNENHGLYLADQYVKGIAKSRKS

SEQ ID NO: 5053 - protein, 1379 aa, Artificial Sequence
  SARS-CoV-2/Belgium/BA-02291/2020__EPI_ISL_415159 spike protein (1-1211)(I714C_Y1110C) Ferritin construct
MFVFLVLLPLVSSQCVNLTTRTQLPPAYTNSFTRGVYYPDKVFRSSVLHSTQDLFLPFFSNVTWFHAIHVSGTNGTKRFDNPVLPFNDGVYFASTEKSNIIRGWIFGTTLDSKTQSLLIVNNATNVVIKVCEFQFCNDPFLGVYYHKNNKSWMESEFRVYSSANNCTFEYVSQPFLMDLEGKQGNFKNLREFVFKNIDGYFKIYSKHTPINLVRDLPQGFSALEPLVDLPIGINITRFQTLLALHRSYLTPGDSSSGWTAGAAAYYVGYLQPRTFLLKYNENGTITDAVDCALDPLSETKCTLKSFTVEKGIYQTSNFRVQPTESIVRFPNITNLCPFGEVFNATRFASVYAWNRKRISNCVADYSVLYNSASFSTFKCYGVSPTKLNDLCFTNVYADSFVIRGDEVRQIAPGQTGKIADYNYKLPDDFTGCVIAWNSNNLDSKVGGNYNYLYRLFRRSNLKPFERDISTEIYQAGSTPCNGVEGFNCYFPLQSYGFQPTNGVGYQPYRVVVLSFELLPAPATVCGPKKSTNLVKNKCVNFNFNGLTGTGVLTESNKKFLPFQQFGRDIADTTDAVRDPQTLEILDITPCSFGGVSVITPGTNTSNQVAVLYQGVNCTEVPVAIHADQLTPTWRVYSTGSNVFQTRAGCLIGAEHVNNSYECDIPIGAGICASYQTQTNSPRRARSVASQSIIAYTMSLGAENSVAYSNNSIACPTNFTISVTTEILPVSMTKTSVDCTMYICGDSTECSNLLLQYGSFCTQLNRALTGIAVEQDKNTQEVFAQVKQIYKTPPIKDFGGFNFSQILPDPSKPSKRSFIEDLLFNKVTLADAGFIKQYGDCLGDIAARDLICAQKFNGLTVLPPLLTDEMIAQYTSALLAGTITSGWTFGAGAALQIPFAMQMAYRFNGIGVTQNVLYENQKLIANQFNSAIGKIQDSLSSAAPALGKLQDVVNQNAQALNTLVKQLSSNFGAISSVLNDILSRLDKVEAEVQIDRLITGRLQSLQTYVTQQLIRAAEIRASANLAATKMSECVLGQSKRVDFCGKGYHLMSFPQSAPHGVVFLHVTYVPAQEKNFTTAPAICHDGKAHFPREGVFVSNGTHWFVTQRNFCEPQIITTDNTFVSGNCDVVIGIVNNTVYDPLQPELDSFKEELDKYFKNHTSPDVDLGDISGINASVVNIQKEIDRLNEVAKNLNESLIDLQELGKYEQYIKGGGGSDIIKLLNEQVNKEMQSSNLYMSMSSWCYTHSLDGAGLFLFDHAAEEYEHAKKLIIFLNENNVPVQLTSISAPEHKFEGLTQIFQKAYEHEQHISESINNIVDHAIKSKDHATFNFLQWYVAEQHEEEVLFKDILDKIELIGNENHGLYLADQYVKGIAKSRKS

SEQ ID NO: 5054 - protein, 1379 aa, Artificial Sequence
  SARS-CoV-2/USA/WA8-UW5/2020__EPI_ISL_413486 spike protein (1-1211)(I714C_Y1110C) Ferritin construct
MFVFLVLLPLVSSQCVNLTTRTQLPPAYTNSFTRGVYYPDKVFRSSVLHSTQDLFLPFFSNVTWFHAIHVSGTNGTKRFDNPVLPFNDGVYFASTEKSNIIRGWIFGTTLDSKTQSLLIVNNATNVVIKVCEFQFCNDPFLGVYYHKNNKSWMESEFRVYSSANNCTFEYVSQPFLMDLEGKQGNFKNLREFVFKNIDGYFKIYSKHTPINLVRDLPQGFSALEPLVDLPIGINITRFQTLLALHRSYLTPGDSSSGWTAGAAAYYVGYLQPRTFLLKYNENGTITDAVDCALDPLSETKCTLKSFTVEKGIYQTSNFRVQPTESIVRFPNITNLCPFGEVFNATRFASVYAWNRKRISNCVADYSVLYNSASFSTFKCYGVSPTKLNDLCFTNVYADSFVIRGDEVRQIAPGQTGKIADYNYKLPDDFTGCVIAWNSNNLDSKVGGNYNYLYRLFRKSNLKPFERDISTEIYQAGSTPCNGVEGFNCYFPLQSYGFQPTNGVGYQPYRVVVLSFELLHAPATVCGPKKSTNLVKNKCVNFNFNGLTGTGVLTESNKKFLPFQQFGRDIADTTDAVRDPQTLEILDITPCSFGGVSVITPGTNTSNQVAVLYQDVNCTEVPVAIHADQLTPTWRVYSTGSNVFQTRAGCLIGAEYVNNSYECDIPIGAGICASYQTQTNSPRRARSVASQSIIAYTMSLGAENSVAYSNNSIACPTNFTISVTTEILPVSMTKTSVDCTMYICGDSTECSNLLLQYGSFCTQLNRALTGIAVEQDKNTQEVFAQVKQIYKTPPIKDFGGFNFSQILPDPSKPSKRSFIEDLLFNKVTLADAGFIKQYGDCLGDIAARDLICAQKFNGLTVLPPLLTDEMIAQYTSALLAGTITSGWTFGAGAALQIPFAMQMAYRFNGIGVTQNVLYENQKLIANQFNSAIGKIQDSLSSTASALGKLQDVVNQNAQALNTLVKQLSSNFGAISSVLNDILSRLDKVEAEVQIDRLITGRLQSLQTYVTQQLIRAAEIRASANLAATKMSECVLGQSKRVDFCGKGYHLMSFPQSAPHGVVFLHVTYVPAQEKNFTTAPAICHDGKAHFPREGVFVSNGTHWFVTQRNFCEPQIITTDNTFVSGNCDVVIGIVNNTVYDPLQPELDSFKEELDKYFKNHTSPDVDLGDISGINASVVNIQKEIDRLNEVAKNLNESLIDLQELGKYEQYIKGGGGSDIIKLLNEQVNKEMQSSNLYMSMSSWCYTHSLDGAGLFLFDHAAEEYEHAKKLIIFLNENNVPVQLTSISAPEHKFEGLTQIFQKAYEHEQHISESINNIVDHAIKSKDHATFNFLQWYVAEQHEEEVLFKDILDKIELIGNENHGLYLADQYVKGIAKSRKS

SEQ ID NO: 5055 - protein, 1379 aa, Artificial Sequence
  SARS-CoV-2/England/20102000506/2020__EPI_ISL_415147 spike protein (1-1211)(I714C_Y1110C) Ferritin construct
MFVFLVLLPLVSSQCVNLTTRTQLPPAYTNSFTRGVYYPDKVFRSSVLHSTQDLFLPFFSNVTWFHAIHVSGTNGTKRFDNPVLPFNDGVYFASTEKSNIIRGWIFGTTLDSKTQSLLIVNNATNVVIKVCEFQFCNDPFLGVYYHKNNKSWMESEFRVYSSANNCTFEYVSQPFLMDLEGKQGNFKNLREFVFKNIDGYFKIYSKHTPINLVRDLPQGFSALEPLVDLPIGINITRFQTLLALHRSYLTPGDSSSGWTAGAAAYYVGYLQPRTFLLKYNENGTITDAVDCALDPLSETKCTLKSFTVEKGIYQTSNFRVQPTESIVRFPNITNLCPFGEVFNATRFASVYAWNRKRISNCVADYSVLYNSASFSTFKCYGVSPTKLNDLCFTNVYADSFVIRGDEVRQIAPGQTGKIADYNYKLPDDFTGCVIAWNSNNLDSKVGGNYNYLYRLFRKSNLKPFERDISTEIYQAGSTPCNGVEGFNCYFPLQSYGFQPTNGVGYQPYRVVVLSFELLHAPATVCGPKKSTNLVKNKCVNFNFNGLTGTGVLTESNKKFLPFQQFGRDIADTTDAVRDPQTLEILDITPCSFGGVSVITPGTNTSNQVAVLYQGVNCTEVPVAIHADQLTPTWRVYSTGSNVFQTRAGCLIGAEHVNNSYECDIPIGAGICASYQTQTNSPRRARSVASQSIIAYTMSLGAENSVAYSNNSIACPTNFTISVTTEILPVSMTKTSVDCTMYICGDSTECSNLLLQYGSFCTQLNRALTGIAVEQDKNTQEVFAQVKQIYKTPPIKDFGGFNFSQILPDPSKPSKRSFIEDLLFNKVTLADAGFIKQYGYCLGDIAARDLICAQKFNGLTVLPPLLTDEMIAQYTSALLAGTITSGWTFGAGAALQIPFAMQMAYRFNGIGVTQNVLYENQKLIANQFNSAIGKIQDSLSSTASALGKLQDVVNQNAQALNTLVKQLSSNFGAISSVLNDILSRLDKVEAEVQIDRLITGRLQSLQTYVTQQLIRAAEIRASANLAATKMSECVLGQSKRVDFCGKGYHLMSFPQSAPHGVVFLHVTYVPAQEKNFTTAPAICHDGKAHFPREGVFVSNGTHWFVTQRNFCEPQIITTDNTFVSGNCDVVIGIVNNTVYDPLQPELDSFKEELDKYFKNHTSPDVDLGDISGINASVVNIQKEIDRLNEVAKNLNESLIDLQELGKYEQYIKGGGGSDIIKLLNEQVNKEMQSSNLYMSMSSWCYTHSLDGAGLFLFDHAAEEYEHAKKLIIFLNENNVPVQLTSISAPEHKFEGLTQIFQKAYEHEQHISESINNIVDHAIKSKDHATFNFLQWYVAEQHEEEVLFKDILDKIELIGNENHGLYLADQYVKGIAKSRKS

SEQ ID NO: 5056 - protein, 1379 aa, Artificial Sequence
  SARS-CoV-2/Belgium/VAG-03013/2020__EPI_ISL_415155 spike protein (1-1211)(I714C_Y1110C) Ferritin construct
MFVFLVLLPLVSSQCVNLTTRTQLPPAYTNSFTRGVYYPDKVFRSSVLHSTQDLFLPFFSNVTWFHAIHVSGTNGTKRFDNPVLPFNDGVYFASTEKSNIIRGWIFGTTLDSKTQSLLIVNNATNVVIKVCEFQFCNDPFLGVYYHKNNKSWMESEFRVYSSANNCTFEYVSQPFLMDLEGKQGNFKNLREFVFKNIDGYFKIYSKHTPINLVRDLPQGFSALEPLVDLPIGINITRFQTLLALHRSYLTPGDSSSGWTAGAAAYYVGYLQPRTFLLKYNENGTITDAVDCALDPLSETKCTLKSFTVEKGIYQTSNFRVQPTESIVRFPNITNLCPFGEVFNATRFASVYAWNRKRISNCVADYSVLYNSASFSTFKCYGVSPTKLNDLCFTNVYADSFVIRGDEVRQIAPGQTGKIADYNYKLPDDFTGCVIAWNSNNLDSKVGGNYNYLYRLFRKSNLKPFERDISTEIYQAGSTPCNGVEGFNCYFPLQSYGFQPTNGVGYQPYRVVVLSFELLHAPATVCGPKKSTNLVKNKCVNFNFNGLTGTGVLTESNKKFLPFQQFGRDIADTTDAVRDPQTLEILDITPCSFGGVSVITPGTNTSNQVAVLYQGVNCTEVPVAIHADQLTPTWRVYSTGSNVFQTRAGCLIGAEHVNNSYECDIPIGAGICASYQTQTNSPRRARSVASQSIIAYTMSLGAENSVAYSNNSIACPTNFTISVTTEILPVSMTKTSVDCTMYICGDSTECSNLLLQYGSFCTQLNRALTGIAVEQDKNTQEVFAQVKQIYKTPPIKDFGGFNFSQILPDPSKPSKRSFIEDLLFNKVTLADAGFIKQYGDCLGDIAARDLICAQKFNGLTVLPPLLTDEMIAQYTSALLAGTITSGWTFGAGAALQIPFAMQMAYRFNGIGVTQNVLYENQKLIANQFNSAIGKIQDSLSSTATALGKLQDVVNQNAQALNTLVKQLSSNFGAISSVLNDILSRLDKVEAEVQIDRLITGRLQSLQTYVTQQLIRAAEIRASANLAATKMSECVLGQSKRVDFCGKGYHLMSFPQSAPHGVVFLHVTYVPAQEKNFTTAPAICHDGKAHFPREGVFVSNGTHWFVTQRNFCEPQIITTDNTFVSGNCDVVIGIVNNTVYDPLQPELDSFKEELDKYFKNHTSPDVDLGDISGINASVVNIQKEIDRLNEVAKNLNESLIDLQELGKYEQYIKGGGGSDIIKLLNEQVNKEMQSSNLYMSMSSWCYTHSLDGAGLFLFDHAAEEYEHAKKLIIFLNENNVPVQLTSISAPEHKFEGLTQIFQKAYEHEQHISESINNIVDHAIKSKDHATFNFLQWYVAEQHEEEVLFKDILDKIELIGNENHGLYLADQYVKGIAKSRKS

SEQ ID NO: 5057 - protein, 1379 aa, Artificial Sequence
  SARS-CoV-2/Belgium/BC-03016/2020__EPI_ISL_415157 spike protein (1-1211)(I714C_Y1110C) Ferritin construct
MFVFLVLLPLVSSQCVNLTTRTQLPPAYTNSFTRGVYYPDKVFRSSVLHSTQDLFLPFFSNVTWFHAIHVSGTNGTKRFDNPVLPFNDGVYFASTEKSNIIRGWIFGTTLDSKTQSLLIVNNATNVVIKVCEFQFCNDPFLGVYYHKNNKSWMESEFRVYSSANNCTFEYVSQPFLMDLEGKQGNFKNLREFVFKNIDGYFKIYSKHTPINLVRDLPQGFSALEPLVDLPIGINITRFQTLLALHRSYLTPGDSSSGWTAGAAAYYVGYLQPRTFLLKYNENGTITDAVDCALDPLSETKCTLKSFTVEKGIYQTSNFRVQPTESIVRFPNITNLCPFGEVFNATRFASVYAWNRKRISNCVADYSVLYNSASFSTFKCYGVSPTKLNDLCFTNVYADSFVIRGDEVRQIAPGQTGKIADYNYKLPDDFTGCVIAWNSNNLDSKVGGNYNYLYRLFRKSNLKPFERDISTEIYQAGSTPCNGVEGFNCYFPLQSYGFQPTNGVGYQPYRVVVLSFELLHAPATVCGPKKSTNLVKNKCVNFNFNGLTGTGVLTESNKKFLPFQQFGRDIADTTDAVRDPQTLEILDITPCSFGGVSVITPGTNTSNQVAVLYQGVNCTEVPVAIHADQLTPTWRVYSTGSNVFQTRAGCLIGAEHVNNSYECDIPIGAGICASYQTQTNSPRRARSVASQSIIAYTMSLGAENSVAYSNNSIACPTNFTISVTTEILPVSMTKTSVDCTMYICGDSTECSNLLLQYGSFCTQLNRALTGIAVEQDKNTQEVFAQVKQIYKTPPIKDFGGFNFSQILPDPSKPSKRSFIEDLLFNKVTLADAGFIKQYGDCLGDIAARDLICAQKFNGLTVLPPLLTDEMIAQYTSALLAGTITSGWTFGAGAALQIPFAMQMAYRFNGIGVTQNVLYENQKLIANQFNSAIGKIQDSLSSTAPALGKLQDVVNQNAQALNTLVKQLSSNFGAISSVLNDILSRLDKVEAEVQIDRLITGRLQSLQTYVTQQLIRAAEIRASANLAATKMSECVLGQSKRVDFCGKGYHLMSFPQSAPHGVVFLHVTYVPAQEKNFTTAPAICHDGKAHFPREGVFVSNGTHWFVTQRNFCEPQIITTDNTFVSGNCDVVIGIVNNTVYDPLQPELDSFKEELDKYFKNHTSPDVDLGDISGINASVVNIQKEIDRLNEVAKNLNESLIDLQELGKYEQYIKGGGGSDIIKLLNEQVNKEMQSSNLYMSMSSWCYTHSLDGAGLFLFDHAAEEYEHAKKLIIFLNENNVPVQLTSISAPEHKFEGLTQIFQKAYEHEQHISESINNIVDHAIKSKDHATFNFLQWYVAEQHEEEVLFKDILDKIELIGNENHGLYLADQYVKGIAKSRKS

SEQ ID NO: 5058 - protein, 1379 aa, Artificial Sequence
  SARS-CoV-2/Germany/BavPat3/2020__EPI_ISL_414521 spike protein (1-1211)(I714C_Y1110C) Ferritin construct
MFVFLVLLPLVSSQCVNLTTRTQLPPAYTNSFTRGVYYPDKVFRSSVLHSTQDLFLPFFSNVTWFHAIHVSGTNGTKRFDNPVLPFNDGVYFASTEKSNIIRGWIFGTTLDSKTQSLLIVNNATNVVIKVCEFQFCNDPFLGVYYHKNNKSWMESEFRVYSSANNCTFEYVSQPFLMDLEGKQGNFKNLREFVFKNIDGYFKIYSKHTPINLVRDLPQGFSALEPLVDLPIGINITRFQTLLALHRSYLTPGDSSSGWTAGAAAYYVGYLQPRTFLLKYNENGTITDAVDCALDPLSETKCTLKSFTVEKGIYQTSNFRVQPTESIVRFPNITNLCPFGEVFNATRFASVYAWNRKRISNCVADYSVLYNSASFSTFKCYGVSPTKLNDLCFTNVYADSFVIRGDEVRQIAPGQTGKIADYNYKLPDDFTGCVIAWNSNNLDSKVGGNYNYLYRLFRKSNLKPFERDISTEIYQAGSTPCNGVEGFNCYFPLQSYGFQPTNGVGYQPYRVVVLSFELLHAPATVCGPKKSTNLVKNKCVNFNFNGLTGTGVLTESNKKFLPFQQFGRDIADTTDAVRDPQTLEILDITPCSFGGVSVITPGTNTSNQVAVLYQDVNCTEVPVAIHADQLTPTWRVYSTGSNVFQTRAGCLIGAEHVNNSYECDIPIGAGICASYQTQTNSPRRARSVASQSIIAYTMSLGAENSVAYSNNSIACPTNFTISVTTEILPVSMTKTSVDCTMYICGDSTECSNLLLQYGSFCTQLNRALTGIAVEQDKNTQQVFAQVKQIYKTPPIKDFGGFNFSQILPDPSKPSKRSFIEDLLFNKVTLADAGFIKQYGDCLGDIAARDLICAQKFNGLTVLPPLLTDEMIAQYTSALLAGTITSGWTFGAGAALQIPFAMQMAYRFNGIGVTQNVLYENQKLIANQFNSAIGKIQDSLSSTASALGKLQDVVNQNAQALNTLVKQLSSNFGAISSVLNDILSRLDKVEAEVQIDRLITGRLQSLQTYVTQQLIRAAEIRASANLAATKMSECVLGQSKRVDFCGKGYHLMSFPQSAPHGVVFLHVTYVPAQEKNFTTAPAICHDGKAHFPREGVFVSNGTHWFVTQRNFCEPQIITTDNTFVSGNCDVVIGIVNNTVYDPLQPELDSFKEELDKYFKNHTSPDVDLGDISGINASVVNIQKEIDRLNEVAKNLNESLIDLQELGKYEQYIKGGGGSDIIKLLNEQVNKEMQSSNLYMSMSSWCYTHSLDGAGLFLFDHAAEEYEHAKKLIIFLNENNVPVQLTSISAPEHKFEGLTQIFQKAYEHEQHISESINNIVDHAIKSKDHATFNFLQWYVAEQHEEEVLFKDILDKIELIGNENHGLYLADQYVKGIAKSRKS

SEQ ID NO: 5059 - protein, 1379 aa, Artificial Sequence
  SARS-CoV-2/France/HF1805/2020__EPI_ISL_414628 spike protein (1-1211)(I714C_Y1110C) Ferritin construct
MFVFLVLLPLVSSQCVNLTTRTQLPPAYTNSFTRGVYYPDKVFRSSVLHSTQDLFLPFFSNVTWFHAIHVSGTNGTKRFDNPVLPFNDGVYFASTEKSNIIRGWIFGTTLDSKTQSLLIVNNATNVVIKVCEFQFCNDPFLGVYYHKNNKSWMESEFRVYSSANNCTFEYVSQPFLMDLEGKQGNFKNLREFVFKNIDGYFKIYSKHTPINLVRDLPQGFSALEPLVDLPIGINITRFQTLLALHRSYLTPGDSSSGWTAGAAAYYVGYLQPRTFLLKYNENGTITDAVDCALDPLSETKCTLKSFTVEKGIYQTSNFRVQPTESIVRFPNITNLCPFGEVFNATRFASVYAWNRKRISNCVADYSVLYNSASFSTFKCYGVSPTKLNDLCFTNVYADSFVIRGDEVRQIAPGQTGKIADYNYKLPDDFTGCVIAWNSNNLDSKVGGNYNYLYRLFRKSNLKPFERDISTEIYQAGSTPCNGVEGFNCYFPLQSYGFQPTNGVGYQPYRVVVLSFELLHAPATVCGPKKSTNLVKNKCVNFNFNGLTGTGVLTESNKKFLPFQQFGRDIADTTDAVRDPQTLEILDITPCSFGGVSVITPGTNTSNQVAVLYQGVNCTEVPVAIHADQLTPTWRVYSTGSNVFQTRAGCLIGAEHVNNSYECDIPIGAGICASYQTQTNSPRRARSVASQSIIAYTMSLGAENSVAYSNNSIACPTNFTISVTTEILPVSMTKTSVDCTMYICGDSTECSNLLLQYGSFCTQLNRALTGIAVEQDKNTQEVFAQVKQIYKTPPIKDFGGFNFSQILPDPSKPSKRSFIEDLLFNKVTLADAGFIKQYGDCLGDIAARDLICAQKFNGLTVLPPLLTDEMIAQYTSALLAGTITSGWTFGAGAALQIPFAMQMAYRFNGIGVTQNVLYENQKLIANQFNSAIGKIQDSLSSTASALGKLQDVVNQNAQALNTLVKQLSSNFGAISSVLNDILSRLDKVEAEVQIDRLITGRLQSLQTYVTQQLIRAAEIRASANLAATKMSECVLGQSKRVDFCGKGYHLMSFPQSAPHGVVFLHVTYVPAQEKNFTTAPAICHDGKAHFPREGVFVSNGTHWFVTQRNFCEPQIITTDNTFVSGNCDVVIGVVNNTVYDPLQPELDSFKEELDKYFKNHTSPDVDLGDISGINASVVNIQKEIDRLNEVAKNLNESLIDLQELGKYEQYIKGGGGSDIIKLLNEQVNKEMQSSNLYMSMSSWCYTHSLDGAGLFLFDHAAEEYEHAKKLIIFLNENNVPVQLTSISAPEHKFEGLTQIFQKAYEHEQHISESINNIVDHAIKSKDHATFNFLQWYVAEQHEEEVLFKDILDKIELIGNENHGLYLADQYVKGIAKSRKS

SEQ ID NO: 5060 - protein, 1379 aa, Artificial Sequence
  SARS-CoV-2/Netherlands/ZuidHolland_9/2020__EPI_ISL_414445 spike protein (1-1211)(I714C_Y1110C) Ferritin construct
MFVFLVLLPLVSSQCVNLTTRTQLPPAYTNSFTRGVYYPDKVFRSSVLHSTQDLFLPFFSNVTWFHAIHVSGTNGTKRFDNPVLPFNDGVYFASTEKSNIIRGWIFGTTLDSKTQSLLIVNNATNVVIKVCEFQFCNDPFLGVYYHKNNKSWMESEFRVYSSANNCTFEYVSQPFLMDLEGKQGNFKNLREFVFKNIDGYFKIYSKHTPINLVRDLPQGFSALEPLVDLPIGINITRFQTLLALHRSYLTPGDSSSGWTAGAAAYYVGYLQPRTFLLKYNENGTITDAVDCALDPLSETKCTLKSFTVEKGIYQTSNFRVQPTESIVRFPNITNLCPFGEVFNATRFASVYAWNRKRISNCVADYSVLYNSASFSTFKCYGVSPTKLNDLCFTNVYADSFVIRGDEVRQIAPGQTGKIADYNYKLPDDFTGCVIAWNSNNLDSKVGGNYNYLYRLFRKSNLKPFERDISTEIYQAGSTPCNGVEGFNCYFPLQSYGFQPTNGVGYQPYRVVVLSFELLHAPATVCGPKKSTNLVKNKCVNFNFNGLTGTGVLTESNKKFLPFQQFGRDIADTTDAVRDPQTLEILDITPCSFGGVSVITPGTNTSNQVAVLYQGVNCTEVPVAIHADQLTPTWRVYSTGSNVFQTRAGCLIGAEHVNNSYECDIPIGAGICASYQTQTNSPRRARSVASQSIIAYTMSLGAENSVAYSNNSIACPTNFTISVTTEILPVSMTKTSVDCTMYICGDSTECSNLLLQYGSFCTQLNRALTGIAVEQDKNTQEVFAQVKQIYKTPPIKDFGGFNFSQILPDPSKPSKRSFIEDLLFNKVTLADAGFIKQYGDCLGDIAARDLICVQKFNGLTVLPPLLTDEMIAQYTSALLAGTITSGWTFGAGAALQIPFAMQMAYRFNGIGVTQNVLYENQKLIANQFNSAIGKIQDSLSSTASALGKLQDVVNQNAQALNTLVKQLSSNFGAISSVLNDILSRLDKVEAEVQIDRLITGRLQSLQTYVTQQLIRAAEIRASANLAATKMSECVLGQSKRVDFCGKGYHLMSFPQSAPHGVVFLHVTYVPAQEKNFTTAPAICHDGKAHFPREGVFVSNGTHWFVTQRNFCEPQIITTDNTFVSGNCDVVIGIVNNTVYDPLQPELDSFKEELDKYFKNHTSPDVDLGDISGINASVVNIQKEIDRLNEVAKNLNESLIDLQELGKYEQYIKGGGGSDIIKLLNEQVNKEMQSSNLYMSMSSWCYTHSLDGAGLFLFDHAAEEYEHAKKLIIFLNENNVPVQLTSISAPEHKFEGLTQIFQKAYEHEQHISESINNIVDHAIKSKDHATFNFLQWYVAEQHEEEVLFKDILDKIELIGNENHGLYLADQYVKGIAKSRKS

SEQ ID NO: 5061 - protein, 1379 aa, Artificial Sequence
  SARS-CoV-2/Finland/FIN03032020A/2020__EPI_ISL_413602 spike protein (1-1211)(I714C_Y1110C) Ferritin construct
MFVFLVLLPLVSSQCVNLTTRTQLPPAYTNSFTRGVYYPDKVFRSSVLHSTQDLFLPFFSNVTWFHAIHVSGTNGTKRFDNPVLPFNDGVYFASTEKSNIIRGWIFGTTLDSKTQSLLIVNNATNVVIKVCEFQFCNDPFLGVYYHKNNKSWMESEFRVYSSANNCTFEYVSQPFLMDLEGKQGNFKNLREFVFKNIDGYFKIYSKHTPINLVRDLPQGFSALEPLVDLPIGINITRFQTLLALHRSYLTPGDSSSGWTAGAAAYYVGYLQPRTFLLKYNENGTITDAVDCALDPLSETKCTLKSFTVEKGIYQTSNFRVQPTESIVRFPNITNLCPFGEVFNATRFASVYAWNRKRISNCVADYSVLYNSASFSTFKCYGVSPTKLNDLCFTNVYADSFVIRGDEVRQIAPGQTGKIADYNYKLPDDFTGCVISWNSNNLDSKVGGNYNYLYRLFRKSNLKPFERDISTEIYQAGSTPCNGVEGFNCYFPLQSYGFQPTNGVGYQPYRVVVLSFELLHAPATVCGPKKSTNLVKNKCVNFNFNGLTGTGVLTESNKKFLPFQQFGRDIADTTDAVRDPQTLEILDITPCSFGGVSVITPGTNTSNQVAVLYQGVNCTEVPVAIHADQLTPTWRVYSTGSNVFQTRAGCLIGAEHVNNSYECDIPIGAGICASYQTQTNSPRRARSVASQSIIAYTMSLGAENSVAYSNNSIACPTNFTISVTTEILPVSMTKTSVDCTMYICGDSTECSNLLLQYGSFCTQLNRALTGIAVEQDKNTQEVFAQVKQIYKTPPIKDFGGFNFSQILPDPSKPSKRSFIEDLLFNKVTLADAGFIKQYGDCLGDIAARDLICAQKFNGLTVLPPLLTDEMIAQYTSALLAGTITSGWTFGAGAALQIPFAMQMAYRFNGIGVTQNVLYENQKLIANQFNSAIGKIQDSLSSTASALGKLQDVVNQNAQALNTLVKQLSSNFGAISSVLNDILSRLDKVEAEVQIDRLITGRLQSLQTYVTQQLIRAAEIRASANLAATKMSECVLGQSKRVDFCGKGYHLMSFPQSAPHGVVFLHVTYVPAQEKNFTTAPAICHDGKAHFPREGVFVSNGTHWFVTQRNFCEPQIITTDNTFVSGNCDVVIGIVNNTVYDPLQPELDSFKEELDKYFKNHTSPDVDLGDISGINASVVNIQKEIDRLNEVAKNLNESLIDLQELGKYEQYIKGGGGSDIIKLLNEQVNKEMQSSNLYMSMSSWCYTHSLDGAGLFLFDHAAEEYEHAKKLIIFLNENNVPVQLTSISAPEHKFEGLTQIFQKAYEHEQHISESINNIVDHAIKSKDHATFNFLQWYVAEQHEEEVLFKDILDKIELIGNENHGLYLADQYVKGIAKSRKS

SEQ ID NO: 5062 - protein, 1379 aa, Artificial Sequence
  SARS-CoV-2/France/GE1977/2020__EPI_ISL_414632 spike protein (1-1211)(I714C_Y1110C) Ferritin construct
MFVFLVLLPLVSSQCVNLTTRTQLPPAYTNSFTRGVYYPDKVFRSSVLHSTQDLFLPFFSNVTWFHAIHVSGTNGTKRFDNPVLPFNDGVYFASTEKSNIIRGWIFGTTLDSKTQSLLIVNNATNVVIKVCEFQFCNDPFLGVYYHKNNKSWMESEFRVYSSANNCTFEYVSQPFLMDLEGKQGNFKNLREFVFKNIDGYFKIYSKHTPINLVRDLPQGFSALEPLVDLPIGINITRFQTLLALHRSYLTPGDSSSGWTAGAAAYYVGYLQPRTFLLKYNENGTITDAVDCALDPLSETKCTLKSFTVEKGIYQTSNFRVQPTESIVRFPNITNLCPFGEVFNATRFASVYAWNRKRISNCVADYSVLYNSASFSTFKCYGVSPTKLNDLCFTNVYADSFVIRGDEVRQIAPGQTGKIADYNYKLPDDFTGCVIAWNSNNLDSKVGGNYNYLYRLFRKSNLKPFERDISTEIYQAGSTPCNGVEGFNCYFPLQSYGFQPTNGVGYQPYRVVVLSFELLHAPATVCGPKKSTNLVKNKCVNFNFNGLTGTGVLTESNKKFLPFQQFGRDIADTTDAVRDPQTLEILDITPCSFGGVSVITPGTNTSNQVAVLYQGVNCTEVPVAIHADQLTPTWRVYSTGSNVFQTRAGCLIGAEHVNNSYECDIPIGAGICASYQTQTNSPRRARSVASQSIIAYTMSLGAENSVAYSNNSIACPTNFTISVTTEILPVSMTKTSVDCTMYICGDSTECSNLLLQYGSFCTQLNRALTGIAVEQDKNTQEVFAQVKQIYKTPPIKDFGGFNFSQILPDPSKPSKRSFIEDLLFNKVTLADAGFIKQYGDCLGDIAARDLICAQKFNGLTVLPPLLTDEMIAQYTSALLAGTITSGWTFGAGAALQIPFAMQMAYRFNGIGVTQNVLYENQKLIANQFNSAIGKIQDSLFSTASALGKLQDVVNQNAQALNTLVKQLSSNFGAISSVLNDILSRLDKVEAEVQIDRLITGRLQSLQTYVTQQLIRAAEIRASANLAATKMSECVLGQSKRVDFCGKGYHLMSFPQSAPHGVVFLHVTYVPAQEKNFTTAPAICHDGKAHFPREGVFVSNGTHWFVTQRNFCEPQIITTDNTFVSGNCDVVIGIVNNTVYDPLQPELDSFKEELDKYFKNHTSPDVDLGDISGINASVVNIQKEIDRLNEVAKNLNESLIDLQELGKYEQYIKGGGGSDIIKLLNEQVNKEMQSSNLYMSMSSWCYTHSLDGAGLFLFDHAAEEYEHAKKLIIFLNENNVPVQLTSISAPEHKFEGLTQIFQKAYEHEQHISESINNIVDHAIKSKDHATFNFLQWYVAEQHEEEVLFKDILDKIELIGNENHGLYLADQYVKGIAKSRKS

SEQ ID NO: 5063 - protein, 1379 aa, Artificial Sequence
  SARS-CoV-2/Finland/FIN-313/2020__EPI_ISL_414641 spike protein (1-1211)(I714C_Y1110C) Ferritin construct
MFVFLVLLPLVSSQCVNLTTRTQLPPAYTNSFTRGVYYPDKVFRSSVLHSTQDLFLPFFSNVTWFHAIHVSGTNGTKRFDNPVLPFNDGVYFASTEKSNIIRGWIFGTTLDSKTQSLLIVNNATNVVIKVCEFQFCNDPFLGVYYHKNNKSWMESEFRVYSSANNCTFEYVSQPFLMDLEGKQGNFKNLREFVFKNIDGYFKIYSKHTPINLVRDLPQGFSALEPLVDLPIGINITRFKTLLALHRSYLTPGDSSSGWTAGAAAYYVGYLQPRTFLLKYNENGTITDAVDCALDPLSETKCTLKSFTVEKGIYQTSNFRVQPTESIVRFPNITNLCPFGEVFNATRFASVYAWNRKRISNCVADYSVLYNSASFSTFKCYGVSPTKLNDLCFTNVYADSFVIRGDEVRQIAPGQTGKIADYNYKLPDDFTGCVIAWNSNNLDSKVGGNYNYLYRLFRKSNLKPFERDISTEIYQAGSTPCNGVEGFNCYFPLQSYGFQPTNGVGYQPYRVVVLSFELLHAPATVCGPKKSTNLVKNKCVNFNFNGLTGTGVLTESNKKFLPFQQFGRDIADTTDAVRDPQTLEILDITPCSFGGVSVITPGTNTSNQVAVLYQGVNCTEVPVAIHADQLTPTWRVYSTGSNVFQTRAGCLIGAEHVNNSYECDIPIGAGICASYQTQTNSPRRARSVASQSIIAYTMSLGAENSVAYSNNSIACPTNFTISVTTEILPVSMTKTSVDCTMYICGDSTECSNLLLQYGSFCTQLNRALTGIAVEQDKNTQEVFAQVKQIYKTPPIKDFGGFNFSQILPDPSKPSKRSFIEDLLFNKVTLADAGFIKQYGDCLGDIAARDLICAQKFNGLTVLPPLLTDEMIAQYTSALLAGTITSGWTFGAGAALQIPFAMQMAYRFNGIGVTQNVLYENQKLIANQFNSAIGKIQDSLSSTASALGKLQDVVNQNAQALNTLVKQLSSNFGAISSVLNDILSRLDKVEAEVQIDRLITGRLQSLQTYVTQQLIRAAEIRASANLAATKMSECVLGQSKRVDFCGKGYHLMSFPQSAPHGVVFLHVTYVPAQEKNFTTAPAICHDGKAHFPREGVFVSNGTHWFVTQRNFCEPQIITTDNTFVSGNCDVVIGIVNNTVYDPLQPELDSFKEELDKYFKNHTSPDVDLGDISGINASVVNIQKEIDRLNEVAKNLNESLIDLQELGKYEQYIKGGGGSDIIKLLNEQVNKEMQSSNLYMSMSSWCYTHSLDGAGLFLFDHAAEEYEHAKKLIIFLNENNVPVQLTSISAPEHKFEGLTQIFQKAYEHEQHISESINNIVDHAIKSKDHATFNFLQWYVAEQHEEEVLFKDILDKIELIGNENHGLYLADQYVKGIAKSRKS

SEQ ID NO: 5064 - protein, 1379 aa, Artificial Sequence
  SARS-CoV-2/Netherlands/ZuidHolland_2/2020__EPI_ISL_414556 spike protein (1-1211)(I714C_Y1110C) Ferritin construct
MFVFLVLLPLVSSQCVNLTTRTQLPPAYTNSFTRGVYYPDKVFRSSVLHSTQDLFLPFFSNVTWFHAIHVSGTNGTKRFDNPVLPFNDGVYFASTEKSNIIRGWIFGTTLDSKTQSLLIVNNATNVVIKVCEFQFCNDPFLGVYYHKNNKSWMESEFRVYSSANNCTFEYVSQPFLMDLEGKQGNFKNLREFVFKNIDGYFKIYSKHTPINLVRDLPQGFSALEPLVDLPIGINITRFQTLLALHRSYLTPGDSSSGWTAGAAAYYVGYLQPRTFLLKYNENGTITDAVDCALDPLSETKCTLKSFTVEKGIYQTSNFRVQPTESIVRFPNITNLCPFGEVFNATRFASVYAWNRKRISNCVADYSVLYNSASFSTFKCYGVSPTKLNDLCFTNVYADSFVIRGDEVRQIAPGQTGKIADYNYKLPDDFTGCVIAWNSNNLDSKVGGNYNYLYRLFRKSNLKPFERDISTEIYQAGSTPCNGVEGFNCYFPLQSYGFQPTNGVGYQPYRVVVLSFELLHAPATVCGPKKSTNLVKNKCVNFNFNGLTGTGVLTESNKKFLPFQQFGRDIADTTDAVRDPQTLEILDITPCSFGGVSVITPGTNTSNQVAVLYQGVNCTEVPVAIHADQLTPTWRVYSTGSNVFQTRAGCLIGAEHVNNSYECDIPIGAGICASYQTQTNSPRRARSVASQSIIAYTMSLGAENSVAYSNNSIACPTNFTISVTTEILPVSMTKTSVDCTMYICGDSTECSNLLLQYGSFCTQLNRALTGIALEQDKNTQEVFAQVKQIYKTPPIKDFGGFNFSQILPDPSKPSKRSFIEDLLFNKVTLADAGFIKQYGDCLGDIAARDLICAQKFNGLTVLPPLLTDEMIAQYTSALLAGTITSGWTFGAGAALQIPFAMQMAYRFNGIGVTQNVLYENQKLIANQFNSAIGKIQDSLSSTASALGKLQDVVNQNAQALNTLVKQLSSNFGAISSVLNDILSRLDKVEAEVQIDRLITGRLQSLQTYVTQQLIRAAEIRASANLAATKMSECVLGQSKRVDFCGKGYHLMSFPQSAPHGVVFLHVTYVPAQEKNFTTAPAICHDGKAHFPREGVFVSNGTHWFVTQRNFCEPQIITTDNTFVSGNCDVVIGIVNNTVYDPLQPELDSFKEELDKYFKNHTSPDVDLGDISGINASVVNIQKEIDRLNEVAKNLNESLIDLQELGKYEQYIKGGGGSDIIKLLNEQVNKEMQSSNLYMSMSSWCYTHSLDGAGLFLFDHAAEEYEHAKKLIIFLNENNVPVQLTSISAPEHKFEGLTQIFQKAYEHEQHISESINNIVDHAIKSKDHATFNFLQWYVAEQHEEEVLFKDILDKIELIGNENHGLYLADQYVKGIAKSRKS

SEQ ID NO: 5065 - protein, 1379 aa, Artificial Sequence
  SARS-CoV-2/USA/WA-UW31/2020__EPI_ISL_414618 spike protein (1-1211)(I714C_Y1110C) Ferritin construct
MFVFLVLLPLVSSQCVNLTTRTQLPPAYTNSFTRGVYYPDKVFRSSVLHSTQDLFLPFFSNVTWFHAIHVSGTNGTKRFDNPVLPFNDGVYFASTEKSNIIRGWIFGTTLDSKTQSLLIVNNATNVVIKVCEFQFCNDPFLGVYYHKNNKSWMESEFRVYSSANNCTFEYVSQPFLMDLEGKQGNFKNLREFVFKNIDGYFKIYSKHTPINLVRDLPQGFSALEPLVDLPIGINITRFQTLLALHRSYLTPGDSSSGWTAGAAAYYVGYLQPRTFLLKYNENGTITDAVDCALDPLSETKCTLKSFTVEKGIYQTSNFRVQPTESIVRFPNITNLCPFGEVFNATRFASVYAWNRKRISNCVADYSVLYNSASFSTFKCYGVSPTKLNDLCFTNVYADSFVIRGDEVRQIAPGQTGKIADYNYKLPDDFTGCVIAWNSNNLDSKVGGNYNYLYRLFRKSNLKPFERDISTEIYQAGSTPCNGAEGFNCYFPLQSYGFQPTNGVGYQPYRVVVLSFELLHAPATVCGPKKSTNLVKNKCVNFNFNGLTGTGVLTESNKKFLPFQQFGRDIADTTDAVRDPQTLEILDITPCSFGGVSVITPGTNTSNQVAVLYQDVNCTEVPVAIHADQLTPTWRVYSTGSNVFQTRAGCLIGAEHVNNSYECDIPIGAGICASYQTQTNSPRRARSVASQSIIAYTMSLGAENSVAYSNNSIACPTNFTISVTTEILPVSMTKTSVDCTMYICGDSTECSNLLLQYGSFCTQLNRALTGIAVEQDKNTQEVFAQVKQIYKTPPIKDFGGFNFSQILPDPSKPSKRSFIEDLLFNKVTLADAGFIKQYGDCLGDIAARDLICAQKFNGLTVLPPLLTDEMIAQYTSALLAGTITSGWTFGAGAALQIPFAMQMAYRFNGIGVTQNVLYENQKLIANQFNSAIGKIQDSLSSTASALGKLQDVVNQNAQALNTLVKQLSSNFGAISSVLNDILSRLDKVEAEVQIDRLITGRLQSLQTYVTQQLIRAAEIRASANLAATKMSECVLGQSKRVDFCGKGYHLMSFPQSAPHGVVFLHVTYVPAQEKNFTTAPAICHDGKAHFPREGVFVSNGTHWFVTQRNFCEPQIITTDNTFVSGNCDVVIGIVNNTVYDPLQPELDSFKEELDKYFKNHTSPDVDLGDISGINASVVNIQKEIDRLNEVAKNLNESLIDLQELGKYEQYIKGGGGSDIIKLLNEQVNKEMQSSNLYMSMSSWCYTHSLDGAGLFLFDHAAEEYEHAKKLIIFLNENNVPVQLTSISAPEHKFEGLTQIFQKAYEHEQHISESINNIVDHAIKSKDHATFNFLQWYVAEQHEEEVLFKDILDKIELIGNENHGLYLADQYVKGIAKSRKS

SEQ ID NO: 5066 - protein, 1379 aa, Artificial Sequence
  SARS-CoV-2/South Korea/SNU01/2020__EPI_ISL_411929 spike protein (1-1211)(I714C_Y1110C) Ferritin construct
MFVFLVLLPLVSSQCVNLTTRTQLPPAYTNSFTRGVYYPDKVFRSSVLHSTQDLFLPFFSNVTWFHAIHVSGTNGTKRFDNPVLPFNDGVYFASTEKSNIIRGWIFGTTLDSKTQSLLIVNNATNVVIKVCEFQFCNDPFLGVYYHKNNKSWMESEFRVYSSANNCTFEYVSQPFLMDLEGKQGNFKNLREFVFKNIDGYFKIYSKHTPINLVRDLPQGFWALEPLVDLPIGINITRFQTLLALHRSYLTPGDSSSGWTAGAAAYYVGYLQPRTFLLKYNENGTITDAVDCALDPLSETKCTLKSFTVEKGIYQTSNFRVQPTESIVRFPNITNLCPFGEVFNATRFASVYAWNRKRISNCVADYSVLYNSASFSTFKCYGVSPTKLNDLCFTNVYADSFVIRGDEVRQIAPGQTGKIADYNYKLPDDFTGCVIAWNSNNLDSKVGGNYNYLYRLFRKSNLKPFERDISTEIYQAGSTPCNGVEGFNCYFPLQSYGFQPTNGVGYQPYRVVVLSFELLHAPATVCGPKKSTNLVKNKCVNFNFNGLTGTGVLTESNKKFLPFQQFGRDIADTTDAVRDPQTLEILDITPCSFGGVSVITPGTNTSNQVAVLYQDVNCTEVPVAIHADQLTPTWRVYSTGSNVFQTRAGCLIGAEHVNNSYECDIPIGAGICASYQTQTNSPRRARSVASQSIIAYTMSLGAENSVAYSNNSIACPTNFTISVTTEILPVSMTKTSVDCTMYICGDSTECSNLLLQYGSFCTQLNRALTGIAVEQDKNTQEVFAQVKQIYKTPPIKDFGGFNFSQILPDPSKPSKRSFIEDLLFNKVTLADAGFIKQYGDCLGDIAARDLICAQKFNGLTVLPPLLTDEMIAQYTSALLAGTITSGWTFGAGAALQIPFAMQMAYRFNGIGVTQNVLYENQKLIANQFNSAIGKIQDSLSSTASALGKLQDVVNQNAQALNTLVKQLSSNFGAISSVLNDILSRLDKVEAEVQIDRLITGRLQSLQTYVTQQLIRAAEIRASANLAATKMSECVLGQSKRVDFCGKGYHLMSFPQSAPHGVVFLHVTYVPAQEKNFTTAPAICHDGKAHFPREGVFVSNGTHWFVTQRNFCEPQIITTDNTFVSGNCDVVIGIVNNTVYDPLQPELDSFKEELDKYFKNHTSPDVDLGDISGINASVVNIQKEIDRLNEVAKNLNESLIDLQELGKYEQYIKGGGGSDIIKLLNEQVNKEMQSSNLYMSMSSWCYTHSLDGAGLFLFDHAAEEYEHAKKLIIFLNENNVPVQLTSISAPEHKFEGLTQIFQKAYEHEQHISESINNIVDHAIKSKDHATFNFLQWYVAEQHEEEVLFKDILDKIELIGNENHGLYLADQYVKGIAKSRKS

SEQ ID NO: 5067 - protein, 1379 aa, Artificial Sequence
  SARS-CoV-2/China/WF0004/2020__EPI_ISL_413694 spike protein (1-1211)(I714C_Y1110C) Ferritin construct
MFVFLVLLPLVSSQCVNLTTRTQLPPAYTNSFTRGVYYPDKVFRSSVLHSTQDLFLPFFSNVTWFHAIHVSGTNGTKRFDNPVLPFNDGVYFASTEKSNIIRGWIFGTTLDSKTQSLLIVNNATNVVIKVCEFQFCNDPFLGVYYHKNNKSWTESEFRVYSSANNCTFEYVSQPFLMDLEGKQGNFKNLREFVFKNIDGYFKIYSKHTPINLVRDLPQGFSALEPLVDLPIGINITRFQTLLALHRSYLTPGDSSSGWTAGAAAYYVGYLQPRTFLLKYNENGTITDAVDCALDPLSETKCTLKSFTVEKGIYQTSNFRVQPTESIVRFPNITNLCPFGEVFNATRFASVYAWNRKRISNCVADYSVLYNSASFSTFKCYGVSPTKLNDLCFTNVYADSFVIRGDEVRQIAPGQTGKIADYNYKLPDDFTGCVIAWNSNNLDSKVGGNYNYLYRLFRKSNLKPFERDISTEIYQAGSTPCNGVEGFNCYFPLQSYGFQPTNGVGYQPYRVVVLSFELLHAPATVCGPKKSTNLVKNKCVNFNFNGLTGTGVLTESNKKFLPFQQFGRDIADTTDAVRDPQTLEILDITPCSFGGVSVITPGTNTSNQVAVLYQDVNCTEVPVAIHADQLTPTWRVYSTGSNVFQTRAGCLIGAEHVNNSYECDIPIGAGICASYQTQTNSPRRARSVASQSIIAYTMSLGAENSVAYSNNSIACPTNFTISVTTEILPVSMTKTSVDCTMYICGDSTECSNLLLQYGSFCTQLNRALTGIAVEQDKNTQEVFAQVKQIYKTPPIKDFGGFNFSQILPDPSKPSKRSFIEDLLFNKVTLADAGFIKQYGDCLGDIAARDLICAQKFNGLTVLPPLLTDEMIAQYTSALLAGTITSGWTFGAGAALQIPFAMQMAYRFNGIGVTQNVLYENQKLIANQFNSAIGKIQDSLSSTASALGKLQDVVNQNAQALNTLVKQLSSNFGAISSVLNDILSRLDKVEAEVQIDRLITGRLQSLQTYVTQQLIRAAEIRASANLAATKMSECVLGQSKRFDFCGKGYHLMSFPQSAPHGVVFLHVTYVPAQEKNFTTAPAICHDGKAHFPREGVFVSNGTHWFVTQRNFCEPQIITTDNTFVSGNCDVVIGIVNNTVYDPLQPELDSFKEELDKYFKNHTSPDVDLGDISGINASVVNIQKEIDRLNEVAKNLNESLIDLQELGKYEQYIKGGGGSDIIKLLNEQVNKEMQSSNLYMSMSSWCYTHSLDGAGLFLFDHAAEEYEHAKKLIIFLNENNVPVQLTSISAPEHKFEGLTQIFQKAYEHEQHISESINNIVDHAIKSKDHATFNFLQWYVAEQHEEEVLFKDILDKIELIGNENHGLYLADQYVKGIAKSRKS

SEQ ID NO: 5068 - protein, 1379 aa, Artificial Sequence
  SARS-CoV-2/China/WF0028/2020__EPI_ISL_413791 spike protein (1-1211)(I714C_Y1110C) Ferritin construct
MFVFLVLLPLVSSQCVNLTTRTQLPPAYTNSFTRGVYYPDKVFRSSVLHSTQDLFLPFFSNVTWFHAIHVSGTNGTKRFDNPVLPFNDGVYFASTEKSNIIRGWIFGTTLDSKTQSLLIVNNATNVVIKVCEFQFCNDPFLGVYYHKNNKSWMESEFRVYSSANNCTFEYVSQPFLMDLEGKQGNFKNLREFVFKNIDGYFKIYSKHTPINLVRDLPQGFSALEPLVDLPIGINITRFQTLLALHRSYLTPGDSSSGWTAGAAAYYVGYLQPRTFLLKYNENGTITDAVDCALDPLSETKCTLKSFTVEKGIYQTSNFRVQPTESIVRFPNITNLCPFGEVFNATRFASVYAWNRKRISNCVADYSVLYNSASFSTFKCYGVSPTKLNDLCFTNVYADSFVIRGDEVRQIAPGQTGKIADYNYKLPDDFTGCVIAWNSNNLDSKVGGNYNYLYRLFRKSNLKPFERDISTEIYQAGSTPCNGVEGFNCYFPLQSYGFQPTNGVGYQPYRVVVLSFELLHAPATVCGPKKSTNLVKNKCVNFNFNGLTGTGVLTESNKKFLPFQQFGRDIADTTDAVRDPQTLEILDITPCSFGGVSVITPGTNTSNQVAVLYQDVNCTEVPVAIHADQLTPTWRVYSTGSNVFQTRAGCLIGAEHVNNSYECDIPIGAGICASYQTQTNSPRRARSVASQSIIAYTMSLGAENSVAYSNNSIACPTNFTISVTTEILPVSMTKTSVDCTMYICGDSTECSNLLLQYGSFCTQLNRALTGIAVEQDKNTQEVFAQVKQIYKTPPIKDFGGFNFSQILPDPSKPSKRSFIEDLLFNKVTLADAGFIKQYGDCLGDIAARDLICAQKFNGLTVLPPLLTDEMIAQYTSALLAGTITSGWTFGAGAALQIPFAMQMAYRFNGIGVTQNVLYENQKLIANQFNSAIGKIQDSLSSTASALGKLQDVVNQNAQALNTLVKQLSSNFGAISSVLNDILSRLDKVEAEVQIDRLITGRLQSLQTYVTQQLIRAAEIRASANLAATKMSECVLGQSKRVDFCGKGYHLMSFPQSAPHGVVFLHVTYVPAQEKNFTTAPAICHDGKAHFPREGVFVSNGTHWFVTQRNFCEPQIITTDNTFVSGNCDVVIGIVNNTVYDPLQPELESFKEELDKYFKNHTSPDVDLGDISGINASVVNIQKEIDRLNEVAKNLNESLIDLQELGKYEQYIKGGGGSDIIKLLNEQVNKEMQSSNLYMSMSSWCYTHSLDGAGLFLFDHAAEEYEHAKKLIIFLNENNVPVQLTSISAPEHKFEGLTQIFQKAYEHEQHISESINNIVDHAIKSKDHATFNFLQWYVAEQHEEEVLFKDILDKIELIGNENHGLYLADQYVKGIAKSRKS

SEQ ID NO: 5069 - protein, 1379 aa, Artificial Sequence
  SARS-CoV-2/2019-nCoV/USA-CruiseA-18/2020__MT159716.1 spike protein (1-1211)(I714C_Y1110C) Ferritin construct
MFVFLVLLPLVSSQCVNLTTRTQLPPAYTNSFTRGVYYPDKVFRSSVLHSTQDLFLPFFSNVTWFHAIHVSGTNGTKRFDNPVLPFNDGVYFASTEKSNIIRGWIFGTTLDSKTQSLLIVNNATNVVIKVCEFQFCNDPFLGVYYHKNNKSWMESELRVYSSANNCTFEYVSQPFLMDLEGKQGNFKNLREFVFKNIDGYFKIYSKHTPINLVRDLPQGFSALEPLVDLPIGINITRFQTLLALHRSYLTPGDSSSGWTAGAAAYYVGYLQPRTFLLKYNENGTITDAVDCALDPLSETKCTLKSFTVEKGIYQTSNFRVQPTESIVRFPNITNLCPFGEVFNATRFASVYAWNRKRISNCVADYSVLYNSASFSTFKCYGVSPTKLNDLCFTNVYADSFVIRGDEVRQIAPGQTGKIADYNYKLPDDFTGCVIAWNSNNLDSKVGGNYNYLYRLFRKSNLKPFERDISTEIYQAGSTPCNGVEGFNCYFPLQSYGFQPTNGVGYQPYRVVVLSFELLHAPATVCGPKKSTNLVKNKCVNFNFNGLTGTGVLTESNKKFLPFQQFGRDIADTTDAVRDPQTLEILDITPCSFGGVSVITPGTNTSNQVAVLYQDVNCTEVPVAIHADQLTPTWRVYSTGSNVFQTRAGCLIGAEHVNNSYECDIPIGAGICASYQTQTNSPRRARSVASQSIIAYTMSLGAENSVAYSNNSIACPTNFTISVTTEILPVSMTKTSVDCTMYICGDSTECSNLLLQYGSFCTQLNRALTGIAVEQDKNTQEVFAQVKQIYKTPPIKDFGGFNFSQILPDPSKPSKRSFIEDLLFNKVTLADAGFIKQYGDCLGDIAARDLICAQKFNGLTVLPPLLTDEMIAQYTSALLAGTITSGWTFGAGAALQIPFAMQMAYRFNGIGVTQNVLYENQKLIANQFNSAIGKIQDSLSSTASALGKLQDVVNQNAQALNTLVKQLSSNFGAISSVLNDILSRLDKVEAEVQIDRLITGRLQSLQTYVTQQLIRAAEIRASANLAATKMSECVLGQSKRVDFCGKGYHLMSFPQSAPHGVVFLHVTYVPAQEKNFTTAPAICHDGKAHFPREGVFVSNGTHWFVTQRNFCEPQIITTDNTFVSGNCDVVIGIVNNTVYDPLQPELDSFKEELDKYFKNHTSPDVDLGDISGINASVVNIQKEIDRLNEVAKNLNESLIDLQELGKYEQYIKGGGGSDIIKLLNEQVNKEMQSSNLYMSMSSWCYTHSLDGAGLFLFDHAAEEYEHAKKLIIFLNENNVPVQLTSISAPEHKFEGLTQIFQKAYEHEQHISESINNIVDHAIKSKDHATFNFLQWYVAEQHEEEVLFKDILDKIELIGNENHGLYLADQYVKGIAKSRKS

SEQ ID NO: 5070 - protein, 1379 aa, Artificial Sequence
  SARS-CoV-2/SARS-CoV-2/Yunnan-01/human/2020/CHN__MT049951.1 spike protein (1-1211)(I714C_Y1110C) Ferritin construct
MFVFLVLLPLVSSQCVNLTTRTQLPPANTNSFTRGVYYPDKVFRSSVLHSTQDLFLPFFSNVTWFHAIHVSGTNGTKRFDNPVLPFNDGVYFASTEKSNIIRGWIFGTTLDSKTQSLLIVNNATNVVIKVCEFQFCNDPFLGVYYHKNNKSWMESEFRVYSSANNCTFEYVSQPFLMDLEGKQGNFKNLREFVFKNIDGYFKIYSKHTPINLVRDLPQGFSALEPLVDLPIGINITRFQTLLALHRSYLTPGDSSSGWTAGAAAYYVGYLQPRTFLLKYNENGTITDAVDCALDPLSETKCTLKSFTVEKGIYQTSNFRVQPTESIVRFPNITNLCPFGEVFNATRFASVYAWNRKRISNCVADYSVLYNSASFSTFKCYGVSPTKLNDLCFTNVYADSFVIRGDEVRQIAPGQTGKIADYNYKLPDDFTGCVIAWNSNNLDSKVGGNYNYLYRLFRKSNLKPFERDISTEIYQAGSTPCNGVEGFNCYFPLQSYGFQPTNGVGYQPYRVVVLSFELLHAPATVCGPKKSTNLVKNKCVNFNFNGLTGTGVLTESNKKFLPFQQFGRDIADTTDAVRDPQTLEILDITPCSFGGVSVITPGTNTSNQVAVLYQDVNCTEVPVAIHADQLTPTWRVYSTGSNVFQTRAGCLIGAEHVNNSYECDIPIGAGICASYQTQTNSPRRARSVASQSIIAYTMSLGAENSVAYSNNSIACPTNFTISVTTEILPVSMTKTSVDCTMYICGDSTECSNLLLQYGSFCTQLNRALTGIAVEQDKNTQEVFAQVKQIYKTPPIKDFGGFNFSQILPDPSKPSKRSFIEDLLFNKVTLADAGFIKQYGDCLGDIAARDLICAQKFNGLTVLPPLLTDEMIAQYTSALLAGTITSGWTFGAGAALQIPFAMQMAYRFNGIGVTQNVLYENQKLIANQFNSAIGKIQDSLSSTASALGKLQDVVNQNAQALNTLVKQLSSNFGAISSVLNDILSRLDKVEAEVQIDRLITGRLQSLQTYVTQQLIRAAEIRASANLAATKMSECVLGQSKRVDFCGKGYHLMSFPQSAPHGVVFLHVTYVPAQEKNFTTAPAICHDGKAHFPREGVFVSNGTHWFVTQRNFCEPQIITTDNTFVSGNCDVVIGIVNNTVYDPLQPELDSFKEELDKYFKNHTSPDVDLGDISGINASVVNIQKEIDRLNEVAKNLNESLIDLQELGKYEQYIKGGGGSDIIKLLNEQVNKEMQSSNLYMSMSSWCYTHSLDGAGLFLFDHAAEEYEHAKKLIIFLNENNVPVQLTSISAPEHKFEGLTQIFQKAYEHEQHISESINNIVDHAIKSKDHATFNFLQWYVAEQHEEEVLFKDILDKIELIGNENHGLYLADQYVKGIAKSRKS

SEQ ID NO: 5071 - protein, 1379 aa, Artificial Sequence
  SARS-CoV-2/USA/WA-UW292/2020__EPI_ISL_418077 spike protein (1-1211)(I714C_Y1110C) Ferritin construct
MFVFLVLLPLVSSQCVNLTTRTQLPPAYTNSFTRGVYYPDKVFRSSVLHSTQDLFLPFFSNVTWFHAIHVSGTNGTKRFDNPVLPFNDGVYFASTEKSNIIRGWIFGTTLDSKTQSLLIVNNATNVVIKVCEFQFCNDPFLGVYYHKNNKSWMESEFRVYSSANNCTFEYVSQPFLMDLEGKQGNFKNLREFVFKNIDGYFKIYSKHTPINLVRDLPQGFSALEPLVDLPIGINITRFQTLLALHRSYLTPGDSSSGWTAGAAAYYVGYLQPRTFLLKYNENGTITDAVDCALDPLSETKCTLKSFTVEKGIYQTSNFRVQPTESIVRFPNITNLCPFGEVFNATRFASVYAWNRKRISNCVADYSVLYNSASFSTFKCYGVSPTKLNDLCFTNVYADSFVIRGDEVRQIAPGQTGKIADYNYKLPDDFTGCVIAWNSNNLDSKVGGNYNYLYRLFRKSNLKPFERDISTEIYQASSTPCNGVEGFNCYFPLQSYGFQPTNGVGYQPYRVVVLSFELLHAPATVCGPKKSTNLVKNKCVNFNFNGLTGTGVLTESNKKFLPFQQFGRDIADTTDAVRDPQTLEILDITPCSFGGVSVITPGTNTSNQVAVLYQDVNCTEVPVAIHADQLTPTWRVYSTGSNVFQTRAGCLIGAEHVNNSYECDIPIGAGICASYQTQTNSPRRARSVASQSIIAYTMSLGAENSVAYSNNSIACPTNFTISVTTEILPVSMTKTSVDCTMYICGDSTECSNLLLQYGSFCTQLNRALTGIAVEQDKNTQEVFAQVKQIYKTPPIKDFGGFNFSQILPDPSKPSKRSFIEDLLFNKVTLADAGFIKQYGDCLGDIAARDLICAQKFNGLTVLPPLLTDEMIAQYTSALLAGTITSGWTFGAGAALQIPFAMQMAYRFNGIGVTQNVLYENQKLIANQFNSAIGKIQDSLSSTASALGKLQDVVNQNAQALNTLVKQLSSNFGAISSVLNDILSRLDKVEAEVQIDRLITGRLQSLQTYVTQQLIRAAEIRASANLAATKMSECVLGQSKRVDFCGKGYHLMSFPQSAPHGVVFLHVTYVPAQEKNFTTAPAICHDGKAHFPREGVFVSNGTHWFVTQRNFCEPQIITTDNTFVSGNCDVVIGIVNNTVYDPLQPELDSFKEELDKYFKNHTSPDVDLGDISGINASVVNIQKEIDRLNEVAKNLNESLIDLQELGKYEQYIKGGGGSDIIKLLNEQVNKEMQSSNLYMSMSSWCYTHSLDGAGLFLFDHAAEEYEHAKKLIIFLNENNVPVQLTSISAPEHKFEGLTQIFQKAYEHEQHISESINNIVDHAIKSKDHATFNFLQWYVAEQHEEEVLFKDILDKIELIGNENHGLYLADQYVKGIAKSRKS

SEQ ID NO: 5072 - protein, 1379 aa, Artificial Sequence
  SARS-CoV-2/Iceland/192/2020__EPI_ISL_417819 spike protein (1-1211)(I714C_Y1110C) Ferritin construct
MFVFFVLLPLVSSQCVNLTTRTQLPPAYTNSFTRGVYYPDKVFRSSVLHSTQDLFLPFFSNVTWFHAIHVSGTNGTKRFDNPVLPFNDGVYFASTEKSNIIRGWIFGTTLDSKTQSLLIVNNATNVVIKVCEFQFCNDPFLGVYYHKNNKSWMESEFRVYSSANNCTFEYVSQPFLMDLEGKQGNFKNLREFVFKNIDGYFKIYSKHTPINLVRDLPQGFSALEPLVDLPIGINITRFQTLLALHRSYLTPGDSSSGWTAGAAAYYVGYLQPRTFLLKYNENGTITDAVDCALDPLSETKCTLKSFTVEKGIYQTSNFRVQPTESIVRFPNITNLCPFGEVFNATRFASVYAWNRKRISNCVADYSVLYNSASFSTFKCYGVSPTKLNDLCFTNVYADSFVIRGDEVRQIAPGQTGKIADYNYKLPDDFTGCVIAWNSNNLDSKVGGNYNYLYRLFRKSNLKPFERDISTEIYQAGSTPCNGVEGFNCYFPLQSYGFQPTNGVGYQPYRVVVLSFELLHAPATVCGPKKSTNLVKNKCVNFNFNGLTGTGVLTESNKKFLPFQQFGRDIADTTDAVRDPQTLEILDITPCSFGGVSVITPGTNTSNQVAVLYQGVNCTEVPVAIHADQLTPTWRVYSTGSNVFQTRAGCLIGAEHVNNSYECDIPIGAGICASYQTQTNSPRRARSVASQSIIAYTMSLGAENSVAYSNNSIACPTNFTISVTTEILPVSMTKTSVDCTMYICGDSTECSNLLLQYGSFCTQLNRALTGIAVEQDKNTQEVFAQVKQIYKTPPIKDFGGFNFSQILPDPSKPSKRSFIEDLLFNKVTLADAGFIKQYGDCLGDIAARDLICAQKFNGLTVLPPLLTDEMIAQYTSALLAGTITSGWTFGAGAALQIPFAMQMAYRFNGIGVTQNVLYENQKLIANQFNSAIGKIQDSLSSTASALGKLQDVVNQNAQALNTLVKQLSSNFGAISSVLNDILSRLDKVEAEVQIDRLITGRLQSLQTYVTQQLIRAAEIRASANLAATKMSECVLGQSKRVDFCGKGYHLMSFPQSAPHGVVFLHVTYVPAQEKNFTTAPAICHDGKAHFPREGVFVSNGTHWFVTQRNFCEPQIITTDNTFVSGNCDVVIGIVNNTVYDPLQPELDSFKEELDKYFKNHTSPDVDLGDISGINASVVNIQKEIDRLNEVAKNLNESLIDLQELGKYEQYIKGGGGSDIIKLLNEQVNKEMQSSNLYMSMSSWCYTHSLDGAGLFLFDHAAEEYEHAKKLIIFLNENNVPVQLTSISAPEHKFEGLTQIFQKAYEHEQHISESINNIVDHAIKSKDHATFNFLQWYVAEQHEEEVLFKDILDKIELIGNENHGLYLADQYVKGIAKSRKS

SEQ ID NO: 5073 - protein, 1379 aa, Artificial Sequence
  SARS-CoV-2/Belgium/ULG-6939/2020__EPI_ISL_417020 spike protein (1-1211)(I714C_Y1110C) Ferritin construct
MFVFLVLLPLVSSQCVNLTTRTQLPPAYTNSFTRGVYYPDKVFRSSVLHSTQDLFLPFFSNVTWFHAIHVSGTNGTKRFDNPVLPFNDGVYFASTEKSNIIRGWIFGTTLDSKTQSLLIVNNATNVVIKVCEFQFCNDPFLGVYYHKNNKSWMESEFRVYSSANNCTFEYVSQPFLMDLEGKQGNFKNLREFVFKNIDGYFKIYSKHTPINLVRDLPQGFSALEPLVDLPIGINITRFQTLLALHRSYLTPGDSSSGWTAGAAAYYVGYLQPRTFLLKYNENGTITDAVDCALDPLSETKCTLKSFTVEKGIYQTSNFRVQPTESIVRFPNITNLCPFGEVFNATRFASVYAWNRKRISNCVADYSVLYNSASFSTFKCYGVSPTKLNDLCFTNVYADSFVIRGDEVRQIAPGQTGKIADYNYKLPDDFTGCVIAWNSNNLDSKVGGNYNYLYRLFRKSNLKPFERDISTEIYQAGSTPCNGVEGFNCYFPLQSYGFQPTNGVGYQPYRVVVLSFELLHAPATVCGPKKSTNLVKNKCVNFNFNGLTGTGVLTESNKKFLPFQQFGRDIADTTDAVRDPQTLEILDITPCSFGGVSVITPGTNTSNQVAVLYQGVNCTEVPVAIHADQLTPTWRVYSTGSNVFQTRAGCLIGAEHVNNSYECDIPIGAGICASYQTQTNSPRRARSVASQSIIAYTMSLGAENSVVYSNNSIACPTNFTISVTTEILPVSMTKTSVDCTMYICGDSTECSNLLLQYGSFCTQLNRALTGIAVEQDKNTQEVFAQVKQIYKTPPIKDFGGFNFSQILPDPSKPSKRSFIEDLLFNKVTLADAGFIKQYGDCLGDIAARDLICAQKFNGLTVLPPLLTDEMIAQYTSALLAGTITSGWTFGAGAALQIPFAMQMAYRFNGIGVTQNVLYENQKLIANQFNSAIGKIQDSLSSTASALGKLQDVVNQNAQALNTLVKQLSSNFGAISSVLNDILSRLDKVEAEVQIDRLITGRLQSLQTYVTQQLIRAAEIRASANLAATKMSECVLGQSKRVDFCGKGYHLMSFPQSAPHGVVFLHVTYVPAQEKNFTTAPAICHDGKAHFPREGVFVSNGTHWFVTQRNFCEPQIITTDNTFVSGNCDVVIGIVNNTVYDPLQPELDSFKEELDKYFKNHTSPDVDLGDISGINASVVNIQKEIDRLNEVAKNLNESLIDLQELGKYEQYIKGGGGSDIIKLLNEQVNKEMQSSNLYMSMSSWCYTHSLDGAGLFLFDHAAEEYEHAKKLIIFLNENNVPVQLTSISAPEHKFEGLTQIFQKAYEHEQHISESINNIVDHAIKSKDHATFNFLQWYVAEQHEEEVLFKDILDKIELIGNENHGLYLADQYVKGIAKSRKS

SEQ ID NO: 5074 - protein, 1379 aa, Artificial Sequence
  SARS-CoV-2/France/HF2496/2020__EPI_ISL_418231 spike protein (1-1211)(I714C_Y1110C) Ferritin construct
MFVFLVLLPLVSSQCVNLTTRTQLPPAYTNSFTRGVYYPDKVFRSSVLHSTQDLFLPFFSNVTWFHAIHVSGTNGTKRFDNPVLPFNDGVYFASTEKSNIIRGWIFGTTLDSKTQSLLIVNNATNVVIKVCEFQFCNDPFLGVYYHKNNKSWMESEFRVYSSANNCTFEYVSQPFLMDLEGKQGNFKNLREFVFKNIDGYFKIYSKHTPINLVRDLPQGFSALEPLVDLPIGINITRFQTLLALHRSYLTPGDSSSGWTAGAAAYYVGYLQPRTFLLKYNENGTITDAVDCALDPLSETKCTLKSFTVEKGIYQTSNFRVQPTESIVRFPNITNLCPFGEVFNATRFASVYAWNRKRISNCVADYSVLYNSASFSTFKCYGVSPTKLNDLCFTNVYADSFVIRGDEVRQIAPGQTGKIADYNYKLPDDFTGCVIAWNSNNLDSKVGGNYNYLYRLFRKSNLKPFERDISTEIYQAGSTPCNGVEGFNCYFPLQSYGFQPTNGVGYQPYRVVVLSFELLHAPATVCGPKKSTNLVKNKCVNFNFNGLTGTGVLTESNKKFLPFQQFGRDIADTTDAVRDPQTLEILDITPCSFGGVSVITPGTNTSNQVAVLYQGVNCTEVPVAIHADQLTPTWRVYSTGSNVFQTRAGCLIGAEHVNNSYECDIPIGAGICASYQTQTNSPRRARSVASQSIIAYTMSLGAENSVAYSNNSIACPTNFTISVTTEILPVSMTKTSVDCTMYICGDSTECSNLLLQYGSFCTQLNRALTGIAVEQDKNTQEVFAQVKQIYKTPPIKDFGGFNFSQILPDPSKPSKRSFIEDLLFNKVTLADAGFIKQYGDCLGDIVARDLICAQKFNGLTVLPPLLTDEMIAQYTSALLAGTITSGWTFGAGAALQIPFAMQMAYRFNGIGVTQNVLYENQKLIANQFNSAIGKIQDSLSSTASALGKLQDVVNQNAQALNTLVKQLSSNFGAISSVLNDILSRLDKVEAEVQIDRLITGRLQSLQTYVTQQLIRAAEIRASANLAATKMSECVLGQSKRVDFCGKGYHLMSFPQSAPHGVVFLHVTYVPAQEKNFTTAPAICHDGKAHFPREGVFVSNGTHWFVTQRNFCEPQIITTDNTFVSGNCDVVIGIVNNTVYDPLQPELDSFKEELDKYFKNHTSPDVDLGDISGINASVVNIQKEIDRLNEVAKNLNESLIDLQELGKYEQYIKGGGGSDIIKLLNEQVNKEMQSSNLYMSMSSWCYTHSLDGAGLFLFDHAAEEYEHAKKLIIFLNENNVPVQLTSISAPEHKFEGLTQIFQKAYEHEQHISESINNIVDHAIKSKDHATFNFLQWYVAEQHEEEVLFKDILDKIELIGNENHGLYLADQYVKGIAKSRKS

SEQ ID NO: 5075 - protein, 1379 aa, Artificial Sequence
  SARS-CoV-2/USA/WA-UW291/2020__EPI_ISL_418076 spike protein (1-1211)(I714C_Y1110C) Ferritin construct
MFVFLVLLPLVSSQCVNLTTRTQLPPAYTNSFTRGVYYPDKVFRSSVLHSTQDLFLPFFSNVTWFHAIHVSGTNGTKRFDNPVLPFNDGVYFASTEKSNIIRGWIFGTTLDSKTQSLLIVNNATNVVIKVCEFQFCNDPFLGVYYHKNNKSWMESEFRVYSSANNCTFEYVSQPFLMDLEGKQGNFKNLREFVFKNIDGYFKIYSKHTPINLVRDLPQGFSALEPLVDLPIGINITRFQTLLALHRSYLTPGDSSSGWTAGAAAYYVGYLQPRTFLLKYNENGTITDAVDCALDPLSETKCTLKSFTVEKGIYQTSNFRVQPTESIVRFPNITNLCPFGEVFNATRFASVYAWNRKRISNCVADYSVLYNSASFSTFKCYGVSPTKLNDLCFTNVYADSFVIRGDEVRQIAPGQTGKIADYNYKLPDDFTGCVIAWNSNNLDSKVGGNYNYLYRLFRKSNLKPFERDISTEIYQAGSTPCNGVEGFNCYFPLQSYGFQPTNGVGYQPYRVVVLSFELLHAPATVCGPKKSTNLVKNKCVNFNFNGLTGTGVLTESNKKFLPFQQFGRDIADTTDAVRDPQTLEILDITPCSFGGVSVITPGTNTSNQVAVLYQGVNCTEVPVAIHADQLTPTWRVYSTGSNVFQTRAGCLIGAEHVNNSYECDIPIGAGICASYQTQTNSPRRARSVASQSIIAYTMSLGAENSVAYSNNSIACPTNFTISVTTEILPVSMTKTSVDCTMYICGDSTECSNLLLQYGSFCTQLNRALTGIAVEQDKNTQEVFAQVKQIYKTPPIKDFGGFNFSQILPDPSKPSKRSFIEDLLFNKVTLADAGFIKQYGDCLGDIAARDLICAQKFNGLTVLPPLLTDEMIAQYTSALLAGTITSGWTFGAGAALQIPFAMQMAYRFNGIGVTQNVLYENQKLIANQFNSAIGKIQYSLSSTASALGKLQDVVNQNAQALNTLVKQLSSNFGAISSVLNDILSRLDKVEAEVQIDRLITGRLQSLQTYVTQQLIRAAEIRASANLAATKMSECVLGQSKRVDFCGKGYHLMSFPQSAPHGVVFLHVTYVPAQEKNFTTAPAICHDGKAHFPREGVFVSNGTHWFVTQRNFCEPQIITTDNTFVSGNCDVVIGIVNNTVYDPLQPELDSFKEELDKYFKNHTSPDVDLGDISGINASVVNIQKEIDRLNEVAKNLNESLIDLQELGKYEQYIKGGGGSDIIKLLNEQVNKEMQSSNLYMSMSSWCYTHSLDGAGLFLFDHAAEEYEHAKKLIIFLNENNVPVQLTSISAPEHKFEGLTQIFQKAYEHEQHISESINNIVDHAIKSKDHATFNFLQWYVAEQHEEEVLFKDILDKIELIGNENHGLYLADQYVKGIAKSRKS

SEQ ID NO: 5076 - protein, 1379 aa, Artificial Sequence; identical to SEQ ID NO: 5039
  SARS-CoV-2/Portugal/PT0034/2020__EPI_ISL_418019 spike protein (1-1211)(I714C_Y1110C) Ferritin construct

SEQ ID NO: 5077 - protein, 1379 aa, Artificial Sequence
  SARS-CoV-2/Iceland/202/2020__EPI_ISL_417750 spike protein (1-1211)(I714C_Y1110C) Ferritin construct
MFVFLVLLPLVSSQCVNLTTRTQLPPAYTNSFTRGVYYPDKVFRSSVLHSTQDLFLPFFSNVTWFHAIHVSGTNGTKRFDNPVLPFNDGVYFASTEKSNIIRGWIFGTTLDSKTQSLLIVNNATNVVIKVCEFQFCNDPFLGVYYHKNNKSWMESEFRVYSSANNCTFEYVSQPFLMDLEGKQGNFKNLREFVFKNIDGYFKIYSKHTPINLVRDLPQGFSALEPLVDLPIGINITRFQTLLALHRSYLTPGDSSSGWTAGAAAYYVGYLQPRTFLLKYNENGTITDAVDCALDPLSETKCTLKSFTVEKGIYQTSNFRVQPTESIVRFPNITNLCPFGEVFNATRFASVYAWNRKRISNCVADYSVLYNSASFSTFKCYGVSPTKLNDLCFTNVYADSFVIRGDEVRQIAPGQTGKIADYNYKLPDDFTGCVIAWNSNNLDSKVGGNYNYLYRLFRKSNLKPFERDISTEIYQAGSTPCNGVEGFNCYFPLQSYGFQPTNGVGYQPYRVVVLSFELLHAPATVCGPKKSTNLVKNKCVNFNFNGLTGTGVLTESNKKFLPFQQFGRDIADTTDAVRDPQTLEILDITPCSFGGVSVITPGTNTSNQVAVLYQDVNCTEVPVAIHADQLTPTWRVYSTGSNVFQTRAGCLIGAEHVNNSYECDIPIGAGICASYQTQTNSPRRARSVASQSIIAYTMSLGAENSVAYSNNSIACPTNFTISVTTEILPVSMTKTSVDCTMYICGDSTECSNLLLQYGSFCTQLNRALTGIAVEQDKNTQEVFAQVKQIYKTPPIKDFGGFNFSQILPDPSKPSKRSFIEDLLFNKVTLADAGFIKQYGDCLGDIAARDLICAQKFNGLTVLPPLLTDEMIAQYTSALLAGTITSGWTFGAGAALQIPFAMQMAYRFNGIGVTQNVLYENQKLIANQFNSAIGKIQDSLSSTASALGKLQDVVNQNAQALNTLVKQLSSNFGAISSVLNDILSRLDKVEAEVQIDRLITGRLQSLQTYVTQQLIRAAEIRASANLAATKMSECVLGQSKRVDFCGKGYHLMSFPQSAPHGVVFLHVTYVPAQEKNFTTAPAICHDGKAHFPREGVFVSNGTHWFVTQRNFCEPQIITTDNTFVSGNCDVVIGIVNNTVYDPLQPELDSFKEELDKYFKNHTSPDVDLGDIPGINASVVNIQKEIDRLNEVAKNLNESLIDLQELGKYEQYIKGGGGSDIIKLLNEQVNKEMQSSNLYMSMSSWCYTHSLDGAGLFLFDHAAEEYEHAKKLIIFLNENNVPVQLTSISAPEHKFEGLTQIFQKAYEHEQHISESINNIVDHAIKSKDHATFNFLQWYVAEQHEEEVLFKDILDKIELIGNENHGLYLADQYVKGIAKSRKS

SEQ ID NO: 5078 - protein, 1379 aa, Artificial Sequence
  SARS-CoV-2/USA/WA-UW261/2020__EPI_ISL_418046 spike protein (1-1211)(I714C_Y1110C) Ferritin construct
MFVFLVLLPLVSSQCVNLTTRTQLPPAYTNSFTRGVYYPDKVFRSSVLHSTQDLFLPFFSNVTWFHAIHVSGTNGTKRFDNPVLPFNDGVYFASTEKSNIIRGWIFGTTLDSKTQSLLIVNNATNVVIKVCEFQFCNDPFLGVYYHKNNKSWMESEFRVYSSANNCTFEYVSQPFLMDLEGKQGNFKNLREFVFKNIDGYFKIYSKHTPINLVRDLPQGFSALEPLVDLPIGINITRFQTLLALHRSYLTPGDSSSGWTAGAAAYYVGYLQPRTFLLKYNENGTITDAVDCALDPLSETKCTLKSFTVEKGIYQTSNFRVQPTESIVRFPNITNLCPFGEVFNATRFTSVYAWNRKRISNCVADYSVLYNSASFSTFKCYGVSPTKLNDLCFTNVYADSFVIRGDEVRQIAPGQTGKIADYNYKLPDDFTGCVIAWNSNNLDSKVGGNYNYLYRLFRKSNLKPFERDISTEIYQAGSTPCNGVEGFNCYFPLQSYGFQPTNGVGYQPYRVVVLSFELLHAPATVCGPKKSTNLVKNKCVNFNFNGLTGTGVLTESNKKFLPFQQFGRDIADTTDAVRDPQTLEILDITPCSFGGVSVITPGTNTSNQVAVLYQDVNCTEVPVAIHADQLTPTWRVYSTGSNVFQTRAGCLIGAEHVNNSYECDIPIGAGICASYQTQTNSPRRARSVASQSIIAYTMSLGAENSVAYSNNSIACPTNFTISVTTEILPVSMTKTSVDCTMYICGDSTECSNLLLQYGSFCTQLNRALTGIAVEQDKNTQEVFAQVKQIYKTPPIKDFGGFNFSQILPDPSKPSKRSFIEDLLFNKVTLADAGFIKQYGDCLGDIAARDLICAQKFNGLTVLPPLLTDEMIAQYTSALLAGTITSGWTFGAGAALQIPFAMQMAYRFNGIGVTQNVLYENQKLIANQFNSAIGKIQDSLSSTASALGKLQDVVNQNAQALNTLVKQLSSNFGAISSVLNDILSRLDKVEAEVQIDRLITGRLQSLQTYVTQQLIRAAEIRASANLAATKMSECVLGQSKRVDFCGKGYHLMSFPQSAPHGVVFLHVTYVPAQEKNFTTAPAICHDGKAHFPREGVFVSNGTHWFVTQRNFCEPQIITTDNTFVSGNCDVVIGIVNNTVYDPLQPELDSFKEELDKYFKNHTSPDVDLGDISGINASVVNIQKEIDRLNEVAKNLNESLIDLQELGKYEQYIKGGGGSDIIKLLNEQVNKEMQSSNLYMSMSSWCYTHSLDGAGLFLFDHAAEEYEHAKKLIIFLNENNVPVQLTSISAPEHKFEGLTQIFQKAYEHEQHISESINNIVDHAIKSKDHATFNFLQWYVAEQHEEEVLFKDILDKIELIGNENHGLYLADQYVKGIAKSRKS

SEQ ID NO: 5079 - protein, 1379 aa, Artificial Sequence
  SARS-CoV-2/Portugal/PT0035/2020__EPI_ISL_418020 spike protein (1-1211)(I714C_Y1110C) Ferritin construct
MFVFLVLLPLVSSQCVNLTTRTQLPPAYTNSFTRGVYYPDKVFRSSVLHSTQDLFLPFFSNVTWFHAIHVSGTNGTKRFDNPVLPFNDGVYFASTEKSNIIRGWIFGTTLDSKTQSLLIVNNATNVVIKVCEFQFCNDPFLGVYYHKNNKSWMESEFRVYSSANNCTFEYVSQPFLMDLEGKQGNFKNLREFVFKNIDGYFKIYSKHTPINLVRDLPQGFSALEPLVDLPIGINITRFQTLLALHRSYLTPGDSSSGWTAGAAAYYVGYLQPRTFLLKYNENGTITDAVDCALDPLSETKCTLKSFTVEKGIYQTSNFRVQPTESIVRFPNITNLCPFGEVFNATRFASVYAWNRKRISNCVADYSVLYNSASFSTFKCYGVSPTKLNDLCFTNVYADSFVIRGDEVRQIAPGQTGKIADYNYKLPDDFTGCVIAWNSNNLDSKVGGNYNYLYRLFRKSNLKPFERDISTEIYQAGSTPCNGVEGFNCYFPLQSYGFQPTNGVGYQPYRVVVLSFELLHAPATVCGPKKSTNLVKNKCVNFNFNGLTGTGVLTESNKKFLPFQQFGRDIADTTDAVRDPQTLEILDITPCSFGGVSVITPGTNTSNQVAVLYQDVNCTEVPVAIHADQLTPTWRVYSTGSNVFQTRAGCLIGAEHVNNSYECDIPIGAGICASYQTQTNSPRRARSVASQSIIAYTMSLGAENSVAYSNNSIACPTNFTISVTTEILPVSMTKTSVDCTMYICGDSTECSNLLLQYGSFCTQLNRALTGIAVEQDKNTQEVFAQVKQIYKTPPIKDFGGFNFSQILPDPSKPSKRSFIEDLLFNKVTLADAGFIKQYGDCLGDISARDLICAQKFNGLTVLPPLLTDEMIAQYTSALLAGTITSGWTFGAGAALQIPFAMQMAYRFNGIGVTQNVLYENQKLIANQFNSAIGKIQDSLSSTASALGKLQDVVNQNAQALNTLVKQLSSNFGAISSVLNDILSRLDKVEAEVQIDRLITGRLQSLQTYVTQQLIRAAEIRASANLAATKMSECVLGQSKRVDFCGKGYHLMSFPQSAPHGVVFLHVTYVPAQEKNFTTAPAICHDGKAHFPREGVFVSNGTHWFVTQRNFCEPQIITTDNTFVSGNCDVVIGIVNNTVYDPLQPELDSFKEELDKYFKNHTSPDVDLGDISGINASVVNIQKEIDRLNEVAKNLNESLIDLQELGKYEQYIKGGGGSDIIKLLNEQVNKEMQSSNLYMSMSSWCYTHSLDGAGLFLFDHAAEEYEHAKKLIIFLNENNVPVQLTSISAPEHKFEGLTQIFQKAYEHEQHISESINNIVDHAIKSKDHATFNFLQWYVAEQHEEEVLFKDILDKIELIGNENHGLYLADQYVKGIAKSRKS

SEQ ID NO: 5080 - protein, 1379 aa, Artificial Sequence
  SARS-CoV-2/USA/NY-NYUMC7/2020__EPI_ISL_418192 spike protein (1-1211)(I714C_Y1110C) Ferritin construct
MFVFLVLLPLVSSQCVNLTTRTQLPPAYTNSFTRGVYYPDKVFRSSVLHSTQDLFLPFFSNVTWFHAIHVSGTNGTKRFDNPVLPFNDGVYFASTEKSNIIRGWIFGTTLDSKTQSLLIVNNATNVVIKVCEFQFCNDPFLGVYHHKNNKSWMESEFRVYSSANNCTFEYVSQPFLMDLEGKQGNFKNLREFVFKNIDGYFKIYSKHTPINLVRDLPQGFSALEPLVDLPIGINITRFQTLLALHRSYLTPGDSSSGWTAGAAAYYVGYLQPRTFLLKYNENGTITDAVDCALDPLSETKCTLKSFTVEKGIYQTSNFRVQPTESIVRFPNITNLCPFGEVFNATRFASVYAWNRKRISNCVADYSVLYNSASFSTFKCYGVSPTKLNDLCFTNVYADSFVIRGDEVRQIAPGQTGKIADYNYKLPDDFTGCVIAWNSNNLDSKVGGNYNYLYRLFRKSNLKPFERDISTEIYQAGSTPCNGVEGFNCYFPLQSYGFQPTNGVGYQPYRVVVLSFELLHAPATVCGPKKSTNLVKNKCVNFNFNGLTGTGVLTESNKKFLPFQQFGRDIADTTDAVRDPQTLEILDITPCSFGGVSVITPGTNTSNQVAVLYQGVNCTEVPVAIHADQLTPTWRVYSTGSNVFQTRAGCLIGAEHVNNSYECDIPIGAGICASYQTQTNSPRRARSVASQSIIAYTMSLGAENSVAYSNNSIACPTNFTISVTTEILPVSMTKTSVDCTMYICGDSTECSNLLLQYGSFCTQLNRALTGIAVEQDKNTQEVFAQVKQIYKTPPIKDFGGFNFSQILPDPSKPSKRSFIEDLLFNKVTLADAGFIKQYGDCLGDIAARDLICAQKFNGLTVLPPLLTDEMIAQYTSALLAGTITSGWTFGAGAALQIPFAMQMAYRFNGIGVTQNVLYENQKLIANQFNSAIGKIQDSLSSTASALGKLQDVVNQNAQALNTLVKQLSSNFGAISSVLNDILSRLDKVEAEVQIDRLITGRLQSLQTYVTQQLIRAAEIRASANLAATKMSECVLGQSKRVDFCGKGYHLMSFPQSAPHGVVFLHVTYVPAQEKNFTTAPAICHDGKAHFPREGVFVSNGTHWFVTQRNFCEPQIITTDNTFVSGNCDVVIGIVNNTVYDPLQPELDSFKEELDKYFKNHTSPDVDLGDISGINASVVNIQKEIDRLNEVAKNLNESLIDLQELGKYEQYIKGGGGSDIIKLLNEQVNKEMQSSNLYMSMSSWCYTHSLDGAGLFLFDHAAEEYEHAKKLIIFLNENNVPVQLTSISAPEHKFEGLTQIFQKAYEHEQHISESINNIVDHAIKSKDHATFNFLQWYVAEQHEEEVLFKDILDKIELIGNENHGLYLADQYVKGIAKSRKS

SEQ ID NO: 5081 - protein, 1379 aa, Artificial Sequence
  SARS-CoV-2/Iceland/189/2020__EPI_ISL_417709 spike protein (1-1211)(I714C_Y1110C) Ferritin construct
MFVFLVLLPLVSSQCVNLTTRTQLPPAYTNSFTRGVYYPDKVFRSSVLHSTQDLFLPFFSNVTWFHAIHVSGTNGTKRFDNPVLPFNDGVYFASTEKSNIIRGWIFGTTLDSKTQSLLIVNNATNVVIKVCEFQFCNDPFLGVYYHKNNKSWMESEFRVYSSANNCTFEYVSQPFLMDLEGKQGNFKNLREFVFKNIDGYFKIYSKHTPINLVRDLPQGFSALEPLVDLPIGINITRFQTLLALHRSYLTPGDSSSGWTAGAAAYYVGYLQPRTFLLKYNENGTITDAVDCALDPLSETKCTLKSFTVEKGIYQTSNFRVQPTESIVRFPNITNLCPFGEVFNATRFASVYAWNRKRISNCVADYSVLYNSASFSTFKCYGVSPTKLNDLCFTNVYADSFVIRGDEVRQIAPGQTGKIADYNYKLPDDFTGCVIAWNSNNLDSKVGGNYNYLYRLFRKSNLKPFERDISTEIYQAGSTPCNGVEGFNCYFPLQSYGFQPTNGVGYQPYRVVVLSFELLHAPATVCGPKKSTNLVKNKCVNFNFNGLTGTGVLTESNKKFLPFQQFGRDIADTTDAVRDPQTLEILDITPCSFGGVSVITPGTNTSNQVAVLYQGVNCTEVPVAIHADQLTPTWRVYSTGSNVFQTRAGCLIGAEHVNNSYECDIPIGAGICASYQTQTNSPRRARSVASQSIIAYTMSLGAENSVAYSNNSIACPTNFTISVTTEILPVSMTKTSVDCTMYICGDSTECSNLLLQYGSFCTQLNRALTGIAVEQDKNTQEVFAQVKQIYKTPPIKDFGGFNFSQILPDPSKPSKRSFIEDLLFNKVTLADAGFTKQYGDCLGDIAARDLICAQKFNGLTVLPPLLTDEMIAQYTSALLAGTITSGWTFGAGAALQIPFAMQMAYRFNGIGVTQNVLYENQKLIANQFNSAIGKIQDSLSSTASALGKLQDVVNQNAQALNTLVKQLSSNFGAISSVLNDILSRLDKVEAEVQIDRLITGRLQSLQTYVTQQLIRAAEIRASANLAATKMSECVLGQSKRVDFCGKGYHLMSFPQSAPHGVVFLHVTYVPAQEKNFTTAPAICHDGKAHFPREGVFVSNGTHWFVTQRNFCEPQIITTDNTFVSGNCDVVIGIVNNTVYDPLQPELDSFKEELDKYFKNHTSPDVDLGDISGINASVVNIQKEIDRLNEVAKNLNESLIDLQELGKYEQYIKGGGGSDIIKLLNEQVNKEMQSSNLYMSMSSWCYTHSLDGAGLFLFDHAAEEYEHAKKLIIFLNENNVPVQLTSISAPEHKFEGLTQIFQKAYEHEQHISESINNIVDHAIKSKDHATFNFLQWYVAEQHEEEVLFKDILDKIELIGNENHGLYLADQYVKGIAKSRKS

SEQ ID NO: 5082 - protein, 1379 aa, Artificial Sequence
  SARS-CoV-2/Australia/NSW56/2020__EPI_ISL_417408 spike protein (1-1211)(I714C_Y1110C) Ferritin construct
MFVFLVLLPLVSSQCVNLTTRTQLPPAYTNSFTRGVYYPDKVFRSSVLHSTQDLFLPFFSNVTWFHAIHVSGTNGTKRFDNPVLPFNDGVYFASTEKSNIIRGWIFGTTLDSKTQSLLIVNNATNVVIKVCEFQFCNDPFLGVYYHKNNKSWMESEFRVYSSANNCTFEYVSQPFLMDLEGKQGNFKNLREFVFKNIDGYFKIYSKHTPINLVRDLPQGFSALEPLVDLPIGINITRFQTLLALHRSYLTPGDSSSGWTAGAAAYYVGYLQPRTFLLKYNENGTITDAVDCALDPLSETKCTLKSFTVEKGIYQTSNFRVQPTESIVRFPNITNLCPFGEVFNATRFASVYAWNRKRISNCVADYSVLYNSASFSTFKCYGVSPTKLNDLCFTNVYADSFVIRGDEVRQIAPGQTGKIADYNYKLPDDFTGCVIAWNSNNLDSKVGGNYNYLYRLFRKSNLKPFERDISTEIYQAGSTPCNGVEGFNCYFPLQSYGFQPTNGVGYQPYRVVVLSFELLHAPATVCGPKKSTNLVKNKCVNFNFNGLTGTGVLTESNKKFLPFQQFGRDIADTTDAVRDPQTLEILDITPCSFGGVSVITPGTNTSNQVAVLYQDVNCTEVPVAIHADQLTPTWRVYSTGSNVFQTRAGCLIGAEHVNNSYECDIPIGAGICASYQTQTNSPRRARSVASQSIIAYTMSLGAENSVAYSNNSIACPTNFTISVTTEILPVSMTKTSVDCTMYICGDSTECSNLLLQYGSFCTQLNRALTGIAVEQDKNTQEVFAQVKQIYKTPPIKDFGGFNFSQILPDSSKPSKRSFIEDLLFNKVTLADAGFIKQYGDCLGDIAARDLICAQKFNGLTVLPPLLTDEMIAQYTSALLAGTITSGWTFGAGAALQIPFAMQMAYRFNGIGVTQNVLYENQKLIANQFNSAIGKIQDSLSSTASALGKLQDVVNQNAQALNTLVKQLSSNFGAISSVLNDILSRLDKVEAEVQIDRLITGRLQSLQTYVTQQLIRAAEIRASANLAATKMSECVLGQSKRVDFCGKGYHLMSFPQSAPHGVVFLHVTYVPAQEKNFTTAPAICHDGKAHFPREGVFVSNGTHWFVTQRNFCEPQIITTDNTFVSGNCDVVIGIVNNTVYDPLQPELDSFKEELDKYFKNHTSPDVDLGDISGINASVVNIQKEIDRLNEVAKNLNESLIDLQELGKYEQYIKGGGGSDIIKLLNEQVNKEMQSSNLYMSMSSWCYTHSLDGAGLFLFDHAAEEYEHAKKLIIFLNENNVPVQLTSISAPEHKFEGLTQIFQKAYEHEQHISESINNIVDHAIKSKDHATFNFLQWYVAEQHEEEVLFKDILDKIELIGNENHGLYLADQYVKGIAKSRKS

SEQ ID NO: 5083 - protein, 1379 aa, Artificial Sequence
  SARS-CoV-2/Iceland/280/2020__EPI_ISL_417608 spike protein (1-1211)(I714C_Y1110C) Ferritin construct
MFVFLVLLPLVSSQCVNLTTRTQLPPAYTNSFTRGVYYPDKVFRSSVLHSTQDLFLPFFSNVTWFHAIHVSGTNGTKRFDNPVLPFNDGVYFASTEKSNIIRGWIFGTTLDSKTQSLLIVNNATNVVIKVCEFQFCNDPFLGVYYHKNNKSWMESEFRVYSSANNCTFEYVSQPFLMDLEGKQGNFKNLREFVFKNIDGYFKIYSKHTPINLVRDLPQGFSALEPLVDLPIGINITRFQTLLALHRSYLTPGDSSSGWTAGAAAYYVGYLQPRTFLLKYNENGTITDAVDCALDPLSETKCTLKSFTVEKGIYQTSNFRVQPTESIVRFPNITNLCPFGEVFNATRFASVYAWNRKRISNCVADYSVLYNSASFSTFKCYGVSPTKLNDLCFTNVYADSFVIRGDEVRQIAPGQTGKIADYNYKLPDDFTGCVIAWNSNNLDSKVGGNYNYLYRLFRKSNLKPFERDISTEIYQAGSTPCNGVEGFNCYFPLQSYGFQPTNGVGYQPYRVVVLSFELLHAPATVCGPKKSTNLVKNKCVNFNFNGLTGTGVLTESNKKFLPFQQFGRDIADTTDAVRDPQTLEILDITPCSFGGVSVITPGTNTSNQVAVLYQGVNCTEVPVAIHADQLTPTWRVYSTGSNVFQTRAGCLIGAEHVNNSYECDIPIGAGICASYHTQTNSPRRARSVASQSIIAYTMSLGAENSVAYSNNSIACPTNFTISVTTEILPVSMTKTSVDCTMYICGDSTECSNLLLQYGSFCTQLNRALTGIAVEQDKNTQEVFAQVKQIYKTPPIKDFGGFNFSQILPDPSKPSKRSFIEDLLFNKVTLADAGFIKQYGDCLGDIAARDLICAQKFNGLTVLPPLLTDEMIAQYTSALLAGTITSGWTFGAGAALQIPFAMQMAYRFNGIGVTQNVLYENQKLIANQFNSAIGKIQDSLSSTASALGKLQDVVNQNAQALNTLVKQLSSNFGAISSVLNDILSRLDKVEAEVQIDRLITGRLQSLQTYVTQQLIRAAEIRASANLAATKMSECVLGQSKRVDFCGKGYHLMSFPQSAPHGVVFLHVTYVPAQEKNFTTAPAICHDGKAHFPREGVFVSNGTHWFVTQRNFCEPQIITTDNTFVSGNCDVVIGIVNNTVYDPLQPELDSFKEELDKYFKNHTSPDVDLGDISGINASVVNIQKEIDRLNEVAKNLNESLIDLQELGKYEQYIKGGGGSDIIKLLNEQVNKEMQSSNLYMSMSSWCYTHSLDGAGLFLFDHAAEEYEHAKKLIIFLNENNVPVQLTSISAPEHKFEGLTQIFQKAYEHEQHISESINNIVDHAIKSKDHATFNFLQWYVAEQHEEEVLFKDILDKIELIGNENHGLYLADQYVKGIAKSRKS

SEQ ID NO: 5084 - protein, 1379 aa, Artificial Sequence; identical to SEQ ID NO: 5039
  SARS-CoV-2/Iceland/247/2020__EPI_ISL_417575 spike protein (1-1211)(I714C_Y1110C) Ferritin construct

SEQ ID NO: 5085 - protein, 1379 aa, Artificial Sequence
  SARS-CoV-2/Iceland/238/2020__EPI_ISL_417566 spike protein (1-1211)(I714C_Y1110C) Ferritin construct
MFVFLVLLPLVSSQCVNLTTRTQLPPAYTNSFTRGVYYPDKVFRSSVLHSTQDLFLPFFSNVTWFHAIHVSGTNGTKRFDNPVLPFNDGVYFASTEKSNIIRGWIFGTTLDSKTQSLLIVNNATNVVIKVCEFQFCNDPFLGVYYHKNNKSWMESEFRVYSSANNCTFEYVSQPFLMDLEGKQGNFKNLREFVFKNIDGYFKIYSKHTPINLVRDLPQGFSALEPLVDLPIGINITRFQTLLALHRSYLTPGDSSSGWTAGAAAYYVGYLQPRTFLLKYNENGTITDAVDCALDPLSETKCTLKSFTVEKGIYQTSNFRVQPTESIVRFPNITNLCPFGEVFNATRFASVYAWNRKRISNCVADYSVLYNSASFSTFKCYGVSPTKLNDLCFTNVYADSFVIRGDEVRQIAPGQTGKIADYNYKLPDDFTGCVIAWNSNNLDSKVGGNYNYLYRLFRKSNLKPFERDISTEIYQAGSTPCNGVEGFNCYFPLQSYGFQPTNGVGYQPYRVVVLSFELLHAPATVCGPKKSTNLVKNKCVNFNFNGLTGTGVLTESNKKFLPFQQFGRDIADTTDAVRDPQTLEILDITPCSFGGVSVITPGTNTSNQVAVLYQGVNCTEVPVAIHADQLTPTWRVYSTGSNVFQTRAGCLIGAEHVNNSYECDIPIGAGICASYQTQTNSPRRARSVASQSIIAYTMSLGAENSVAYSNNSIACPTNFTISVTTEILPVSMTKTSVDCTMYICGDSTECSNLLLQYGSFCTQLNRALTGIAVEQDKNTQEVFAQVKQIYKTPPIKDFGGFNFSQILPDPSKPSKRSFIEDLLFNKVTLADVGFIKQYGDCLGDIAARDLICAQKFNGLTVLPPLLTDEMIAQYTSALLAGTITSGWTFGAGAALQIPFAMQMAYRFNGIGVTQNVLYENQKLIANQFNSAIGKIQDSLSSTASALGKLQDVVNQNAQALNTLVKQLSSNFGAISSVLNDILSRLDKVEAEVQIDRLITGRLQSLQTYVTQQLIRAAEIRASANLAATKMSECVLGQSKRVDFCGKGYHLMSFPQSAPHGVVFLHVTYVPAQEKNFTTAPAICHDGKAHFPREGVFVSNGTHWFVTQRNFCEPQIITTDNTFVSGNCDVVIGIVNNTVYDPLQPELDSFKEELDKYFKNHTSPDVDLGDISGINASVVNIQKEIDRLNEVAKNLNESLIDLQELGKYEQYIKGGGGSDIIKLLNEQVNKEMQSSNLYMSMSSWCYTHSLDGAGLFLFDHAAEEYEHAKKLIIFLNENNVPVQLTSISAPEHKFEGLTQIFQKAYEHEQHISESINNIVDHAIKSKDHATFNFLQWYVAEQHEEEVLFKDILDKIELIGNENHGLYLADQYVKGIAKSRKS

SEQ ID NO: 5086 - protein, 1379 aa, Artificial Sequence
  SARS-CoV-2/Greece/16/2020__EPI_ISL_418265 spike protein (1-1211)(I714C_Y1110C) Ferritin construct
MFVFLVLLPLVSSQCVNLTTRTQLPPAYTNSFTRGVYYPDKVFRSSVLHSTQDLFLPFFSNVTWFHAIHVSGTNGTKRFDNPVLPFNDGVYFASTEKSNIIRGWIFGTTLDSKTQSLLIVNNATNVVIKVCEFQFCNDPFLGVYYHKNNKSWMESEFRVYSSANNCTFEYVSQPFLMDLEGKQGNFKNLREFVFKNVDGYFKIYSKHTPINLVRDLPQGFSALEPLVDLPIGINITRFQTLLALHRSYLTPGDSSSGWTAGAAAYYVGYLQPRTFLLKYNENGTITDAVDCALDPLSETKCTLKSFTVEKGIYQTSNFRVQPTESIVRFPNITNLCPFGEVFNATRFASVYAWNRKRISNCVADYSVLYNSASFSTFKCYGVSPTKLNDLCFTNVYADSFVIRGDEVRQIAPGQTGKIADYNYKLPDDFTGCVIAWNSNNLDSKVGGNYNYLYRLFRKSNLKPFERDISTEIYQAGSTPCNGVEGFNCYFPLQSYGFQPTNGVGYQPYRVVVLSFELLHAPATVCGPKKSTNLVKNKCVNFNFNGLTGTGVLTESNKKFLPFQQFGRDIADTTDAVRDPQTLEILDITPCSFGGVSVITPGTNTSNQVAVLYQDVNCTEVPVAIHADQLTPTWRVYSTGSNVFQTRAGCLIGAEHVNNSYECDIPIGAGICASYQTQTNSPRRARSVASQSIIAYTMSLGAENSVAYSNNSIACPTNFTISVTTEILPVSMTKTSVDCTMYICGDSTECSNLLLQYGSFCTQLNRALTGIAVEQDKNTQEVFAQVKQIYKTPPIKDFGGFNFSQILPDPSKPSKRSFIEDLLFNKVTLADAGFIKQYGDCLGDIAARDLICAQKFNGLTVLPPLLTDEMIAQYTSALLAGTITSGWTFGAGAALQIPFAMQMAYRFNGIGVTQNVLYENQKLIANQFNSAIGKIQDSLSSTASALGKLQDVVNQNAQALNTLVKQLSSNFGAISSVLNDILSRLDKVEAEVQIDRLITGRLQSLQTYVTQQLIRAAEIRASANLAATKMSECVLGQSKRVDFCGKGYHLMSFPQSAPHGVVFLHVTYVPAQEKNFTTAPAICHDGKAHFPREGVFVSNGTHWFVTQRNFCEPQIITTDNTFVSGNCDVVIGIVNNTVYDPLQPELDSFKEELDKYFKNHTSPDVDLGDISGINASVVNIQKEIDRLNEVAKNLNESLIDLQELGKYEQYIKGGGGSDIIKLLNEQVNKEMQSSNLYMSMSSWCYTHSLDGAGLFLFDHAAEEYEHAKKLIIFLNENNVPVQLTSISAPEHKFEGLTQIFQKAYEHEQHISESINNIVDHAIKSKDHATFNFLQWYVAEQHEEEVLFKDILDKIELIGNENHGLYLADQYVKGIAKSRKS

SEQ ID NO: 5087 - protein, 1379 aa, Artificial Sequence
  SARS-CoV-2/Iceland/319/2020__EPI_ISL_417648 spike protein (1-1211)(I714C_Y1110C) Ferritin construct
MFVFLVLLPLVSSQCVNLTTRTQLPPAYTNSFTRGVYYPDKVFRSSVLHSTQDLFLPFFSNVTWFHAIHVSGTNGTKRFDNPVLPFNDGVYFASTEKSNIIRGWIFGTTLDSKTQSLLIVNNATNVVIKVCEFQFCNDPFLGVYYHKNNKSWMESEFRVYSSANNCTFEYVSQPFLIDLEGKQGNFKNLREFVFKNIDGYFKIYSKHTPINLVRDLPQGFSALEPLVDLPIGINITRFQTLLALHRSYLTPGDSSSGWTAGAAAYYVGYLQPRTFLLKYNENGTITDAVDCALDPLSETKCTLKSFTVEKGIYQTSNFRVQPTESIVRFPNITNLCPFGEVFNATRFASVYAWNRKRISNCVADYSVLYNSASFSTFKCYGVSPTKLNDLCFTNVYADSFVIRGDEVRQIAPGQTGKIADYNYKLPDDFTGCVIAWNSNNLDSKVGGNYNYLYRLFRKSNLKPFERDISTEIYQAGSTPCNGVEGFNCYFPLQSYGFQPTNGVGYQPYRVVVLSFELLHAPATVCGPKKSTNLVKNKCVNFNFNGLTGTGVLTESNKKFLPFQQFGRDIADTTDAVRDPQTLEILDITPCSFGGVSVITPGTNTSNQVAVLYQGVNCTEVPVAIHADQLTPTWRVYSTGSNVFQTRAGCLIGAEHVNNSYECDIPIGAGICASYQTQTNSPRRARSVASQSIIAYTMSLGAENSVAYSNNSIACPTNFTISVTTEILPVSMTKTSVDCTMYICGDSTECSNLLLQYGSFCTQLNRALTGIAVEQDKNTQEVFAQVKQIYKTPPIKDFGGFNFSQILPDPSKPSKRSFIEDLLFNKVTLADAGFIKQYGDCLGDIAARDLICAQKFNGLTVLPPLLTDEMIAQYTSALLAGTITSGWTFGAGAALQIPFAMQMAYRFNGIGVTQNVLYENQKLIANQFNSAIGKIQDSLSSTASALGKLQDVVNQNAQALNTLVKQLSSNFGAISSVLNDILSRLDKVEAEVQIDRLITGRLQSLQTYVTQQLIRAAEIRASANLAATKMSECVLGQSKRVDFCGKGYHLMSFPQSAPHGVVFLHVTYVPAQEKNFTTAPAICHDGKAHFPREGVFVSNGTHWFVTQRNFCEPQIITTDNTFVSGNCDVVIGIVNNTVYDPLQPELDSFKEELDKYFKNHTSPDVDLGDISGINASVVNIQKEIDRLNEVAKNLNESLIDLQELGKYEQYIKGGGGSDIIKLLNEQVNKEMQSSNLYMSMSSWCYTHSLDGAGLFLFDHAAEEYEHAKKLIIFLNENNVPVQLTSISAPEHKFEGLTQIFQKAYEHEQHISESINNIVDHAIKSKDHATFNFLQWYVAEQHEEEVLFKDILDKIELIGNENHGLYLADQYVKGIAKSRKS

SEQ ID NO: 5088 - protein, 1379 aa, Artificial Sequence
  SARS-CoV-2/Congo/94/2020__EPI_ISL_417947 spike protein (1-1211)(I714C_Y1110C) Ferritin construct
MFVFLVLLPLVSSQCVNLTTRTQLPPAYTNSFTRGVYYPDKVFRSSVLHSTQDLFLPFFSNVTWFHAIHVSGTNGTKRFDNPVLPFNDGVYFASTEKSNIIRGWIFGTTLDSKTQSLLIVNNATNVVIKVCEFQFCNDPFLGVYYHKNNKSWMESEFRVYSSANNCTFEYVSQPFLMDLEGKQGNFKNLREFVFKNIDGYFKIYSKHTPINLVRDLPQGFSALEPLVDLPIGINITRFQTLLALHRSYLTPGDSSSGWTAGAAAYYVGYLQPRTFLLKYNENGTITDAVDCALDPLSETKCTLKSFTVEKGIYQTSNFRVQPTESIVRFPNITNLCPFGEVFNATRFASVYAWNRKRISNCVADYSVLYNSASFSTFKCYGVSPTKLNDLCFTNVYADSFVIRGDEVRQIAPGQTGKIADYNYKLPDDFTGCVIAWNSNNLDSKVGGNYNYLYRLFRKSNLKPFERDISTEIYQAGSTPCNGVEGFNCYFPLQSYGFQPTNGVGYQPYRVVVLSFELLHAPATVCGPKKSTNLVKNKCVNFNFNGLTGTGVLTESNKKFLPFQQFGRDIADTTDAVRDPQTLEILDITPCSFGGVSVITPGTNTSNQVAVLYQGVNCTEVPVAIHADQLTPTWRVYSTGSNVFQTRAGCLIGAEHVNNSYECDIPIGAGICASYQTQTNSPRRARSVASQSIIAYTMSLGAENSVAYSNNSIACPTNFTISVTTEILPVSMTKTSVDCTMYICGDSTECSNLLLQYGSFCTQLNRALTGIAVEQDKNTQEVFAQVKQIYKTPPIKDFGGFNFSQILPDPSKPSKRSFIEDILFNKVTLADAGFIKQYGDCLGDIAARDLICAQKFNGLTVLPPLLTDEMIAQYTSALLAGTITSGWTFGAGAALQIPFAMQMAYRFNGIGVTQNVLYENQKLIANQFNSAIGKIQDSLSSTASALGKLQDVVNQNAQALNTLVKQLSSNFGAISSVLNDILSRLDKVEAEVQIDRLITGRLQSLQTYVTQQLIRAAEIRASANLAATKMSECVLGQSKRVDFCGKGYHLMSFPQSAPHGVVFLHVTYVPAQEKNFTTAPAICHDGKAHFPREGVFVSNGTHWFVTQRNFCEPQIITTDNTFVSGNCDVVIGIVNNTVYDPLQPELDSFKEELDKYFKNHTSPDVDLGDISGINASVVNIQKEIDRLNEVAKNLNESLIDLQELGKYEQYIKGGGGSDIIKLLNEQVNKEMQSSNLYMSMSSWCYTHSLDGAGLFLFDHAAEEYEHAKKLIIFLNENNVPVQLTSISAPEHKFEGLTQIFQKAYEHEQHISESINNIVDHAIKSKDHATFNFLQWYVAEQHEEEVLFKDILDKIELIGNENHGLYLADQYVKGIAKSRKS

SEQ ID NO: 5089 - protein, 1379 aa, Artificial Sequence
  SARS-CoV-2/Congo/158/2020__EPI_ISL_417950 spike protein (1-1211)(I714C_Y1110C) Ferritin construct
MFVFLVLLPLVSSQCVNLTTRTQLPPAYTNSFTRGVYYPDKVFRSSVLHSTQDLFLPFFSNVTWFHAIHVSGTNGTKRFDNPVLPFNDGVYFASTEKSNIIRGWIFGTTLDSKTQSLLIVNNATNVVIKVCEFQFCNDPFLGVYYHKNNKSWMESEFRVYSSANNCTFEYVSQPFLMDLEGKQGNFKNLREFVFKNIDGYFKIYSKHTPINLVRDLPQGFSALEPLVDLPIGINITRFQTLLALHRSYLTPGDSSSGWTAGAAAYYVGYLQPRTFLLKYNENGTITDAVDCALDPLSETKCTLKSFTVEKGIYQTSNFRVQPTESIVRFPNITNLCPFGEVFNATRFASVYAWNRKRISNCVADYSVLYNSASFSTFKCYGVSPTKLNDLCFTNVYADSFVIRGDEVRQIAPGQTGKIADYNYKLPDDFTGCVIAWNSNNLDSKVGGNYNYLYRLFRKSNLKPFERDISTEIYQAGSTPCNGVEGFNCYFPLQSYGFQPTNGVGYQPYRVVVLSFELLHAPATVCGPKKSTNLVKNKCVNFNFNGLTGTGVLTESNKKFLPFQQFGRDIADTTDAVRDPQTLEILDITPCSFGGVSVITPGTNTSNQVAVLYQDVNCTEVPVAIHADQLTPTWRVYSTGSNVFQTRAGCLIGAEHVNNSYECDIPIGAGICASYQTQTNSPRRARSVASQSIIAYTMSLGAENSVAYSNNSIACPTNFTISVTTEILPVSMTKTSVDCTMYICGDSTECSNLLLQYGSFCTQLNRALTGIAVEQDKNTQEVFAQVKQIYKTPPIKDFGGFNFSQILPDPSKPSKRSFIEDLLFNKVTLADAGFIKQYGDCLGDIAARDLICAQKFNGLTVLPPLLTDEMIAQYTSALLAGTITSGWTFGAGAALQIPFAMQMAYRFNGIGVTQNVLYENQKLIANQFNSAIGKIQDSLSSTASALGKLQDVVNQNAQALNTLVKQLSSNFGAISSVLNDILSRLDKVEAEVQIDRLITGRLQSLQTYVTQQLIRAAEIRASANLAATKMSECVLGQSKRVDFCGKGYHLMSFPQSAPHGVVFLHVTYVPAQEKNFTTAPAICHDGKAHFPREGVFVSNGTHWFVTQRNFCEPQIITTDNTFLSGNCDVVIGIVNNTVYDPLQPELDSFKEELDKYFKNHTSPDVDLGDISGINASVVNIQKEIDRLNEVAKNLNESLIDLQELGKYEQYIKGGGGSDIIKLLNEQVNKEMQSSNLYMSMSSWCYTHSLDGAGLFLFDHAAEEYEHAKKLIIFLNENNVPVQLTSISAPEHKFEGLTQIFQKAYEHEQHISESINNIVDHAIKSKDHATFNFLQWYVAEQHEEEVLFKDILDKIELIGNENHGLYLADQYVKGIAKSRKS

SEQ ID NO: 5090 - protein, 1379 aa, Artificial Sequence
  SARS-CoV-2/USA/UT-00034/2020__EPI_ISL_417977 spike protein (1-1211)(I714C_Y1110C) Ferritin construct
MFVFLVLLPLVSSQCVNLTTRTQLPPAYTNSFTRGVYYPDKVFRSSVLHSTQDLFLPFFSNVTWFHAIHVSGTNGTKRFDNPVLPFNDGVYFASTEKSNIIRGWIFGTTLDSKTQSLLIVNNATNVVIKVCEFQFCNDPFLGVYYYKNNKSWMESEFRVYSSANNCTFEYVSQPFLMDLEGKQGNFKNLREFVFKNIDGYFKIYSKHTPINLVRDLPQGFSALEPLVDLPIGINITRFQTLLALHRSYLTPGDSSSGWTAGAAAYYVGYLQPRTFLLKYNENGTITDAVDCALDPLSETKCTLKSFTVEKGIYQTSNFRVQPTESIVRFPNITNLCPFGEVFNATRFASVYAWNRKRISNCVADYSVLYNSASFSTFKCYGVSPTKLNDLCFTNVYADSFVIRGDEVRQIAPGQTGKIADYNYKLPDDFTGCVIAWNSNNLDSKVGGNYNYLYRLFRKSNLKPFERDISTEIYQAGSTPCNGVEGFNCYFPLQSYGFQPTNGVGYQPYRVVVLSFELLHAPATVCGPKKSTNLVKNKCVNFNFNGLTGTGVLTESNKKFLPFQQFGRDIADTTDAVRDPQTLEILDITPCSFGGVSVITPGTNTSNQVAVLYQGVNCTEVPVAIHADQLTPTWRVYSTGSNVFQTRAGCLIGAEHVNNSYECDIPIGAGICASYQTQTNSPRRARSVASQSIIAYTMSLGAENSVAYSNNSIACPTNFTISVTTEILPVSMTKTSVDCTMYICGDSTECSNLLLQYGSFCTQLNRALTGIAVEQDKNTQEVFAQVKQIYKTPPIKDFGGFNFSQILPDPSKPSKRSFIEDLLFNKVTLADAGFIKQYGDCLGDIAARDLICAQKFNGLTVLPPLLTDEMIAQYTSALLAGTITSGWTFGAGAALQIPFAMQMAYRFNGIGVTQNVLYENQKLIANQFNSAIGKIQDSLSSTASALGKLQDVVNQNAQALNTLVKQLSSNFGAISSVLNDILSRLDKVEAEVQIDRLITGRLQSLQTYVTQQLIRAAEIRASANLAATKMSECVLGQSKRVDFCGKGYHLMSFPQSAPHGVVFLHVTYVPAQEKNFTTAPAICHDGKAHFPREGVFVSNGTHWFVTQRNFCEPQIITTDNTFVSGNCDVVIGIVNNTVYDPLQPELDSFKEELDKYFKNHTSPDVDLGDISGINASVVNIQKEIDRLNEVAKNLNESLIDLQELGKYEQYIKGGGGSDIIKLLNEQVNKEMQSSNLYMSMSSWCYTHSLDGAGLFLFDHAAEEYEHAKKLIIFLNENNVPVQLTSISAPEHKFEGLTQIFQKAYEHEQHISESINNIVDHAIKSKDHATFNFLQWYVAEQHEEEVLFKDILDKIELIGNENHGLYLADQYVKGIAKSRKS

SEQ ID NO: 5091 - protein, 1379 aa, Artificial Sequence
  SARS-CoV-2/USA/UT-00033/2020__EPI_ISL_417976 spike protein (1-1211)(I714C_Y1110C) Ferritin construct
MFVFLVLLPLVSSQCVNLTTRTQLPPAYTNSFTRGVYYPDKVFRSSVLHSTQDLFLPFFSNVTWFHAIHVSGTNGTKRFDNPVLPFNDGVYFASTEKSNIIRGWIFGTTLDSKTQSLLIVNNATNVVIKVCEFQFCNDPFLGVYYHKNNKSWMESEFRVYSSANNCTFEYVSQPFLMDLEGKQGNFKNLREFVFKNIDGYFKIYSKHTPINLVRDLPQGFSALEPLVDLPIGINITRFQTLLALHRSYLTPGDSSSGLTAGAAAYYVGYLQPRTFLLKYNENGTITDAVDCALDPLSETKCTLKSFTVEKGIYQTSNFRVQPTESIVRFPNITNLCPFGEVFNATRFASVYAWNRKRISNCVADYSVLYNSASFSTFKCYGVSPTKLNDLCFTNVYADSFVIRGDEVRQIAPGQTGKIADYNYKLPDDFTGCVIAWNSNNLDSKVGGNYNYLYRLFRKSNLKPFERDISTEIYQAGSTPCNGVEGFNCYFPLQSYGFQPTNGVGYQPYRVVVLSFELLHAPATVCGPKKSTNLVKNKCVNFNFNGLTGTGVLTESNKKFLPFQQFGRDIADTTDAVRDPQTLEILDITPCSFGGVSVITPGTNTSNQVAVLYQGVNCTEVPVAIHADQLTPTWRVYSTGSNVFQTRAGCLIGAEHVNNSYECDIPIGAGICASYQTQTNSPRRARSVASQSIIAYTMSLGAENSVAYSNNSIACPTNFTISVTTEILPVSMTKTSVDCTMYICGDSTECSNLLLQYGSFCTQLNRALTGIAVEQDKNTQEVFAQVKQIYKTPPIKDFGGFNFSQILPDPSKPSKRSFIEDLLFNKVTLADAGFIKQYGDCLGDIAARDLICAQKFNGLTVLPPLLTDEMIAQYTSALLAGTITSGWTFGAGAALQIPFAMQMAYRFNGIGVTQNVLYENQKLIANQFNSAIGKIQDSLSSTASALGKLQDVVNQNAQALNTLVKQLSSNFGAISSVLNDILSRLDKVEAEVQIDRLITGRLQSLQTYVTQQLIRAAEIRASANLAATKMSECVLGQSKRVDFCGKGYHLMSFPQSAPHGVVFLHVTYVPAQEKNFTTAPAICHDGKAHFPREGVFVSNGTHWFVTQRNFCEPQIITTDNTFVSGNCDVVIGIVNNTVYDPLQPELDSFKEELDKYFKNHTSPDVDLGDISGINASVVNIQKEIDRLNEVAKNLNESLIDLQELGKYEQYIKGGGGSDIIKLLNEQVNKEMQSSNLYMSMSSWCYTHSLDGAGLFLFDHAAEEYEHAKKLIIFLNENNVPVQLTSISAPEHKFEGLTQIFQKAYEHEQHISESINNIVDHAIKSKDHATFNFLQWYVAEQHEEEVLFKDILDKIELIGNENHGLYLADQYVKGIAKSRKS

SEQ ID NO: 5092 - protein, 1379 aa, Artificial Sequence
  SARS-CoV-2/USA/WI-13/2020__EPI_ISL_417516 spike protein (1-1211)(I714C_Y1110C) Ferritin construct
MFVFLVLLPLVSSQCVNLTTRTQLPPAYTNSFTRGVYYPDKVFRSSVLHSTQDLFLPFFSNVTWFHAIHVSGTNGTKRFDNPVLPFNDGVYFASTEKSNIIRGWIFGTTLDSKTQSLLIVNNATNVVIKVCEFQFCNDPFLGVYYHKNNKSWMESEFRVYSSANNCTFEYVSQPFLMDLEGKQGNFKNLREFVFKNIDGYFKIYSKHTPINLVRDLPQGFSALEPLVDLPIGINITRFQTLLALHRSYLTPGDSSSGWTAGAAAYYVGYLQPRTFLLKYNENGTITDAVDCALDPLSETKCTLKSFTVEKGIYQTSNFRVLPTESIVRFPNITNLCPFGEVFNATRFASVYAWNRKRISNCVADYSVLYNSASFSTFKCYGVSPTKLNDLCFTNVYADSFVIRGDEVRQIAPGQTGKIADYNYKLPDDFTGCVIAWNSNNLDSKVGGNYNYLYRLFRKSNLKPFERDISTEIYQAGSTPCNGVEGFNCYFPLQSYGFQPTNGVGYQPYRVVVLSFELLHAPATVCGPKKSTNLVKNKCVNFNFNGLTGTGVLTESNKKFLPFQQFGRDIADTTDAVRDPQTLEILDITPCSFGGVSVITPGTNTSNQVAVLYQGVNCTEVPVAIHADQLTPTWRVYSTGSNVFQTRAGCLIGAEHVNNSYECDIPIGAGICASYQTQTNSPRRARSVASQSIIAYTMSLGAENSVAYSNNSIACPTNFTISVTTEILPVSMTKTSVDCTMYICGDSTECSNLLLQYGSFCTQLNRALTGIAVEQDKNTQEVFAQVKQIYKTPPIKDFGGFNFSQILPDPSKPSKRSFIEDLLFNKVTLADAGFIKQYGDCLGDIAARDLICAQKFNGLTVLPPLLTDEMIAQYTSALLAGTITSGWTFGAGAALQIPFAMQMAYRFNGIGVTQNVLYENQKLIANQFNSAIGKIQDSLSSTASALGKLQDVVNQNAQALNTLVKQLSSNFGAISSVLNDILSRLDKVEAEVQIDRLITGRLQSLQTYVTQQLIRAAEIRASANLAATKMSECVLGQSKRVDFCGKGYHLMSFPQSAPHGVVFLHVTYVPAQEKNFTTAPAICHDGKAHFPREGVFVSNGTHWFVTQRNFCEPQIITTDNTFVSGNCDVVIGIVNNTVYDPLQPELDSFKEELDKYFKNHTSPDVDLGDISGINASVVNIQKEIDRLNEVAKNLNESLIDLQELGKYEQYIKGGGGSDIIKLLNEQVNKEMQSSNLYMSMSSWCYTHSLDGAGLFLFDHAAEEYEHAKKLIIFLNENNVPVQLTSISAPEHKFEGLTQIFQKAYEHEQHISESINNIVDHAIKSKDHATFNFLQWYVAEQHEEEVLFKDILDKIELIGNENHGLYLADQYVKGIAKSRKS

SEQ ID NO: 5093 - protein, 1378 aa, Artificial Sequence
  SARS-CoV-2/India/1-27/2020__EPI_ISL_413522 spike protein (1-1210)(I713C_Y1109C) Ferritin construct
MFVFLVLLPLVSSQCVNLTTRTQLPPAYTNSFTRGVYYPDKVFRSSVLHSTQDLFLPFFSNVTWFHAIHVSGTNGTKRFDNPVLPFNDGVYFASTEKSNIIRGWIFGTTLDSKTQSLLIVNNATNVVIKVCEFQFCNDPFLGVYHKNNKSWMESEFRVYSSANNCTFEYVSQPFLMDLEGKQGNFKNLREFVFKNIDGYFKIYSKHTPINLVRDLPQGFSALEPLVDLPIGINITRFQTLLALHRSYLTPGDSSSGWTAGAAAYYVGYLQPRTFLLKYNENGTITDAVDCALDPLSETKCTLKSFTVEKGIYQTSNFRVQPTESIVRFPNITNLCPFGEVFNATRFASVYAWNRKRISNCVADYSVLYNSASFSTFKCYGVSPTKLNDLCFTNVYADSFVIRGDEVIQIAPGQTGKIADYNYKLPDDFTGCVIAWNSNNLDSKVGGNYNYLYRLFRKSNLKPFERDISTEIYQAGSTPCNGVEGFNCYFPLQSYGFQPTNGVGYQPYRVVVLSFELLHAPATVCGPKKSTNLVKNKCVNFNFNGLTGTGVLTESNKKFLPFQQFGRDIADTTDAVRDPQTLEILDITPCSFGGVSVITPGTNTSNQVAVLYQDVNCTEVPVAIHADQLTPTWRVYSTGSNVFQTRAGCLIGAEHVNNSYECDIPIGAGICASYQTQTNSPRRARSVASQSIIAYTMSLGAENSVAYSNNSIACPTNFTISVTTEILPVSMTKTSVDCTMYICGDSTECSNLLLQYGSFCTQLNRALTGIAVEQDKNTQEVFAQVKQIYKTPPIKDFGGFNFSQILPDPSKPSKRSFIEDLLFNKVTLADAGFIKQYGDCLGDIAARDLICAQKFNGLTVLPPLLTDEMIAQYTSALLAGTITSGWTFGAGAALQIPFAMQMAYRFNGIGVTQNVLYENQKLIANQFNSAIGKIQDSLSSTASALGKLQDVVNQNAQALNTLVKQLSSNFGAISSVLNDILSRLDKVEAEVQIDRLITGRLQSLQTYVTQQLIRAAEIRASANLAATKMSECVLGQSKRVDFCGKGYHLMSFPQSAPHGVVFLHVTYVPAQEKNFTTAPAICHDGKAHFPREGVFVSNGTHWFVTQRNFCEPQIITTDNTFVSGNCDVVIGIVNNTVYDPLQPELDSFKEELDKYFKNHTSPDVDLGDISGINASVVNIQKEIDRLNEVAKNLNESLIDLQELGKYEQYIKGGGGSDIIKLLNEQVNKEMQSSNLYMSMSSWCYTHSLDGAGLFLFDHAAEEYEHAKKLIIFLNENNVPVQLTSISAPEHKFEGLTQIFQKAYEHEQHISESINNIVDHAIKSKDHATFNFLQWYVAEQHEEEVLFKDILDKIELIGNENHGLYLADQYVKGIAKSRKS

SEQ ID NO: 5094 - protein, 1373 aa, Artificial Sequence
  SARS-CoV-2/pangolin/Guangxi/P4L/2017__EPI_ISL_410538 spike protein (1-1205)(I708C_Y1104C) Ferritin construct
MFVFLFVLPLVSSQCVNLTTRTGIPPGYTNSSTRGVYYPDKVFRSSILHLTQDLFLPFFSNVTWFNTINYQGGFKKFDNPVLPFNDGVYFASTEKSNIIRGWIFGTTLDARTQSLLIVNNATNVVIKVCEFQFCTDPFLGVYYHNNNKTWVENEFRVYSSANNCTFEYISQPFLMDLEGKQGNFKNLREFVFKNVDGYFKIYSKHTPIDLVRDLPRGFAALEPLVDLPIGINITRFQTLLALHRSYLTPGNLESGWTTGAAAYYVGYLQQRTFLLSYNQNGTITDAVDCSLDPLSETKCTLKSLTVEKGIYQTSNFRVQPTISIVRFPNITNLCPFGEVFNASKFASVYAWNRKRISNCVADYSVLYNSTSFSTFKCYGVSPTKLNDLCFTNVYADSFVVKGDEVRQIAPGQTGVIADYNYKLPDDFTGCVIAWNSVKQDALTGGNYGYLYRLFRKSKLKPFERDISTEIYQAGSTPCNGQVGLNCYYPLERYGFHPTTGVNYQPFRVVVLSFELLNGPATVCGPKLSTTLVKDKCVNFNFNGLTGTGVLTTSKKQFLPFQQFGRDISDTTDAVRDPQTLEILDITPCSFGGVSVITPGTNTSNQVAVLYQDVNCTEVPMAIHAEQLTPAWRVYSAGANVFQTRAGCLVGAEHVNNSYECDIPVGAGICASYHSMSSLRSVNQRSIIAYTMSLGAENSVAYSNNSIACPTNFTISVTTEILPVSMTKTSVDCTMYICGDSIECSNLLLQYGSFCTQLNRALTGIAVEQDKNTQEVFAQVKQIYKTPPIKDFGGFNFSQILPDPSKPSKRSFIEDLLFNKVTLADAGFIKQYGDCLGDIAARDLICAQKFNGLTVLPPLLTDEMIAQYTSALLAGTITSGWTFGAGAALQIPFAMQMAYRFNGIGVTQNVLYENQKLIANQFNSAIGKIQDSLSSTASALGKLQDVVNQNAQALNTLVKQLSSNFGAISSVLNDILSRLDKVEAEVQIDRLITGRLQSLQTYVTQQLIRAAEIRASANLAATKMSECVLGQSKRVDFCGKGYHLMSFPQSAPHGVVFLHVTYVPAQEKNFTTAPAICHEGKAHFPREGVFVSNGTHWFITQRNFCEPQIITTDNTFVSGSCDVVIGIVNNTVYDPLQPELDSFKEELDKYFKNHTSPDVDLGDISGINASVVNIQKEIDRLNEVAKNLNESPIDLQELGKYEQYIKGGGGSDIIKLLNEQVNKEMQSSNLYMSMSSWCYTHSLDGAGLFLFDHAAEEYEHAKKLIIFLNENNVPVQLTSISAPEHKFEGLTQIFQKAYEHEQHISESINNIVDHAIKSKDHATFNFLQWYVAEQHEEEVLFKDILDKIELIGNENHGLYLADQYVKGIAKSRKS

SEQ ID NO: 5095 - protein, 1373 aa, Artificial Sequence
  SARS-CoV-2/pangolin/Guangxi/P5L/2017__EPI_ISL_410540 spike protein (1-1205)(I708C_Y1104C) Ferritin construct
MFVFLFVLPLVSSQCVNLTTRTGIPPGYTNSSTRGVYYPDKVFRSSILHLTQDLFLPFFSNVTWFNTINYQGGFKKFDNPVLPFNDGVYFASTEKSNIIRGWIFGTTLDARTQSLLIVNNATNVVIKVCEFQFCTDPFLGVYYHNNNKTWVENEFRVYSSANNCTFEYISQPFLMDLEGKQGNFKNLREFVFKNVDGYFKIYSKHTPIDLVRDLPRGFAALEPLVDLPIGINITRFQTLLALHRSYLTPGKLESGWTTGAAAYYVGYLQQRTFLLSYNQNGTITDAVDCSLDPLSETKCTLKSLTVEKGIYQTSNFRVQPTISIVRFPNITNLCPFGEVFNASKFASVYAWNRKRISNCVADYSVLYNSTSFSTFKCYGVSPTKLNDLCFTNVYADSFVVKGDEVRQIAPGQTGVIADYNYKLPDDFTGCVIAWNSVKQDALTGGNYGYLYRLFRKSKLKPFERDISTEIYQAGSTPCNGQVGLNCYYPLERYGFHPTTGVNYQPFRVVVLSFELLNGPATVCGPKLSTTLVKDKCVNFNFNGLTGTGVLTTSKKQFLPFQQFGRDISDTTDAVRDPQTLEILDITPCSFGGVSVITPGTNTSNQVAVLYQDVNCTEVPMAIHAEQLTPAWRVYSAGANVFQTRAGCLVGAEHVNNSYECDIPVGAGICASYHSMSSFRSVNQRSIIAYTMSLGAENSVAYSNNSIACPTNFTISVTTEILPVSMTKTSVDCTMYICGDSIECSNLLLQYGSFCTQLNRALTGIAVEQDKNTQEVFAQVKQIYKTPPIKDFGGFNFSQILPDPSKPSKRSFIEDLLFNKVTLADAGFIKQYGDCLGDIAARDLICAQKFNGLTVLPPLLTDEMIAQYTSALLAGTITSGWTFGAGAALQIPFAMQMAYRFNGIGVTQNVLYENQKLIANQFNSAIGKIQDSLSSTASALGKLQDVVNQNAQALNTLVKQLSSNFGAISSVLNDILSRLDKVEAEVQIDRLITGRLQSLQTYVTQQLIRAAEIRASANLAATKMSECVLGQSKRVDFCGKGYHLMSFPQSAPHGVVFLHVTYVPAQEKNFTTAPAICHEGKAHFPREGVFVSNGTHWFITQRNFCEPQIITTDNTFVSGSCDVVIGIVNNTVYDPLQPELDSFKEELDKYFKNHTSPDVDLGDISGINASVVNIQKEIDRLNEVAKNLNESLIDLQELGKYEQYIKGGGGSDIIKLLNEQVNKEMQSSNLYMSMSSWCYTHSLDGAGLFLFDHAAEEYEHAKKLIIFLNENNVPVQLTSISAPEHKFEGLTQIFQKAYEHEQHISESINNIVDHAIKSKDHATFNFLQWYVAEQHEEEVLFKDILDKIELIGNENHGLYLADQYVKGIAKSRKS

SEQ ID NO: 5096 - protein, 1373 aa, Artificial Sequence
  SARS-CoV-2/pangolin/Guangxi/P5E/2017__EPI_ISL_410541 spike protein (1-1205)(I708C_Y1104C) Ferritin construct
MFVFLFVLPLVSSQCVNLTTRTGIPPGYTNSSTRGVYYPDKVFRSSILHLTQDLFLPFFSNVTWFNTITYQGGSKKFDNPVLPFNDGVYFASTEKSNIIRGWIFGTTLDARTQSLLIVNNATNVVIKVCEFQFCTDPFLGVYYHNNNKTWVENEFRVYSSANNCTFEYISQPFLMDLEGKQGNFKNLREFVFKNVDGYFKIYSKHTPIDLVRDLPRGFAALEPLVDLPIGINITRFQTLLALHRSYLTPGKLESGWTTGAAAYYVGYLQQRTFLLSYNQNGTITDAVDCSLDPLSETKCTLKSLTVEKGIYQTSNFRVQPTISIVRFPNITNLCPFGEVFNASKFASVYAWNRKRISNCVADYSVLYNSTSFSTFKCYGVSPTKLNDLCFTNVYADSFVVKGDEVRQIAPGQTGVIADYNYKLPDDFTGCVIAWNSVKQDALTGDNYGYLYRLFRKSKLKPFERDISTEIYQAGSTPCNGQVGLNCYYPLERYGFHPTTGVNYQPFRVVVLSFELLNGPATVCGPKLSTTLVKDKCVNFNFNGLTGTGVLTTSKKQFLPFQQFGRDISDTTDAVRDPQTLEILDITPCSFGGVSVITPGTNTSNQVAVLYQDVNCTEVPMAIHAEQLTPAWRVYSAGANVFQTRAGCLVGAEHVNNSYECDIPVGAGICASYHSMSSFRSVNQRSIIAYTMSLGAENSVAYSNNSIACPTNFTISVTTEILPVSMTKTSVDCTMYICGDSIECSNLLLQYGSFCTQLNRALTGIAVEQDKNTQEVFAQVKQIYKTPPIKDFGGFNFSQILPDPSKPSKRSFIEDLLFNKVTLADAGFIKQYGDCLGDIAARDLICAQKFNGLTVLPPLLTDEMIAQYTSALLAGTITSGWTFGAGAALQIPFAMQMAYRFNGIGVTQNVLYENQKLIANQFNSAIGKIQDSLSSTASALGKLQDVVNQNAQALNTLVKQLSSNFGAISSVLNDILSRLDKVEAEVQIDRLITGRLQSLQTYVTQQLIRAAEIRASANLAATKMSECVLGQSKRVDFCGKGYHLMSFPQSAPHGVVFLHVTYVPAQEKNFTTAPAICHEGKAHFPREGVFVSNGTHWFITQRNFCEPQIITTDNTFVSGSCDVVIGIVNNTVYDPLQPELDSFKEELDKYFKNHTSPDVDLGDISGINASVVNIQKEIDRLNEVAKNLNESLIDLQELGKYEQYIKGGGGSDIIKLLNEQVNKEMQSSNLYMSMSSWCYTHSLDGAGLFLFDHAAEEYEHAKKLIIFLNENNVPVQLTSISAPEHKFEGLTQIFQKAYEHEQHISESINNIVDHAIKSKDHATFNFLQWYVAEQHEEEVLFKDILDKIELIGNENHGLYLADQYVKGIAKSRKS

SEQ ID NO: 5097 - protein, 1371 aa, Artificial Sequence
  SARS-CoV-2/pangolin/Guangxi/P1E/2017__EPI_ISL_410539 spike protein (1-1203)(I706C_Y1102C) Ferritin construct
MFVFLFVLPLVSSQCVNLTTRTGIQPGYTNSSTRGVYYPDKVFRSSILHLTQDLFLPFFSNVTWFNTINYQGGFKKFDNPVLPFNDGVYFASTEKSNIIRGWIFGTTLDARTQSLLIVNNATNVVIKVCEFQFCTDPFLGVYYHNNNKTWVENEFRVYSSANNCTFEYISQPFLMDLEGKQGNFKNLREFVFKNVDGYFKIYSKHTPIDLVRDLPRGFAALEPLVDLPIGINITRFQTLLALHRSYLTPGKLESGWTTGAAAYYVGYLQQRTFLLSYNQNGTITDAVDCSLDPLSETKCTLKSLTVEKGIYQTSNFRVQPTISIVRFPNITNLCPFGEVFNASKFASVYAWNRKRISNCVADYSVLYNSTSFSTFKCYGVSPTKLNDLCFTNVYADSFVVKGDEVRQIAPGQTGVIADYNYKLPDDFTGCVIAWNSVKQDALTGGNYLYRLFRKSKLKPFERDISTEIYQAGSTPCNGQVGLNCYYPLERYGFHPTTGVNYQPFRVVVLSFELLNGPATVCGPKLSTTLVKDKCVNFNFNGLTGTGVLTTSKKQFLPFQQFGRDISDTTDAVRDPQTLEILDITPCSFGGVSVITPGTNTSNQVAVLYQDVNCTEVPMAIHAEQLTPAWRVYSAGANVFQTRAGCLVGAEHVNNSYECDIPVGAGICASYHSMSSLRSVNQRSIIAYTMSLGAENSVAYSNNSIACPTNFTISVTTEILPVSMTKTSVDCTMYICGDSIECSNLLLQYGSFCTQLNRALTGIAVEQDKNTQEVFAQVKQIYKTPPIKDFGGFNFSQILPDPSKPSKRSFIEDLLFNKVTLADAGFIKQYGDCLGDIAARDLICAQKFNGLTVLPPLLTDEMIAQYTSALLAGTITSGWTFGAGAALQIPFAMQMAYRFNGIGVTQNVLYENQKLIANQFNSAIGKIQDSLSSTASALGKLQDVVNQNAQALNTLVKQLSSNFGAISSVLNDILSRLDKVEAEVQIDRLITGRLQSLQTYVTQQLIRAAEIRASANLAATKMSECVLGQSKRVDFCGKGYHLMSFPQSAPHGVVFLHVTYVPAQEKNFTTAPAICHEGKAHFPREGVFVSNGTHWFITQRNFCEPQIITTDNTFVSGSCDVVIGIVNNTVYDPLQPELDSFKEELDKYFKNHTSPDVDLGDISGINASVVNIQKEIDRLNEVAKNLNESLIDLQELGKYEQYIKGGGGSDIIKLLNEQVNKEMQSSNLYMSMSSWCYTHSLDGAGLFLFDHAAEEYEHAKKLIIFLNENNVPVQLTSISAPEHKFEGLTQIFQKAYEHEQHISESINNIVDHAIKSKDHATFNFLQWYVAEQHEEEVLFKDILDKIELIGNENHGLYLADQYVKGIAKSRKS

SEQ ID NO: 5098 - protein, 1379 aa, Artificial Sequence
  SARS-CoV-2/Wuhan/WIV05/2019__EPI_ISL_402128 spike protein (1-1211)(P715C_P1069C) Ferritin construct
MFVFLVLLPLVSSQCVNLTTRTQLPPAYTNSFTRGVYYPDKVFRSSVLHSTQDLFLPFFSNVTWFHAIHVSGTNGTKRFDNPVLPFNDGVYFASTEKSNIIRGWIFGTTLDSKTQSLLIVNNATNVVIKVCEFQFCNDPFLGVYYHKNNKSWMESEFRVYSSANNCTFEYVSQPFLMDLEGKQGNFKNLREFVFKNIDGYFKIYSKHTPINLVRDLPQGFSALEPLVDLPIGINITRFQTLLALHRSYLTPGDSSSGWTAGAAAYYVGYLQPRTFLLKYNENGTITDAVDCALDPLSETKCTLKSFTVEKGIYQTSNFRVQPTESIVRFPNITNLCPFGEVFNATRFASVYAWNRKRISNCVADYSVLYNSASFSTFKCYGVSPTKLNDLCFTNVYADSFVIRGDEVRQIAPGQTGKIADYNYKLPDDFTGCVIAWNSNNLDSKVGGNYNYLYRLFRKSNLKPFERDISTEIYQAGSTPCNGVEGFNCYFPLQSYGFQPTNGVGYQPYRVVVLSFELLHAPATVCGPKKSTNLVKNKCVNFNFNGLTGTGVLTESNKKFLPFQQFGRDIADTTDAVRDPQTLEILDITPCSFGGVSVITPGTNTSNQVAVLYQDVNCTEVPVAIHADQLTPTWRVYSTGSNVFQTRAGCLIGAEHVNNSYECDIPIGAGICASYQTQTNSPRRARSVASQSIIAYTMSLGAENSVAYSNNSIAICTNFTISVTTEILPVSMTKTSVDCTMYICGDSTECSNLLLQYGSFCTQLNRALTGIAVEQDKNTQEVFAQVKQIYKTPPIKDFGGFNFSQILPDPSKPSKRSFIEDLLFNKVTLADAGFIKQYGDCLGDIAARDLICAQKFNGLTVLPPLLTDEMIAQYTSALLAGTITSGWTFGAGAALQIPFAMQMAYRFNGIGVTQNVLYENQKLIANQFNSAIGKIQDSLSSTASALGKLQDVVNQNAQALNTLVKQLSSNFGAISSVLNDILSRLDKVEAEVQIDRLITGRLQSLQTYVTQQLIRAAEIRASANLAATKMSECVLGQSKRVDFCGKGYHLMSFPQSAPHGVVFLHVTYVCAQEKNFTTAPAICHDGKAHFPREGVFVSNGTHWFVTQRNFYEPQIITTDNTFVSGNCDVVIGIVNNTVYDPLQPELDSFKEELDKYFKNHTSPDVDLGDISGINASVVNIQKEIDRLNEVAKNLNESLIDLQELGKYEQYIKGGGGSDIIKLLNEQVNKEMQSSNLYMSMSSWCYTHSLDGAGLFLFDHAAEEYEHAKKLIIFLNENNVPVQLTSISAPEHKFEGLTQIFQKAYEHEQHISESINNIVDHAIKSKDHATFNFLQWYVAEQHEEEVLFKDILDKIELIGNENHGLYLADQYVKGIAKSRKS

SEQ ID NO: 5099 - protein, 1375 aa, Artificial Sequence
  SARS-CoV-2/bat/Yunnan/RaTG13/2013__EPI_ISL_402131 spike protein (1-1207)(P711C_P1065C) Ferritin construct
MFVFLVLLPLVSSQCVNLTTRTQLPPAYTNSSTRGVYYPDKVFRSSVLHLTQDLFLPFFSNVTWFHAIHVSGTNGIKRFDNPVLPFNDGVYFASTEKSNIIRGWIFGTTLDSKTQSLLIVNNATNVVIKVCEFQFCNDPFLGVYYHKNNKSWMESEFRVYSSANNCTFEYVSQPFLMDLEGKQGNFKNLREFVFKNIDGYFKIYSKHTPINLVRDLPPGFSALEPLVDLPIGINITRFQTLLALHRSYLTPGDSSSGWTAGAAAYYVGYLQPRTFLLKYNENGTITDAVDCALDPLSETKCTLKSFTVEKGIYQTSNFRVQPTDSIVRFPNITNLCPFGEVFNATTFASVYAWNRKRISNCVADYSVLYNSTSFSTFKCYGVSPTKLNDLCFTNVYADSFVITGDEVRQIAPGQTGKIADYNYKLPDDFTGCVIAWNSKHIDAKEGGNFNYLYRLFRKANLKPFERDISTEIYQAGSKPCNGQTGLNCYYPLYRYGFYPTDGVGHQPYRVVVLSFELLNAPATVCGPKKSTNLVKNKCVNFNFNGLTGTGVLTESNKKFLPFQQFGRDIADTTDAVRDPQTLEILDITPCSFGGVSVITPGTNASNQVAVLYQDVNCTEVPVAIHADQLTPTWRVYSTGSNVFQTRAGCLIGAEHVNNSYECDIPIGAGICASYQTQTNSRSVASQSIIAYTMSLGAENSVAYSNNSIAICTNFTISVTTEILPVSMTKTSVDCTMYICGDSTECSNLLLQYGSFCTQLNRALTGIAVEQDKNTQEVFAQVKQIYKTPPIKDFGGFNFSQILPDPSKPSKRSFIEDLLFNKVTLADAGFIKQYGDCLGDIAARDLICAQKFNGLTVLPPLLTDEMIAQYTSALLAGTITSGWTFGAGAALQIPFAMQMAYRFNGIGVTQNVLYENQKLIANQFNSAIGKIQDSLSSTASALGKLQDVVNQNAQALNTLVKQLSSNFGAISSVLNDILSRLDKVEAEVQIDRLITGRLQSLQTYVTQQLIRAAEIRASANLAATKMSECVLGQSKRVDFCGKGYHLMSFPQSAPHGVVFLHVTYVCAQEKNFTTAPAICHDGKAHFPREGVFVSNGTHWFVTQRNFYEPQIITTDNTFVSGSCDVVIGIVNNTVYDPLQPELDSFKEELDKYFKNHTSPDVDLGDISGINASVVNIQKEIDRLNEVAKNLNESLIDLQELGKYEQYIKGGGGSDIIKLLNEQVNKEMQSSNLYMSMSSWCYTHSLDGAGLFLFDHAAEEYEHAKKLIIFLNENNVPVQLTSISAPEHKFEGLTQIFQKAYEHEQHISESINNIVDHAIKSKDHATFNFLQWYVAEQHEEEVLFKDILDKIELIGNENHGLYLADQYVKGIAKSRKS

SEQ ID NO: 5100 - protein, 1379 aa, Artificial Sequence
  SARS-CoV-2/Wuhan/HBCDC-HB-01/2019__EPI_ISL_402132 spike protein (1-1211)(P715C_P1069C) Ferritin construct
MFVFLVLLPLVSSQCVNLTTRTQLPPAYTNSITRGVYYPDKVFRSSVLHSTQDLFLPFFSNVTWFHAIHVSGTNGTKRFDNPVLPFNDGVYFASTEKSNIIRGWIFGTTLDSKTQSLLIVNNATNVVIKVCEFQFCNDPFLGVYYHKNNKSWMESEFRVYSSANNCTFEYVSQPFLMDLEGKQGNFKNLREFVFKNIDGYFKIYSKHTPINLVRDLPQGFSALEPLVDLPIGINITRFQTLLALHRSYLTPGDSSSGWTAGAAAYYVGYLQPRTFLLKYNENGTITDAVDCALDPLSETKCTLKSFTVEKGIYQTSNFRVQPTESIVRFPNITNLCPFGEVFNATRFASVYAWNRKRISNCVADYSVLYNSASFSTFKCYGVSPTKLNDLCFTNVYADSFVIRGDEVRQIAPGQTGKIADYNYKLPDDFTGCVIAWNSNNLDSKVGGNYNYLYRLFRKSNLKPFERDISTEIYQAGSTPCNGVEGFNCYFPLQSYGFQPTNGVGYQPYRVVVLSFELLHAPATVCGPKKSTNLVKNKCVNFNFNGLTGTGVLTESNKKFLPFQQFGRDIADTTDAVRDPQTLEILDITPCSFGGVSVITPGTNTSNQVAVLYQDVNCTEVPVAIHADQLTPTWRVYSTGSNVFQTRAGCLIGAEHVNNSYECDIPIGAGICASYQTQTNSPRRARSVASQSIIAYTMSLGAENSVAYSNNSIAICTNFTISVTTEILPVSMTKTSVDCTMYICGDSTECSNLLLQYGSFCTQLNRALTGIAVEQDKNTQEVFAQVKQIYKTPPIKDFGGFNFSQILPDPSKPSKRSFIEDLLFNKVTLADAGFIKQYGDCLGDIAARDLICAQKFNGLTVLPPLLTDEMIAQYTSALLAGTITSGWTFGAGAALQIPFAMQMAYRFNGIGVTQNVLYENQKLIANQFNSAIGKIQDSLSSTASALGKLQDVVNQNAQALNTLVKQLSSNFGAISSVLNDILSRLDKVEAEVQIDRLITGRLQSLQTYVTQQLIRAAEIRASANLAATKMSECVLGQSKRVDFCGKGYHLMSFPQSAPHGVVFLHVTYVCAQEKNFTTAPAICHDGKAHFPREGVFVSNGTHWFVTQRNFYEPQIITTDNTFVSGNCDVVIGIVNNTVYDPLQPELDSFKEELDKYFKNHTSPDVDLGDISGINASVVNIQKEIDRLNEVAKNLNESLIDLQELGKYEQYIKGGGGSDIIKLLNEQVNKEMQSSNLYMSMSSWCYTHSLDGAGLFLFDHAAEEYEHAKKLIIFLNENNVPVQLTSISAPEHKFEGLTQIFQKAYEHEQHISESINNIVDHAIKSKDHATFNFLQWYVAEQHEEEVLFKDILDKIELIGNENHGLYLADQYVKGIAKSRKS

SEQ ID NO: 5101 - protein, 1379 aa, Artificial Sequence
  SARS-CoV-2/Guangdong/20SF028/2020__EPI_ISL_403936 spike protein (1-1211)(P715C_P1069C) Ferritin construct
MFVFLVLLPLVSSQCVNLTTRTQLPPAYTNSFTRGVYYPDKVFRSSVLYSTQDLFLPFFSNVTWFHAIHVSGTNGTKRFDNPVLPFNDGVYFASTEKSNIIRGWIFGTTLDSKTQSLLIVNNATNVVIKVCEFQFCNDPFLGVYYHKNNKSWMESEFRVYSSANNCTFEYVSQPFLMDLEGKQGNFKNLREFVFKNIDGYFKIYSKHTPINLVRDLPQGFSALEPLVDLPIGINITRFQTLLALHRSYLTPGDSSSGWTAGAAAYYVGYLQPRTFLLKYNENGTITDAVDCALDPLSETKCTLKSFTVEKGIYQTSNFRVQPTESIVRFPNITNLCPFGEVFNATRFASVYAWNRKRISNCVADYSVLYNSASFSTFKCYGVSPTKLNDLCFTNVYADSFVIRGDEVRQIAPGQTGKIADYNYKLPDDFTGCVIAWNSNNLDSKVGGNYNYLYRLFRKSNLKPFERDISTEIYQAGSTPCNGVEGFNCYFPLQSYGFQPTNGVGYQPYRVVVLSFELLHAPATVCGPKKSTNLVKNKCVNFNFNGLTGTGVLTESNKKFLPFQQFGRDIADTTDAVRDPQTLEILDITPCSFGGVSVITPGTNTSNQVAVLYQDVNCTEVPVAIHADQLTPTWRVYSTGSNVFQTRAGCLIGAEHVNNSYECDIPIGAGICASYQTQTNSPRRARSVASQSIIAYTMSLGAENSVAYSNNSIAICTNFTISVTTEILPVSMTKTSVDCTMYICGDSTECSNLLLQYGSFCTQLNRALTGIAVEQDKNTQEVFAQVKQIYKTPPIKDFGGFNFSQILPDPSKPSKRSFIEDLLFNKVTLADAGFIKQYGDCLGDIAARDLICAQKFNGLTVLPPLLTDEMIAQYTSALLAGTITSGWTFGAGAALQIPFAMQMAYRFNGIGVTQNVLYENQKLIANQFNSAIGKIQDSLSSTASALGKLQDVVNQNAQALNTLVKQLSSNFGAISSVLNDILSRLDKVEAEVQIDRLITGRLQSLQTYVTQQLIRAAEIRASANLAATKMSECVLGQSKRVDFCGKGYHLMSFPQSAPHGVVFLHVTYVCAQEKNFTTAPAICHDGKAHFPREGVFVSNGTHWFVTQRNFYEPQIITTDNTFVSGNCDVVIGIVNNTVYDPLQPELDSFKEELDKYFKNHTSPDVDLGDISGINASVVNIQKEIDRLNEVAKNLNESLIDLQELGKYEQYIKGGGGSDIIKLLNEQVNKEMQSSNLYMSMSSWCYTHSLDGAGLFLFDHAAEEYEHAKKLIIFLNENNVPVQLTSISAPEHKFEGLTQIFQKAYEHEQHISESINNIVDHAIKSKDHATFNFLQWYVAEQHEEEVLFKDILDKIELIGNENHGLYLADQYVKGIAKSRKS

SEQ ID NO: 5102 - protein, 1379 aa, Artificial Sequence
  SARS-CoV-2/Shenzhen/SZTH-001/2020__EPI_ISL_406592 spike protein (1-1211)(P715C_P1069C) Ferritin construct
MFVFLVLLPLVSSQCVNLTTRTQLPPAYTNSFTRGVYYPDKVFRSSVLHSTQDLFLPFFSNVTWFHAIHVSGTNGTKRFDNPVLPFNDGVYFASTEKSNIIRGWIFGTTLDSKTQSLLIVNNATNVVIKVCEFQFCNDPFLGVYYHKNNKSWMESEFRVYSSANNCTFEYVSQPFLMDLEGKQGNFKNLREFVFKNIDGYFKIYSKHTPINLVRDLPQGFSALEPLVDLPIGINITRFQTLLALHRSYLTPGDSSSGWTAGAAAYYVGYLQPRTFLLKYNENGTITDAVDCALDPLSETKCTLKSFTVEKGIYQTSNFRVQPTESIVRFPNITNLCPFGEVFNATRFASVYAWNRKRISNCVADYSVLYNSASFSTFKCYGVSPTKLNDLCFTNVYADSFVIRGDEVRQIAPGQTGKIADYNYKLPDDFTGCVIAWNSNNLDSKVGGNYNYLYRLFRKSNLKPFERDISTEIYQAGSTPCNGVEGFNCYFPLQSYGFQPTNGVGYQPYRVVVLSFELLHAPATVCGPKKSTNLVKNKCVNFNFNGLTGTGVLTESNKKFLPFQQFGRDIADTTDAVRDPQTLEILDITPCSFGGVSVITPGTNTSNQVAVLYQDVNCTEVPVAIHADQLTPTWRVYSTGSNVFQTRAGCLIGAEHVNNSYECDIPIGAGICASYQTQTNSPRRARSVASQSIIAYTMSLGAENSVAYSNNSIAICTNFTISVTTEILPVSMTKTSVDCTMYICGDSTECSNLLLQYGSFCTQLNRALTGIAVEQDKNTQEVFAQVKQIYKTPPIKDFGGFNFSQILPDPSKPSKRSFIEDLLFNKVTLADAGFIKQYGDCLGDIAARDLICAQKFNGLTVLPPLLTDEMIAQYTSALLAGTITSGWTFGAGAALQIPFAMQMAYRFNGIGVTQNVLYENQKLIANQFNSAIGKIQDSLSSTASALGKLQDVVNQNAQALNTLVKQLSSNFGAISSVLNDILSRLDKVEAEVQIDRLITGRLQSLQTYVTQQLIRAAEIRASANLAATKMSECVLGQSKRVDFCGKGYHLMSFPQSAPHGVVFLHVTYVCAQEKNFTTAPAICHDGKAHFPREGVFVSNGTHWFVTQRNFYEPQIITTDNTFVSGNCDVLIGIVNNTVYDPLQPELDSFKEELDKYFKNHTSPDVDLGDISGINASVVNIQKEIDRLNEVAKNLNESLIDLQELGKYEQYIKGGGGSDIIKLLNEQVNKEMQSSNLYMSMSSWCYTHSLDGAGLFLFDHAAEEYEHAKKLIIFLNENNVPVQLTSISAPEHKFEGLTQIFQKAYEHEQHISESINNIVDHAIKSKDHATFNFLQWYVAEQHEEEVLFKDILDKIELIGNENHGLYLADQYVKGIAKSRKS

SEQ ID NO: 5103 - protein, 1379 aa, Artificial Sequence
  SARS-CoV-2/Shenzhen/SZTH-004/2020__EPI_ISL_406595 spike protein (1-1211)(P715C_P1069C) Ferritin construct
MFVFLVLLPLVSSQCVNLTTRTQLPPAYTNSFTRGVYYPDKVFRSSVLHSTQDLFLPFFSNVTWFHAIHVSGTNGTKRFDNPVLPFNDGVYFASTEKSNIIRGWIFGTTLDSKTQSLLIVNNATNVVIKVCEFQFCNDPFLGVYYHKNNKSWMESEFRVYSSANNCTFEYVSQPFLMDLEGKQGNFKNLREFVFKNIDGYFKIYSKHTPINLVRDLPQGFSALEPLVDLPIGINITRFQTLLALHRSYLTPGDSSSGWTAGAAAYYVGYLQPRTFLLKYNENGTITDAVDCALDPLSETKCTLKSFTVEKGIYQTSNFRVQPTESIVRFPNITNLCPFGEVFNATRFASVYAWDRKRISNCVAYYSVLYNSASFSTFKCYGVSPTKLNDLCFTNVYADSFVIRGDEVRQIAPGQTGKIADYNYKLPDDFTGCVIAWNSNNLDSKVGGNYNYLYRLFRKSNLKPFERDISTEIYQAGSTPCNGVEGFNCYFPLQSYGFQPTNGVGYQPYRVVVLSFELLHAPATVCGPKKSTNLVKNKCVNFNFNGLTGTGVLTESNKKFLPFQQFGRDIADTTDAVRDPQTLEILDITPCSFGGVSVITPGTNTSNQVAVLYQDVNCTEVPVAIHADQLTPTWRVYSTGSNVFQTRAGCLIGAEHVNNSYECDIPIGAGICASYQTQTNSPRRARSVASQSIIAYTMSLGAENSVAYSNNSIAICTNFTISVTTEILPVSMTKTSVDCTMYICGDSTECSNLLLQYGSFCTQLNRALTGIAVEQDKNTQEVFAQVKQIYKTPPIKDFGGFNFSQILPDPSKPSKRSFIEDLLFNKVTLADAGFIKQYGDCLGDIAARDLICAQKFNGLTVLPPLLTDEMIAQYTSALLAGTITSGWTFGAGAALQIPFAMQMAYRFNGIGVTQNVLYENQKLIANQFNSAIGKIQDSLSSTASALGKLQDVVNQNAQALNTLVKQLSSNFGAISSVLNDILSRLDKVEAEVQIDRLITGRLQSLQTYVTQQLIRAAEIRASANLAATKMSECVLGQSKRVDFCGKGYHLMSFPQSAPHGVVFLHVTYVCAQEKNFTTAPAICHDGKAHFPREGVFVSNGTHWFVTQRNFYEPQIITTDNTFVSGNCDVVIGIVNNTVYDPLQPELDSFKEELDKYFKNHTSPDVDLGDISGINASVVNIQKEIDRLNEVAKNLNESLIDLQELGKYEQYIKGGGGSDIIKLLNEQVNKEMQSSNLYMSMSSWCYTHSLDGAGLFLFDHAAEEYEHAKKLIIFLNENNVPVQLTSISAPEHKFEGLTQIFQKAYEHEQHISESINNIVDHAIKSKDHATFNFLQWYVAEQHEEEVLFKDILDKIELIGNENHGLYLADQYVKGIAKSRKS

SEQ ID NO: 5104 - protein, 1379 aa, Artificial Sequence
  SARS-CoV-2/France/IDF0372/2020__EPI_ISL_406596 spike protein (1-1211)(P715C_P1069C) Ferritin construct
MFVFLVLLPLVSSQCVNLTTRTQLPPAYTNSFTRGVYYPDKVFRSSVLHSTQDLFLPFFSNVTWFHAIHVSGTNGTKRFDNPVLPFNDGVYFASTEKSNIIRGWIFGTTLDSKTQSLLIVNNATNVVIKVCEFQFCNDPFLGVYYHKNNKSWMESEFRVYSSANNCTFEYVSQPFLMDLEGKQGNFKNLREFVFKNIDGYFKIYSKHTPINLVRDLPQGFSALEPLVDLPIGINITRFQTLLALHRSYLTPGDSSSGWTAGAAAYYVGYLQPRTFLLKYNENGTITDAVDCALDPLSETKCTLKSFTVEKGIYQTSNFRVQPTESIVRFPNITNLCPFGEVFNATRFASVYAWNRKRISNCVADYSFLYNSASFSTFKCYGVSPTKLNDLCFTNVYADSFVIRGDEVRQIAPGQTGKIADYNYKLPDDFTGCVIAWNSNNLDSKVGGNYNYLYRLFRKSNLKPFERDISTEIYQAGSTPCNGVEGFNCYFPLQSYGFQPTNGVGYQPYRVVVLSFELLHAPATVCGPKKSTNLVKNKCVNFNFNGLTGTGVLTESNKKFLPFQQFGRDIADTTDAVRDPQTLEILDITPCSFGGVSVITPGTNTSNQVAVLYQDVNCTEVPVAIHADQLTPTWRVYSTGSNVFQTRAGCLIGAEHVNNSYECDIPIGAGICASYQTQTNSPRRARSVASQSIIAYTMSLGAENSVAYSNNSIAICTNFTISVTTEILPVSMTKTSVDCTMYICGDSTECSNLLLQYGSFCTQLNRALTGIAVEQDKNTQEVFAQVKQIYKTPPIKDFGGFNFSQILPDPSKPSKRSFIEDLLFNKVTLADAGFIKQYGDCLGDIAARDLICAQKFNGLTVLPPLLTDEMIAQYTSALLAGTITSGWTFGAGAALQIPFAMQMAYRFNGIGVTQNVLYENQKLIANQFNSAIGKIQDSLSSTASALGKLQDVVNQNAQALNTLVKQLSSNFGAISSVLNDILSRLDKVEAEVQIDRLITGRLQSLQTYVTQQLIRAAEIRASANLAATKMSECVLGQSKRVDFCGKGYHLMSFPQSAPHGVVFLHVTYVCAQEKNFTTAPAICHDGKAHFPREGVFVSNGTHWFVTQRNFYEPQIITTDNTFVSGNCDVVIGIVNNTVYDPLQPELDSFKEELDKYFKNHTSPDVDLGDISGINASVVNIQKEIDRLNEVAKNLNESLIDLQELGKYEQYIKGGGGSDIIKLLNEQVNKEMQSSNLYMSMSSWCYTHSLDGAGLFLFDHAAEEYEHAKKLIIFLNENNVPVQLTSISAPEHKFEGLTQIFQKAYEHEQHISESINNIVDHAIKSKDHATFNFLQWYVAEQHEEEVLFKDILDKIELIGNENHGLYLADQYVKGIAKSRKS

SEQ ID NO: 5105 - protein, 1379 aa, Artificial Sequence
  SARS-CoV-2/Australia/VIC01/2020__EPI_ISL_406844 spike protein (1-1211)(P715C_P1069C) Ferritin construct
MFVFLVLLPLVSSQCVNLTTRTQLPPAYTNSFTRGVYYPDKVFRSSVLHSTQDLFLPFFSNVTWFHAIHVSGTNGTKRFDNPVLPFNDGVYFASTEKSNIIRGWIFGTTLDSKTQSLLIVNNATNVVIKVCEFQFCNDPFLGVYYHKNNKSWMESEFRVYSSANNCTFEYVSQPFLMDLEGKQGNFKNLREFVFKNIDGYFKIYSKHTPINLVRDLPQGFSALEPLVDLPIGINITRFQTLLALHRRYLTPGDSSSGWTAGAAAYYVGYLQPRTFLLKYNENGTITDAVDCALDPLSETKCTLKSFTVEKGIYQTSNFRVQPTESIVRFPNITNLCPFGEVFNATRFASVYAWNRKRISNCVADYSVLYNSASFSTFKCYGVSPTKLNDLCFTNVYADSFVIRGDEVRQIAPGQTGKIADYNYKLPDDFTGCVIAWNSNNLDSKVGGNYNYLYRLFRKSNLKPFERDISTEIYQAGSTPCNGVEGFNCYFPLQSYGFQPTNGVGYQPYRVVVLSFELLHAPATVCGPKKSTNLVKNKCVNFNFNGLTGTGVLTESNKKFLPFQQFGRDIADTTDAVRDPQTLEILDITPCSFGGVSVITPGTNTSNQVAVLYQDVNCTEVPVAIHADQLTPTWRVYSTGSNVFQTRAGCLIGAEHVNNSYECDIPIGAGICASYQTQTNSPRRARSVASQSIIAYTMSLGAENSVAYSNNSIAICTNFTISVTTEILPVSMTKTSVDCTMYICGDSTECSNLLLQYGSFCTQLNRALTGIAVEQDKNTQEVFAQVKQIYKTPPIKDFGGFNFSQILPDPSKPSKRSFIEDLLFNKVTLADAGFIKQYGDCLGDIAARDLICAQKFNGLTVLPPLLTDEMIAQYTSALLAGTITSGWTFGAGAALQIPFAMQMAYRFNGIGVTQNVLYENQKLIANQFNSAIGKIQDSLSSTASALGKLQDVVNQNAQALNTLVKQLSSNFGAISSVLNDILSRLDKVEAEVQIDRLITGRLQSLQTYVTQQLIRAAEIRASANLAATKMSECVLGQSKRVDFCGKGYHLMSFPQSAPHGVVFLHVTYVCAQEKNFTTAPAICHDGKAHFPREGVFVSNGTHWFVTQRNFYEPQIITTDNTFVSGNCDVVIGIVNNTVYDPLQPELDSFKEELDKYFKNHTSPDVDLGDISGINASVVNIQKEIDRLNEVAKNLNESLIDLQELGKYEQYIKGGGGSDIIKLLNEQVNKEMQSSNLYMSMSSWCYTHSLDGAGLFLFDHAAEEYEHAKKLIIFLNENNVPVQLTSISAPEHKFEGLTQIFQKAYEHEQHISESINNIVDHAIKSKDHATFNFLQWYVAEQHEEEVLFKDILDKIELIGNENHGLYLADQYVKGIAKSRKS

SEQ ID NO: 5106 - protein, 1379 aa, Artificial Sequence
  SARS-CoV-2/Germany/BavPat1/2020__EPI_ISL_406862 spike protein (1-1211)(P715C_P1069C) Ferritin construct
MFVFLVLLPLVSSQCVNLTTRTQLPPAYTNSFTRGVYYPDKVFRSSVLHSTQDLFLPFFSNVTWFHAIHVSGTNGTKRFDNPVLPFNDGVYFASTEKSNIIRGWIFGTTLDSKTQSLLIVNNATNVVIKVCEFQFCNDPFLGVYYHKNNKSWMESEFRVYSSANNCTFEYVSQPFLMDLEGKQGNFKNLREFVFKNIDGYFKIYSKHTPINLVRDLPQGFSALEPLVDLPIGINITRFQTLLALHRSYLTPGDSSSGWTAGAAAYYVGYLQPRTFLLKYNENGTITDAVDCALDPLSETKCTLKSFTVEKGIYQTSNFRVQPTESIVRFPNITNLCPFGEVFNATRFASVYAWNRKRISNCVADYSVLYNSASFSTFKCYGVSPTKLNDLCFTNVYADSFVIRGDEVRQIAPGQTGKIADYNYKLPDDFTGCVIAWNSNNLDSKVGGNYNYLYRLFRKSNLKPFERDISTEIYQAGSTPCNGVEGFNCYFPLQSYGFQPTNGVGYQPYRVVVLSFELLHAPATVCGPKKSTNLVKNKCVNFNFNGLTGTGVLTESNKKFLPFQQFGRDIADTTDAVRDPQTLEILDITPCSFGGVSVITPGTNTSNQVAVLYQGVNCTEVPVAIHADQLTPTWRVYSTGSNVFQTRAGCLIGAEHVNNSYECDIPIGAGICASYQTQTNSPRRARSVASQSIIAYTMSLGAENSVAYSNNSIAICTNFTISVTTEILPVSMTKTSVDCTMYICGDSTECSNLLLQYGSFCTQLNRALTGIAVEQDKNTQEVFAQVKQIYKTPPIKDFGGFNFSQILPDPSKPSKRSFIEDLLFNKVTLADAGFIKQYGDCLGDIAARDLICAQKFNGLTVLPPLLTDEMIAQYTSALLAGTITSGWTFGAGAALQIPFAMQMAYRFNGIGVTQNVLYENQKLIANQFNSAIGKIQDSLSSTASALGKLQDVVNQNAQALNTLVKQLSSNFGAISSVLNDILSRLDKVEAEVQIDRLITGRLQSLQTYVTQQLIRAAEIRASANLAATKMSECVLGQSKRVDFCGKGYHLMSFPQSAPHGVVFLHVTYVCAQEKNFTTAPAICHDGKAHFPREGVFVSNGTHWFVTQRNFYEPQIITTDNTFVSGNCDVVIGIVNNTVYDPLQPELDSFKEELDKYFKNHTSPDVDLGDISGINASVVNIQKEIDRLNEVAKNLNESLIDLQELGKYEQYIKGGGGSDIIKLLNEQVNKEMQSSNLYMSMSSWCYTHSLDGAGLFLFDHAAEEYEHAKKLIIFLNENNVPVQLTSISAPEHKFEGLTQIFQKAYEHEQHISESINNIVDHAIKSKDHATFNFLQWYVAEQHEEEVLFKDILDKIELIGNENHGLYLADQYVKGIAKSRKS

SEQ ID NO: 5107 - protein, 1379 aa, Artificial Sequence
  SARS-CoV-2/Wuhan/HBCDC-HB-02/2020__EPI_ISL_412978 spike protein (1-1211)(P715C_P1069C) Ferritin construct
MFVFLVLLPLVSSQCVNLTTRTQLPPAYTNSFTRGVYYPDKVFRSSVLHSTQDLFLPFFSNVTWFHAIHVSGTNGTKRFDNPVLPFNDGVYFASTEKSNIIRGWIFGTTLDSKTQSLLIVNNATNVVIKVCEFQFCNDPFLGVYYHKNNKSWMESEFRVYSSANNCTFEYVSQPFLMDLEGKQGNFKNLREFVFKNIDGYFKIYSKHTPINLVRDLPQGFSALEPLVDLPIGINITRFQTLLALHRSYLTPGDSSSGWTAGAAAYYVGYLQPRTFLLKYNENGTITDAVDCALDPLSETKCTLKSFTVEKGIYQTSNFRVQPTESIVRFPNITNLCPFGEVFNATRFASVYAWNRKRISNCVADYSVLYNSASFSTFKCYGVSPTKLNDLCFTNVYADSFVIRGDEVRQIAPGQTGKIADYNYKLPDDFTGCVIAWNSNNLDSKVGGNYNYLYRLFRKSNLKPFERDISTEIYQAGSTPCNGVEGFNCYFPLQSYGFQPTNGVGYQPYRVVVLSFELLHAPATVCGPKKSTNLVKNKCVNFNFNGLTGTGVLTESNKKFLPFQQFGRDIADTTDAVRDPQTLEILDITPCSFGGVSVITPGTNTSNQVAVLYQDVNCTEVPVAIHADQLTPTWRVYSTGSNVFQTRAGCLIGAEHVNNSYECDIPIGAGICASYQTQTNSPRRARSVASQSIIAYTMSLGAENSVAYSNNSIAICTNFTISVTTEILPVSMTKTSVDCTMYICGDSTECSNFLLQYGSFCTQLNRALTGIAVEQDKNTQEVFAQVKQIYKTPPIKDFGGFNFSQILPDPSKPSKRSFIEDLLFNKVTLADAGFIKQYGDCLGDIAARDLICAQKFNGLTVLPPLLTDEMIAQYTSALLAGTITSGWTFGAGAALQIPFAMQMAYRFNGIGVTQNVLYENQKLIANQFNSAIGKIQDSLSSTASALGKLQDVVNQNAQALNTLVKQLSSNFGAISSVLNDILSRLDKVEAEVQIDRLITGRLQSLQTYVTQQLIRAAEIRASANLAATKMSECVLGQSKRVDFCGKGYHLMSFPQSAPHGVVFLHVTYVCAQEKNFTTAPAICHDGKAHFPREGVFVSNGTHWFVTQRNFYEPQIITTDNTFVSGNCDVVIGIVNNTVYDPLQPELDSFKEELDKYFKNHTSPDVDLGDISGINASVVNIQKEIDRLNEVAKNLNESLIDLQELGKYEQYIKGGGGSDIIKLLNEQVNKEMQSSNLYMSMSSWCYTHSLDGAGLFLFDHAAEEYEHAKKLIIFLNENNVPVQLTSISAPEHKFEGLTQIFQKAYEHEQHISESINNIVDHAIKSKDHATFNFLQWYVAEQHEEEVLFKDILDKIELIGNENHGLYLADQYVKGIAKSRKS

SEQ ID NO: 5108 - protein, 1379 aa, Artificial Sequence
  SARS-CoV-2/Australia/QLD02/2020__EPI_ISL_407896 spike protein (1-1211)(P715C_P1069C) Ferritin construct
MFVFLVLLPLVSSQCVNLTTRTQLPPAYTNSFTRGVYYPDKVFRSSVLHSTQDLFLPFFSNVTWFHAIHVSGTNGTKRFDNPVLPFNDGVYFASTEKSNIIRGWIFGTTLDSKTQSLLIVNNATNVVIKVCEFQFCNDPFLGVYYHKNNKSWMESEFRVYSSANNCTFEYVSQPFLMDLEGKQGNFKNLREFVFKNIDGYFKIYSKHTPINLVRDLPQGFSALEPLVDLPIGINITRFQTLLALHRSYLTPGDSSSGWTAGAAAYYVGYLQPRTFLLKYNENGTITDAVDCALDPLSETKCTLKSFTVEKGIYQTSNFRVQPTESIVRFPNITNLCPFGEVFNATRFASVYAWNRKRISNCVADYSVLYNSASFSTFKCYGVSPTKLNDLCFTNVYADSFVIRGDEVRQIAPGQTGKIADYNYKLPDDFTGCVIAWNSNNLDSKVGGNYNYLYRLFRKSNLKPFERDISTEIYQAGSTPCNGVEGFNCYFPLQSYGFQPTNGVGYQPYRVVVLSFELLHAPATVCGPKKSTNLVKNKCVNFNFNGLTGTGVLTESNKKFLPFQQFGRDIADTTDAVRDPQTLEILDITPCSFGGVSVITPGTNTSNQVAVLYQDVNCTEVPVAIHADQLTPTWRVYSTGSNVFQTRAGCLIGAEHVNNSYECDIPIGAGICASYQTQTNSPRRARSVASQSIIAYTMSLGAENSVAYSNNSIAICTNFTISVTTEILPVSMTKTSVDCTMYICGDSTECSNLLLQYGSFCTQLNRALTGIAVEQDKNTQEVFAQVKQIYKTPPIKDFGGFNFSQILPDPSKPSKRSFIEDLLFNKVTLADAGFIKQYGDCLGDIAARDLICAQKFNGLTVLPPLLTDEMIAQYTSALLAGTITSGWTFGAGAALQIPFAMQMAYRFNGIGVTQNVLYENQKLIANQFNSAIGKIQDSLSSTASALGKLQDVVNQNAQALNTLVKQLSSNFGAISSVLNDILSRLDKVEAEVQIDRLITGRLQSLQTYVTQQLIRAAEIRASANLAATKMSECVLGQSKRVDFCGKGYHLMSFPQSAPHGVVFLHVTYVCAQEKNFTTAPAICHDGKAHFPREGVFVSNGTHWFVTQRNFYEPQIITTDNTFVSGNCDVVIGIVNNTVYDPLQLELDSFKEELDKYFKNHTSPDVDLGDISGINASVVNIQKEIDRLNEVAKNLNESLIDLQELGKYEQYIKGGGGSDIIKLLNEQVNKEMQSSNLYMSMSSWCYTHSLDGAGLFLFDHAAEEYEHAKKLIIFLNENNVPVQLTSISAPEHKFEGLTQIFQKAYEHEQHISESINNIVDHAIKSKDHATFNFLQWYVAEQHEEEVLFKDILDKIELIGNENHGLYLADQYVKGIAKSRKS

SEQ ID NO: 5109 - protein, 1379 aa, Artificial Sequence
  SARS-CoV-2/India/1-31/2020__EPI_ISL_413523 spike protein (1-1211)(P715C_P1069C) Ferritin construct
MFVFLVLLPLVSSQCVNLTTRTQLPPAYTNSFTRGVYYPDKVFRSSVLHSTQDLFLPFFSNVTWFHAIHVSGTNGTKRFDNPVLPFNDGVYFASTEKSNIIRGWIFGTTLDSKTQSLLIVNNATNVVIKVCEFQFCNDPFLGVYYHKNNKSWMESEFRVYSSANNCTFEYVSQPFLMDLEGKQGNFKNLREFVFKNIDGYFKIYSKHTPINLVRDLPQGFSALEPLVDLPIGINITRFQTLLALHRSYLTPGDSSSGWTAGAAAYYVGYLQPRTFLLKYNENGTITDAVDCALDPLSETKCTLKSFTVEKGIYQTSNFRVQPTESIVRFPNITNLCPFGEVFNATRFASVYAWNRKRISNCVADYSVLYNSASFSTFKCYGVSPTKLNDLCFTNVYADSFVIRGDEVRQIAPGQTGKIADYNYKLPDDFTGCVIAWNSNNLDSKVGGNYNYLYRLFRKSNLKPFERDISTEIYQAGSTPCNGVEGFNCYFPLQSYGFQPTNGVGYQPYRVVVLSFELLHAPATVCGPKKSTNLVKNKCVNFNFNGLTGTGVLTESNKKFLPFQQFGRDIADTTDAVRDPQTLEILDITPCSFGGVSVITPGTNTSNQVAVLYQDVNCTEVPVAIHADQLTPTWRVYSTGSNVFQTRAGCLIGAEHVNNSYECDIPIGAGICASYQTQTNSPRRARSVASQSIIAYTMSLGAENSVAYSNNSIAICTNFTISVTTEILPVSMTKTSVDCTMYICGDSTECSNLLLQYGSFCTQLNRALTGIAVEQDKNTQEVFAQVKQIYKTPPIKDFGGFNFSQILPDPSKPSKRSFIEDLLFNKVTLADAGFIKQYGDCLGDIAARDLICAQKFNGLTVLPPLLTDEMIAQYTSALLAGTITSGWTFGAGAALQIPFAMQMAYRFNGIGVTQNVLYENQKLIANQFNSVIGKIQDSLSSTASALGKLQDVVNQNAQALNTLVKQLSSNFGAISSVLNDILSRLDKVEAEVQIDRLITGRLQSLQTYVTQQLIRAAEIRASANLAATKMSECVLGQSKRVDFCGKGYHLMSFPQSAPHGVVFLHVTYVCAQEKNFTTAPAICHDGKAHFPREGVFVSNGTHWFVTQRNFYEPQIITTDNTFVSGNCDVVIGIVNNTVYDPLQPELDSFKEELDKYFKNHTSPDVDLGDISGINASVVNIQKEIDRLNEVAKNLNESLIDLQELGKYEQYIKGGGGSDIIKLLNEQVNKEMQSSNLYMSMSSWCYTHSLDGAGLFLFDHAAEEYEHAKKLIIFLNENNVPVQLTSISAPEHKFEGLTQIFQKAYEHEQHISESINNIVDHAIKSKDHATFNFLQWYVAEQHEEEVLFKDILDKIELIGNENHGLYLADQYVKGIAKSRKS

SEQ ID NO: 5110 - protein, 1379 aa, Artificial Sequence
  SARS-CoV-2/Guangdong/GD2020087-P0008/2020__EPI_ISL_413863 spike protein (1-1211)(P715C_P1069C) Ferritin construct
MFVFLVLLPLVSSQCVNLTTRTQLPPAYTNSFTRGVYYPDKVFRSSVLHSTQDLFLPFFSNVTWFHAIHVSGTNGTKRFDNPVLPFNDGVYFASTEKSNIIRGWIFGTTLDSKTQSLLIVNNATNVVIKVCEFQFCNDPFLGVYYHKNNKSWMESEFRVYSSANNCTFEYVSQPFLMDLEGKQGNFKNLREFVFKNIDGYFKIYSKHTPINLVRDLPQGFSALEPLVDLPIGINITRFQTLLALHRSYLTPGDSSSGWTAGAAAYYVGYLQPRTFLLKYNENGTITDAVDCALDPLSETKCTLKSFTVEKGIYQTSNFRVQPTESIVRFPNITNLCPFGEVFNATRFASVYAWNRKRISNCVADYSVLYNSASFSTFKCYGVSPTKLNDLCFTNVYADSFVIRGDEVREIAPGQTGKIADYNYKLPDDFTGCVIAWNSNNLDSKVGGNYNYLYRLFRKSNLKPFERDISTEIYQAGSTPCNGVEGFNCYFPLQSYGFQPTNGVGYQPYRVVVLSFELLHAPATVCGPKKSTNLVKNKCVNFNFNGLTGTGVLTESNKKFLPFQQFGRDIADTTDAVRDPQTLEILDITPCSFGGVSVITPGTNTSNQVAVLYQDVNCTEVPVAIHADQLTPTWRVYSTGSNVFQTRAGCLIGAEHVNNSYECDIPIGAGICASYQTQTNSPRRARSVASQSIIAYTMSLGAENSVAYSNNSIAICTNFTISVTTEILPVSMTKTSVDCTMYICGDSTECSNLLLQYGSFCTQLNRALTGIAVEQDKNTQEVFAQVKQIYKTPPIKDFGGFNFSQILPDPSKPSKRSFIEDLLFNKVTLADAGFIKQYGDCLGDIAARDLICAQKFNGLTVLPPLLTDEMIAQYTSALLAGTITSGWTFGAGAALQIPFAMQMAYRFNGIGVTQNVLYENQKLIANQFNSAIGKIQDSLSSTASALGKLQDVVNQNAQALNTLVKQLSSNFGAISSVLNDILSRLDKVEAEVQIDRLITGRLQSLQTYVTQQLIRAAEIRASANLAATKMSECVLGQSKRVDFCGKGYHLMSFPQSAPHGVVFLHVTYVCAQEKNFTTAPAICHDGKAHFPREGVFVSNGTHWFVTQRNFYEPQIITTDNTFVSGNCDVVIGIVNNTVYDPLQPELDSFKEELDKYFKNHTSPDVDLGDISGINASVVNIQKEIDRLNEVAKNLNESLIDLQELGKYEQYIKGGGGSDIIKLLNEQVNKEMQSSNLYMSMSSWCYTHSLDGAGLFLFDHAAEEYEHAKKLIIFLNENNVPVQLTSISAPEHKFEGLTQIFQKAYEHEQHISESINNIVDHAIKSKDHATFNFLQWYVAEQHEEEVLFKDILDKIELIGNENHGLYLADQYVKGIAKSRKS

SEQ ID NO: 5111 - protein, 1379 aa, Artificial Sequence
  SARS-CoV-2/Sweden/01/2020__EPI_ISL_411951 spike protein (1-1211)(P715C_P1069C) Ferritin construct
MFVFLVLLPLVSSQCVNLTTRTQLPPAYTNSFTRGVYYPDKVFRSSVLHSTQDLFLPFFSNVTWFHAIHVSGTNGTKRFDNPVLPFNDGVYFASTEKSNIIRGWIFGTTLDSKTQSLLIVNNATNVVIKVCEFQFCNDPFLGVYYHKNNKSWMESEFRVYSSANNCTFEYVSQPFLMDLEGKQGNFKNLREFVFKNIDGYFKIYSKHTPINLVRDLPQGFSALEPLVDLPIGINITRFQTLLALHRSYLTPGDSSSGWTAGAAAYYVGYLQPRTFLLKYNENGTITDAVDCALDPLSETKCTLKSFTVEKGIYQTSNFRVQPTESIVRFPNITNLCPFGEVFNATRFASVYAWNRKRISNCVADYSVLYNSASFSTFKCYGVSPTKLNDLCFTNVYADSFVIRGDEVRQIAPGQTGKIADYNYKLPDDFTGCVIAWNSNNLDSKVGGNYNYLYRLFRKSNLKPFERDISTEIYQAGSTPCNGVEGFNCYFPLQSYGFQPTNGVGYQPYRVVVLSFELLHAPATVCGPKKSTNLVKNKCVNFNFNGLTGTGVLTESNKKFLPFQQFGRDIADTTDAVRDPQTLEILDITPCSFGGVSVITPGTNTSNQVAVLYQDVNCTEVPVAIHADQLTPTWRVYSTGSNVFQTRAGCLIGAEHVNNSYECDIPIGAGICASYQTQTNSPRRARSVASQSIIAYTMSLGAENSVAYSNNSIAICTNFTISVTTEILPVSMTKTSVDCTMYICGDSTECSNLLLQYGSFCTQLNRALTGIAVEQDKNTQEVFAQVKQIYKTPPIKDCGGFNFSQILPDPSKPSKRSFIEDLLFNKVTLADAGFIKQYGDCLGDIAARDLICAQKFNGLTVLPPLLTDEMIAQYTSALLAGTITSGWTFGAGAALQIPFAMQMAYRFNGIGVTQNVLYENQKLIANQFNSAIGKIQDSLSSTASALGKLQDVVNQNAQALNTLVKQLSSNFGAISSVLNDILSRLDKVEAEVQIDRLITGRLQSLQTYVTQQLIRAAEIRASANLAATKMSECVLGQSKRVDFCGKGYHLMSFPQSAPHGVVFLHVTYVCAQEKNFTTAPAICHDGKAHFPREGVFVSNGTHWFVTQRNFYEPQIITTDNTFVSGNCDVVIGIVNNTVYDPLQPELDSFKEELDKYFKNHTSPDVDLGDISGINASVVNIQKEIDRLNEVAKNLNESLIDLQELGKYEQYIKGGGGSDIIKLLNEQVNKEMQSSNLYMSMSSWCYTHSLDGAGLFLFDHAAEEYEHAKKLIIFLNENNVPVQLTSISAPEHKFEGLTQIFQKAYEHEQHISESINNIVDHAIKSKDHATFNFLQWYVAEQHEEEVLFKDILDKIELIGNENHGLYLADQYVKGIAKSRKS

SEQ ID NO: 5112 - protein, 1379 aa, Artificial Sequence
  SARS-CoV-2/Tianmen/HBCDC-HB-07/2020__EPI_ISL_412983 spike protein (1-1211)(P715C_P1069C) Ferritin construct
MFVFLVLLPLVSSQCVNLTTRTQLPPAYTNSFTRGVYYPDKVFRSSVLHSTQDLFLPFFSNVTWFHAIHVSGTNGTKRFDNPVLPFNDGVYFASTEKSNIIRGWIFGTTLDSKTQSLLIVNNATNVVIKVCEFQFCNDPFLGVYYHKNNKSWMESEFRVYSSANNCTFEYVSQPFLMDLEGKQGNFKNLREFVFKNIDGYFKIYSKHTPINLVRDLPQGFSALEPLVDLPIGINITRFQTLLALHRSYLTPGDSSSGWTAGAAAYYVGYLQPRTFLLKYNENGTITDAVDCALDPLSETKCTLKSFTVEKGIYQTSNFRVQPTESIVRFPNITNLCPFGEVFNATRFASVYAWNRKRISNCVADYSVLYNSASFSTFKCYGVSPTKLNDLCFTNVYADSFVIRGDEVRQIAPGQTGKIADYNYKLPDDFTGCVIAWNSNNLDSKVGGNYNYLYRLFRKSNLKPFERDISTEIYQAGSTPCNGVEGFNCYFPLQSYGFQPTNGVGYQPYRVVVLSFELLHAPATVCGPKKSTNLVKNKCVNFNFNGLTGTGVLTESNKKFLPFQQFGRDIADTTDAVRDPQTLEILDITPCSFGGVSVITPGTNTSNQVAVLYQDLNCTEVPVAIHADQLTPTWRVYSTGSNVFQTRAGCLIGAEHVNNSYECDIPIGAGICASYQTQTNSPRRARSVASQSIIAYTMSLGAENSVAYSNNSIAICTNFTISVTTEILPVSMTKTSVDCTMYICGDSTECSNLLLQYGSFCTQLNRALTGIAVEQDKNTQEVFAQVKQIYKTPPIKDFGGFNFSQILPDPSKPSKRSFIEDLLFNKVTLADAGFIKQYGDCLGDIAARDLICAQKFNGLTVLPPLLTDEMIAQYTSALLAGTITSGWTFGAGAALQIPFAMQMAYRFNGIGVTQNVLYENQKLIANQFNSAIGKIQDSLSSTASALGKLQDVVNQNAQALNTLVKQLSSNFGAISSVLNDILSRLDKVEAEVQIDRLITGRLQSLQTYVTQQLIRAAEIRASANLAATKMSECVLGQSKRVDFCGKGYHLMSFPQSAPHGVVFLHVTYVCAQEKNFTTAPAICHDGKAHFPREGVFVSNGTHWFVTQRNFYEPQIITTDNTFVSGNCDVVIGIVNNTVYDPLQPELDSFKEELDKYFKNHTSPDVDLGDISGINASVVNIQKEIDRLNEVAKNLNESLIDLQELGKYEQYIKGGGGSDIIKLLNEQVNKEMQSSNLYMSMSSWCYTHSLDGAGLFLFDHAAEEYEHAKKLIIFLNENNVPVQLTSISAPEHKFEGLTQIFQKAYEHEQHISESINNIVDHAIKSKDHATFNFLQWYVAEQHEEEVLFKDILDKIELIGNENHGLYLADQYVKGIAKSRKS

SEQ ID NO: 5113 - protein, 1379 aa, Artificial Sequence
  SARS-CoV-2/Hong Kong/case42_VM20002493/2020__EPI_ISL_414527 spike protein (1-1211)(P715C_P1069C) Ferritin construct
MFVFLVLLPLVSSQCVNLTTRTQLPPAYTNSFTRGVYYPDKVFRSSVLHSTQDLFLPFFSNVTWFHAIHVSGTNGTKRFDNPVLPFNDGVYFASTEKSNIIRGWIFGTTLDSKTQSLLIVNNATNVVIKVCEFQFCNDPFLGVYYHKNNKSWMESEFRVYSSANNCTFEYVSQPFLMDLEGKQGNFKNLREFVFKNIDGYFKIYSKHTPINLVRDLPQGFSALEPLVDLPIGINITRFQTLLALHRSYLTPGDSSSGWTAGAAAYYVGYLQPRTFLLKYNENGTITDAVDCALDPLSETKCTLKSFTVEKGIYQTSNFRVQPTESIVRFPNITNLCPFGEVFNATRFASVYAWNRKRISNCVADYSVLYNSASFSTFKCYGVSPTKLNDLCFTNVYADSFVIRGDEVRQIAPGQTGKIADYNYKLPDDFTGCVIAWNSNNLDSKVGGNYNYLYRLFRKSNLKPFERDISTEIYQAGSTPCNGVEGFNCYFPLQSYGFQPTNGVGYQPYRVVVLSFELLHAPATVCGPKKSTNLVKNKCVNFNFNGLTGTGVLTESNKKFLPFQQFGRDIADTTDAVRDPQTLEILDITPCSFGGVSVITPGTNTSNQVAVLYQDVNCTEVPVAIHADQLTPTWRVYSTGSNVFQTRAGCLIGAEHVNNSYECDIPIGAGICASYQTQTNSPRRARSVASQSIIAYTMSLGAENSVAYSNNSIAICTNFAISVTTEILPVSMTKTSVDCTMYICGDSTECSNLLLQYGSFCTQLNRALTGIAVEQDKNTQEVFAQVKQIYKTPPIKDFGGFNFSQILPDPSKPSKRSFIEDLLFNKVTLADAGFIKQYGDCLGDIAARDLICAQKFNGLTVLPPLLTDEMIAQYTSALLAGTITSGWTFGAGAALQIPFAMQMAYRFNGIGVTQNVLYENQKLIANQFNSAIGKIQDSLSSTASALGKLQDVVNQNAQALNTLVKQLSSNFGAISSVLNDILSRLDKVEAEVQIDRLITGRLQSLQTYVTQQLIRAAEIRASANLAATKMSECVLGQSKRVDFCGKGYHLMSFPQSAPHGVVFLHVTYVCAQEKNFTTAPAICHDGKAHFPREGVFVSNGTHWFVTQRNFYEPQIITTDNTFVSGNCDVVIGIVNNTVYDPLQPELDSFKEELDKYFKNHTSPDVDLGDISGINASVVNIQKEIDRLNEVAKNLNESLIDLQELGKYEQYIKGGGGSDIIKLLNEQVNKEMQSSNLYMSMSSWCYTHSLDGAGLFLFDHAAEEYEHAKKLIIFLNENNVPVQLTSISAPEHKFEGLTQIFQKAYEHEQHISESINNIVDHAIKSKDHATFNFLQWYVAEQHEEEVLFKDILDKIELIGNENHGLYLADQYVKGIAKSRKS

SEQ ID NO: 5114 - protein, 1379 aa, Artificial Sequence
  SARS-CoV-2/USA/CruiseA-23/2020__EPI_ISL_414482 spike protein (1-1211)(P715C_P1069C) Ferritin construct
MFVFLVLLPLVSSQCVNLTTRTQLPPAYTNSFTRGVYYPDKVFRSSVLHSTQDLFLPFFSNVTWFHAIHVSGTNGTKRFDNPVLPFNDGVYFASTEKSNIIRGWIFGTTLDSKTQSLLIVNNATNVVIKVCEFQFCNDPFLGVYYHKNNKSWMESEFRVYSSANNCTFEYVSQPFLMDLEVKQGNFKNLREFVFKNIDGYFKIYSKHTPINLVRDLPQGFSALEPLVDLPIGINITRFQTLLALHRSYLTPGDSSSGWTAGAAAYYVGYLQPRTFLLKYNENGTITDAVDCALDPLSETKCTLKSFTVEKGIYQTSNFRVQPTESIVRFPNITNLCPFGEVFNATRFASVYAWNRKRISNCVADYSVLYNSASFSTFKCYGVSPTKLNDLCFTNVYADSFVIRGDEVRQIAPGQTGKIADYNYKLPDDFTGCVIAWNSNNLDSKVGGNYNYLYRLFRKSNLKPFERDISTEIYQAGSTPCNGVEGFNCYFPLQSYGFQPTNGVGYQPYRVVVLSFELLHAPATVCGPKKSTNLVKNKCVNFNFNGLTGTGVLTESNKKFLPFQQFGRDIADTTDAVRDPQTLEILDITPCSFGGVSVITPGTNTSNQVAVLYQDVNCTEVPVAIHADQLTPTWRVYSTGSNVFQTRAGCLIGAEHVNNSYECDIPIGAGICASYQTQTNSPRRARSVASQSIIAYTMSLGAENSVAYSNNSIAICTNFTISVTTEILPVSMTKTSVDCTMYICGDSTECSNLLLQYGSFCTQLNRALTGIAVEQDKNTQEVFAQVKQIYKTPPIKDFGGFNFSQILPDPSKPSKRSFIEDLLFNKVTLADAGFIKQYGDCLGDIAARDLICAQKFNGLTVLPPLLTDEMIAQYTSALLAGTITSGWTFGAGAALQIPFAMQMAYRFNGIGVTQNVLYENQKLIANQFNSAIGKIQDSLSSTASALGKLQDVVNQNAQALNTLVKQLSSNFGAISSVLNDILSRLDKVEAEVQIDRLITGRLQSLQTYVTQQLIRAAEIRASANLAATKMSECVLGQSKRVDFCGKGYHLMSFPQSAPHGVVFLHVTYVCAQEKNFTTAPAICHDGKAHFPREGVFVSNGTHWFVTQRNFYEPQIITTDNTFVSGNCDVVIGIVNNTVYDPLQPELDSFKEELDKYFKNHTSPDVDLGDISGINASVVNIQKEIDRLNEVAKNLNESLIDLQELGKYEQYIKGGGGSDIIKLLNEQVNKEMQSSNLYMSMSSWCYTHSLDGAGLFLFDHAAEEYEHAKKLIIFLNENNVPVQLTSISAPEHKFEGLTQIFQKAYEHEQHISESINNIVDHAIKSKDHATFNFLQWYVAEQHEEEVLFKDILDKIELIGNENHGLYLADQYVKGIAKSRKS

SEQ ID NO: 5115 - protein, 1379 aa, Artificial Sequence
  SARS-CoV-2/Hong Kong/case85_VM20002868/2020__EPI_ISL_414519 spike protein (1-1211)(P715C_P1069C) Ferritin construct
MFVFLVLVPLVSSQCVNLTTRTQLPPAYTNSFTRGVYYPDKVFRSSVLHSTQDLFLPFFSNVTWFHAIHVSGTNGTKRFDNPVLPFNDGVYFASTEKSNIIRGWIFGTTLDSKTQSLLIVNNATNVVIKVCEFQFCNDPFLGVYYHKNNKSWMESEFRVYSSANNCTFEYVSQPFLMDLEGKQGNFKNLREFVFKNIDGYFKIYSKHTPINLVRDLPQGFSALEPLVDLPIGINITRFQTLLALHRSYLTPGDSSSGWTAGAAAYYVGYLQPRTFLLKYNENGTITDAVDCALDPLSETKCTLKSFTVEKGIYQTSNFRVQPTESIVRFPNITNLCPFGEVFNATRFASVYAWNRKRISNCVADYSVLYNSASFSTFKCYGVSPTKLNDLCFTNVYADSFVIRGDEVRQIAPGQTGKIADYNYKLPDDFTGCVIAWNSNNLDSKVGGNYNYLYRLFRKSNLKPFERDISTEIYQAGSTPCNGVEGFNCYFPLQSYGFQPTNGVGYQPYRVVVLSFELLHAPATVCGPKKSTNLVKNKCVNFNFNGLTGTGVLTESNKKFLPFQQFGRDIADTTDAVRDPQTLEILDITPCSFGGVSVITPGTNTSNQVAVLYQDVNCTEVPVAIHADQLTPTWRVYSTGSNVFQTRAGCLIGAEHVNNSYECDIPIGAGICASYQTQTNSPRRARSVASQSIIAYTMSLGAENSVAYSNNSIAICTNFTISVTTEILPVSMTKTSVDCTMYICGDSTECSNLLLQYGSFCTQLNRALTGIAVEQDKNTQEVFAQVKQIYKTPPIKDFGGFNFSQILPDPSKPSKRSFIEDLLFNKVTLADAGFIKQYGDCLGDIAARDLICAQKFNGLTVLPPLLTDEMIAQYTSALLAGTITSGWTFGAGAALQIPFAMQMAYRFNGIGVTQNVLYENQKLIANQFNSAIGKIQDSLSSTASALGKLQDVVNQNAQALNTLVKQLSSNFGAISSVLNDILSRLDKVEAEVQIDRLITGRLQSLQTYVTQQLIRAAEIRASANLAATKMSECVLGQSKRVDFCGKGYHLMSFPQSAPHGVVFLHVTYVCAQEKNFTTAPAICHDGKAHFPREGVFVSNGTHWFVTQRNFYEPQIITTDNTFVSGNCDVVIGIVNNTVYDPLQPELDSFKEELDKYFKNHTSPDVDLGDISGINASVVNIQKEIDRLNEVAKNLNESLIDLQELGKYEQYIKGGGGSDIIKLLNEQVNKEMQSSNLYMSMSSWCYTHSLDGAGLFLFDHAAEEYEHAKKLIIFLNENNVPVQLTSISAPEHKFEGLTQIFQKAYEHEQHISESINNIVDHAIKSKDHATFNFLQWYVAEQHEEEVLFKDILDKIELIGNENHGLYLADQYVKGIAKSRKS

SEQ ID NO: 5116 - protein, 1379 aa, Artificial Sequence; identical to SEQ ID NO: 5106
  SARS-CoV-2/England/200990660/2020__EPI_ISL_414523 spike protein (1-1211)(P715C_P1069C) Ferritin construct

SEQ ID NO: 5117 - protein, 1379 aa, Artificial Sequence
  SARS-CoV-2/Australia/NSW09/2020__EPI_ISL_413595 spike protein (1-1211)(P715C_P1069C) Ferritin construct
MFVFLVLLPLVSSQCVNLTTRTQLPPAYTNSFTRGVYYPDKVFRSSVLHSTQDLFLPFFSNVTWFHAIHVSGTNGTKRFDNPVLPFNDGVYFASTEKSNIIRGWIFGTTLDSKTQSLLIVNNATNVVIKVCEFQFCNDPFLGVYYHKNNKSWMESEFRVYSSANNCTFEYVSQPFLMDLEGKQGNFKNLREFVFKNIDGYFKIYSKHTPINLVRDLPQGFSALEPLVDLPIGINITRFQTLLALHRSYLTPGDSSSGWTAGAAAYYVGYLQPRTFLLKYNENGTITDAVDCALDPLSETKCTLKSFTVEKGIYQTSNFRVQPTESIVRFPNITNLCPFGEVFNATRFASVYAWNRKRISNCVADYSVLYNSASFSTFKCYGVSPTKLNDLCFTNVYADSFVIRGDEVRQIAPGQTGKIADYNYKLPDDFTGCVIAWNSNNLDSKVGGNYNYLYRLFRKSNLKPFERDISTEIYQAGSTPCNGVEGFNCYFPLQSYGFQPTNGVGYQPYRVVVLSFELLHAPATVCGPKKSTNLVKNKCVNFNFNGLTGTGVLTESNKKFLPFQQFGRDIADTTDAVRDPQTLEILDITPCSFGGVSVITPGTNTSNQVAVLYQDVNCTEVPVAIHADQLTPTWRVYSTGSNVFQTRAGCLIGAEHVNNSYECDIPIGAGICASYQTQTNSPRRARSVASQSIIAYTMSLGAENSVAYSNNSIAICTNFTISVTTEILPVSMTKTSVDCTMYICGDSTECSNLLLQYGSFCTQLNRALTGIAVEQDKNTQEVFAQVKQIYKTPPIKDFGGFNFSQILPDPSKPSKRSFIEDLLFNKVTLADAGFIKQYGDCLGDIAARDLICAQKFNGLTVLPPLLTDEMIAQYTSALLAGTITSGWTFGAGAALQIPFAMQMAYRFNGIGVTQNVLYENQKLIANQFNSAIGKIQDSLSFTASALGKLQDVVNQNAQALNTLVKQLSSNFGAISSVLNDILSRLDKVEAEVQIDRLITGRLQSLQTYVTQQLIRAAEIRASANLAATKMSECVLGQSKRVDFCGKGYHLMSFPQSAPHGVVFLHVTYVCAQEKNFTTAPAICHDGKAHFPREGVFVSNGTHWFVTQRNFYEPQIITTDNTFVSGNCDVVIGIVNNTVYDPLQPELDSFKEELDKYFKNHTSPDVDLGDISGINASVVNIQKEIDRLNEVAKNLNESLIDLQELGKYEQYIKGGGGSDIIKLLNEQVNKEMQSSNLYMSMSSWCYTHSLDGAGLFLFDHAAEEYEHAKKLIIFLNENNVPVQLTSISAPEHKFEGLTQIFQKAYEHEQHISESINNIVDHAIKSKDHATFNFLQWYVAEQHEEEVLFKDILDKIELIGNENHGLYLADQYVKGIAKSRKS

SEQ ID NO: 5118 - protein, 1379 aa, Artificial Sequence; identical to SEQ ID NO: 5098
  SARS-CoV-2/Australia/NSW10/2020__EPI_ISL_413596 spike protein (1-1211)(P715C_P1069C) Ferritin construct

SEQ ID NO: 5119 - protein, 1379 aa, Artificial Sequence
  SARS-CoV-2/Switzerland/1000477797/2020__EPI_ISL_413023 spike protein (1-1211)(P715C_P1069C) Ferritin construct
MFVFLVLLPLVSSQCVNLTTRTQLPPAYTNSFTRGVYYPDKVFRSSVLHSTQDLFLPFFSNVTWFHAIHVSGTNGTKRFDNPVLPFNDGVYFASTEKSNIIRGWIFGTTLDSKTQSLLIVNNATNVVIKVCEFQFCNDPFLGVYYHKNNKSWMESEFRVYSSANNCTFEYVSQPFLMDLEGKQGNFKNLREFVFKNIDGYFNIYSKHTPINLVRDLPQGFSALEPLVDLPIGINITRFQTLLALHRSYLTPGDSSSGWTAGAAAYYVGYLQPRTFLLKYNENGTITDAVDCALDPLSETKCTLKSFTVEKGIYQTSNFRVQPTESIVRFPNITNLCPFGEVFNATRFASVYAWNRKRISNCVADYSVLYNSASFSTFKCYGVSPTKLNDLCFTNVYADSFVIRGDEVRQIAPGQTGKIADYNYKLPDDFTGCVIAWNSNNLDSKVGGNYNYLYRLFRKSNLKPFERDISTEIYQAGSTPCNGVEGFNCYFPLQSYGFQPTNGVGYQPYRVVVLSFELLHAPATVCGPKKSTNLVKNKCVNFNFNGLTGTGVLTESNKKFLPFQQFGRDIADTTDAVRDPQTLEILDITPCSFGGVSVITPGTNTSNQVAVLYQGVNCTEVPVAIHADQLTPTWRVYSTGSNVFQTRAGCLIGAEHVNNSYECDIPIGAGICASYQTQTNSPRRARSVASQSIIAYTMSLGAENSVAYSNNSIAICTNFTISVTTEILPVSMTKTSVDCTMYICGDSTECSNLLLQYGSFCTQLNRALTGIAVEQDKNTQEVFAQVKQIYKTPPIKDFGGFNFSQILPDPSKPSKRSFIEDLLFNKVTLADAGFIKQYGDCLGDIAARDLICAQKFNGLTVLPPLLTDEMIAQYTSALLAGTITSGWTFGAGAALQIPFAMQMAYRFNGIGVTQNVLYENQKLIANQFNSAIGKIQDSLSSTASALGKLQDVVNQNAQALNTLVKQLSSNFGAISSVLNDILSRLDKVEAEVQIDRLITGRLQSLQTYVTQQLIRAAEIRASANLAATKMSECVLGQSKRVDFCGKGYHLMSFPQSAPHGVVFLHVTYVCAQEKNFTTAPAICHDGKAHFPREGVFVSNGTHWFVTQRNFYEPQIITTDNTFVSGNCDVVIGIVNNTVYDPLQPELDSFKEELDKYFKNHTSPDVDLGDISGINASVVNIQKEIDRLNEVAKNLNESLIDLQELGKYEQYIKGGGGSDIIKLLNEQVNKEMQSSNLYMSMSSWCYTHSLDGAGLFLFDHAAEEYEHAKKLIIFLNENNVPVQLTSISAPEHKFEGLTQIFQKAYEHEQHISESINNIVDHAIKSKDHATFNFLQWYVAEQHEEEVLFKDILDKIELIGNENHGLYLADQYVKGIAKSRKS

SEQ ID NO: 5120 - protein, 1379 aa, Artificial Sequence
  SARS-CoV-2/Belgium/BA-02291/2020__EPI_ISL_415159 spike protein (1-1211)(P715C_P1069C) Ferritin construct
MFVFLVLLPLVSSQCVNLTTRTQLPPAYTNSFTRGVYYPDKVFRSSVLHSTQDLFLPFFSNVTWFHAIHVSGTNGTKRFDNPVLPFNDGVYFASTEKSNIIRGWIFGTTLDSKTQSLLIVNNATNVVIKVCEFQFCNDPFLGVYYHKNNKSWMESEFRVYSSANNCTFEYVSQPFLMDLEGKQGNFKNLREFVFKNIDGYFKIYSKHTPINLVRDLPQGFSALEPLVDLPIGINITRFQTLLALHRSYLTPGDSSSGWTAGAAAYYVGYLQPRTFLLKYNENGTITDAVDCALDPLSETKCTLKSFTVEKGIYQTSNFRVQPTESIVRFPNITNLCPFGEVFNATRFASVYAWNRKRISNCVADYSVLYNSASFSTFKCYGVSPTKLNDLCFTNVYADSFVIRGDEVRQIAPGQTGKIADYNYKLPDDFTGCVIAWNSNNLDSKVGGNYNYLYRLFRRSNLKPFERDISTEIYQAGSTPCNGVEGFNCYFPLQSYGFQPTNGVGYQPYRVVVLSFELLPAPATVCGPKKSTNLVKNKCVNFNFNGLTGTGVLTESNKKFLPFQQFGRDIADTTDAVRDPQTLEILDITPCSFGGVSVITPGTNTSNQVAVLYQGVNCTEVPVAIHADQLTPTWRVYSTGSNVFQTRAGCLIGAEHVNNSYECDIPIGAGICASYQTQTNSPRRARSVASQSIIAYTMSLGAENSVAYSNNSIAICTNFTISVTTEILPVSMTKTSVDCTMYICGDSTECSNLLLQYGSFCTQLNRALTGIAVEQDKNTQEVFAQVKQIYKTPPIKDFGGFNFSQILPDPSKPSKRSFIEDLLFNKVTLADAGFIKQYGDCLGDIAARDLICAQKFNGLTVLPPLLTDEMIAQYTSALLAGTITSGWTFGAGAALQIPFAMQMAYRFNGIGVTQNVLYENQKLIANQFNSAIGKIQDSLSSAAPALGKLQDVVNQNAQALNTLVKQLSSNFGAISSVLNDILSRLDKVEAEVQIDRLITGRLQSLQTYVTQQLIRAAEIRASANLAATKMSECVLGQSKRVDFCGKGYHLMSFPQSAPHGVVFLHVTYVCAQEKNFTTAPAICHDGKAHFPREGVFVSNGTHWFVTQRNFYEPQIITTDNTFVSGNCDVVIGIVNNTVYDPLQPELDSFKEELDKYFKNHTSPDVDLGDISGINASVVNIQKEIDRLNEVAKNLNESLIDLQELGKYEQYIKGGGGSDIIKLLNEQVNKEMQSSNLYMSMSSWCYTHSLDGAGLFLFDHAAEEYEHAKKLIIFLNENNVPVQLTSISAPEHKFEGLTQIFQKAYEHEQHISESINNIVDHAIKSKDHATFNFLQWYVAEQHEEEVLFKDILDKIELIGNENHGLYLADQYVKGIAKSRKS

SEQ ID NO: 5121 - protein, 1379 aa, Artificial Sequence
  SARS-CoV-2/USA/WA8-UW5/2020__EPI_ISL_413486 spike protein (1-1211)(P715C_P1069C) Ferritin construct
MFVFLVLLPLVSSQCVNLTTRTQLPPAYTNSFTRGVYYPDKVFRSSVLHSTQDLFLPFFSNVTWFHAIHVSGTNGTKRFDNPVLPFNDGVYFASTEKSNIIRGWIFGTTLDSKTQSLLIVNNATNVVIKVCEFQFCNDPFLGVYYHKNNKSWMESEFRVYSSANNCTFEYVSQPFLMDLEGKQGNFKNLREFVFKNIDGYFKIYSKHTPINLVRDLPQGFSALEPLVDLPIGINITRFQTLLALHRSYLTPGDSSSGWTAGAAAYYVGYLQPRTFLLKYNENGTITDAVDCALDPLSETKCTLKSFTVEKGIYQTSNFRVQPTESIVRFPNITNLCPFGEVFNATRFASVYAWNRKRISNCVADYSVLYNSASFSTFKCYGVSPTKLNDLCFTNVYADSFVIRGDEVRQIAPGQTGKIADYNYKLPDDFTGCVIAWNSNNLDSKVGGNYNYLYRLFRKSNLKPFERDISTEIYQAGSTPCNGVEGFNCYFPLQSYGFQPTNGVGYQPYRVVVLSFELLHAPATVCGPKKSTNLVKNKCVNFNFNGLTGTGVLTESNKKFLPFQQFGRDIADTTDAVRDPQTLEILDITPCSFGGVSVITPGTNTSNQVAVLYQDVNCTEVPVAIHADQLTPTWRVYSTGSNVFQTRAGCLIGAEYVNNSYECDIPIGAGICASYQTQTNSPRRARSVASQSIIAYTMSLGAENSVAYSNNSIAICTNFTISVTTEILPVSMTKTSVDCTMYICGDSTECSNLLLQYGSFCTQLNRALTGIAVEQDKNTQEVFAQVKQIYKTPPIKDFGGFNFSQILPDPSKPSKRSFIEDLLFNKVTLADAGFIKQYGDCLGDIAARDLICAQKFNGLTVLPPLLTDEMIAQYTSALLAGTITSGWTFGAGAALQIPFAMQMAYRFNGIGVTQNVLYENQKLIANQFNSAIGKIQDSLSSTASALGKLQDVVNQNAQALNTLVKQLSSNFGAISSVLNDILSRLDKVEAEVQIDRLITGRLQSLQTYVTQQLIRAAEIRASANLAATKMSECVLGQSKRVDFCGKGYHLMSFPQSAPHGVVFLHVTYVCAQEKNFTTAPAICHDGKAHFPREGVFVSNGTHWFVTQRNFYEPQIITTDNTFVSGNCDVVIGIVNNTVYDPLQPELDSFKEELDKYFKNHTSPDVDLGDISGINASVVNIQKEIDRLNEVAKNLNESLIDLQELGKYEQYIKGGGGSDIIKLLNEQVNKEMQSSNLYMSMSSWCYTHSLDGAGLFLFDHAAEEYEHAKKLIIFLNENNVPVQLTSISAPEHKFEGLTQIFQKAYEHEQHISESINNIVDHAIKSKDHATFNFLQWYVAEQHEEEVLFKDILDKIELIGNENHGLYLADQYVKGIAKSRKS

SEQ ID NO: 5122 - protein, 1379 aa, Artificial Sequence
  SARS-CoV-2/England/20102000506/2020__EPI_ISL_415147 spike protein (1-1211)(P715C_P1069C) Ferritin construct
MFVFLVLLPLVSSQCVNLTTRTQLPPAYTNSFTRGVYYPDKVFRSSVLHSTQDLFLPFFSNVTWFHAIHVSGTNGTKRFDNPVLPFNDGVYFASTEKSNIIRGWIFGTTLDSKTQSLLIVNNATNVVIKVCEFQFCNDPFLGVYYHKNNKSWMESEFRVYSSANNCTFEYVSQPFLMDLEGKQGNFKNLREFVFKNIDGYFKIYSKHTPINLVRDLPQGFSALEPLVDLPIGINITRFQTLLALHRSYLTPGDSSSGWTAGAAAYYVGYLQPRTFLLKYNENGTITDAVDCALDPLSETKCTLKSFTVEKGIYQTSNFRVQPTESIVRFPNITNLCPFGEVFNATRFASVYAWNRKRISNCVADYSVLYNSASFSTFKCYGVSPTKLNDLCFTNVYADSFVIRGDEVRQIAPGQTGKIADYNYKLPDDFTGCVIAWNSNNLDSKVGGNYNYLYRLFRKSNLKPFERDISTEIYQAGSTPCNGVEGFNCYFPLQSYGFQPTNGVGYQPYRVVVLSFELLHAPATVCGPKKSTNLVKNKCVNFNFNGLTGTGVLTESNKKFLPFQQFGRDIADTTDAVRDPQTLEILDITPCSFGGVSVITPGTNTSNQVAVLYQGVNCTEVPVAIHADQLTPTWRVYSTGSNVFQTRAGCLIGAEHVNNSYECDIPIGAGICASYQTQTNSPRRARSVASQSIIAYTMSLGAENSVAYSNNSIAICTNFTISVTTEILPVSMTKTSVDCTMYICGDSTECSNLLLQYGSFCTQLNRALTGIAVEQDKNTQEVFAQVKQIYKTPPIKDFGGFNFSQILPDPSKPSKRSFIEDLLFNKVTLADAGFIKQYGYCLGDIAARDLICAQKFNGLTVLPPLLTDEMIAQYTSALLAGTITSGWTFGAGAALQIPFAMQMAYRFNGIGVTQNVLYENQKLIANQFNSAIGKIQDSLSSTASALGKLQDVVNQNAQALNTLVKQLSSNFGAISSVLNDILSRLDKVEAEVQIDRLITGRLQSLQTYVTQQLIRAAEIRASANLAATKMSECVLGQSKRVDFCGKGYHLMSFPQSAPHGVVFLHVTYVCAQEKNFTTAPAICHDGKAHFPREGVFVSNGTHWFVTQRNFYEPQIITTDNTFVSGNCDVVIGIVNNTVYDPLQPELDSFKEELDKYFKNHTSPDVDLGDISGINASVVNIQKEIDRLNEVAKNLNESLIDLQELGKYEQYIKGGGGSDIIKLLNEQVNKEMQSSNLYMSMSSWCYTHSLDGAGLFLFDHAAEEYEHAKKLIIFLNENNVPVQLTSISAPEHKFEGLTQIFQKAYEHEQHISESINNIVDHAIKSKDHATFNFLQWYVAEQHEEEVLFKDILDKIELIGNENHGLYLADQYVKGIAKSRKS

SEQ ID NO: 5123 - protein, 1379 aa, Artificial Sequence
  SARS-CoV-2/Belgium/VAG-03013/2020__EPI_ISL_415155 spike protein (1-1211)(P715C_P1069C) Ferritin construct
MFVFLVLLPLVSSQCVNLTTRTQLPPAYTNSFTRGVYYPDKVFRSSVLHSTQDLFLPFFSNVTWFHAIHVSGTNGTKRFDNPVLPFNDGVYFASTEKSNIIRGWIFGTTLDSKTQSLLIVNNATNVVIKVCEFQFCNDPFLGVYYHKNNKSWMESEFRVYSSANNCTFEYVSQPFLMDLEGKQGNFKNLREFVFKNIDGYFKIYSKHTPINLVRDLPQGFSALEPLVDLPIGINITRFQTLLALHRSYLTPGDSSSGWTAGAAAYYVGYLQPRTFLLKYNENGTITDAVDCALDPLSETKCTLKSFTVEKGIYQTSNFRVQPTESIVRFPNITNLCPFGEVFNATRFASVYAWNRKRISNCVADYSVLYNSASFSTFKCYGVSPTKLNDLCFTNVYADSFVIRGDEVRQIAPGQTGKIADYNYKLPDDFTGCVIAWNSNNLDSKVGGNYNYLYRLFRKSNLKPFERDISTEIYQAGSTPCNGVEGFNCYFPLQSYGFQPTNGVGYQPYRVVVLSFELLHAPATVCGPKKSTNLVKNKCVNFNFNGLTGTGVLTESNKKFLPFQQFGRDIADTTDAVRDPQTLEILDITPCSFGGVSVITPGTNTSNQVAVLYQGVNCTEVPVAIHADQLTPTWRVYSTGSNVFQTRAGCLIGAEHVNNSYECDIPIGAGICASYQTQTNSPRRARSVASQSIIAYTMSLGAENSVAYSNNSIAICTNFTISVTTEILPVSMTKTSVDCTMYICGDSTECSNLLLQYGSFCTQLNRALTGIAVEQDKNTQEVFAQVKQIYKTPPIKDFGGFNFSQILPDPSKPSKRSFIEDLLFNKVTLADAGFIKQYGDCLGDIAARDLICAQKFNGLTVLPPLLTDEMIAQYTSALLAGTITSGWTFGAGAALQIPFAMQMAYRFNGIGVTQNVLYENQKLIANQFNSAIGKIQDSLSSTATALGKLQDVVNQNAQALNTLVKQLSSNFGAISSVLNDILSRLDKVEAEVQIDRLITGRLQSLQTYVTQQLIRAAEIRASANLAATKMSECVLGQSKRVDFCGKGYHLMSFPQSAPHGVVFLHVTYVCAQEKNFTTAPAICHDGKAHFPREGVFVSNGTHWFVTQRNFYEPQIITTDNTFVSGNCDVVIGIVNNTVYDPLQPELDSFKEELDKYFKNHTSPDVDLGDISGINASVVNIQKEIDRLNEVAKNLNESLIDLQELGKYEQYIKGGGGSDIIKLLNEQVNKEMQSSNLYMSMSSWCYTHSLDGAGLFLFDHAAEEYEHAKKLIIFLNENNVPVQLTSISAPEHKFEGLTQIFQKAYEHEQHISESINNIVDHAIKSKDHATFNFLQWYVAEQHEEEVLFKDILDKIELIGNENHGLYLADQYVKGIAKSRKS

SEQ ID NO: 5124 - protein, 1379 aa, Artificial Sequence
  SARS-CoV-2/Belgium/BC-03016/2020__EPI_ISL_415157 spike protein (1-1211)(P715C_P1069C) Ferritin construct
MFVFLVLLPLVSSQCVNLTTRTQLPPAYTNSFTRGVYYPDKVFRSSVLHSTQDLFLPFFSNVTWFHAIHVSGTNGTKRFDNPVLPFNDGVYFASTEKSNIIRGWIFGTTLDSKTQSLLIVNNATNVVIKVCEFQFCNDPFLGVYYHKNNKSWMESEFRVYSSANNCTFEYVSQPFLMDLEGKQGNFKNLREFVFKNIDGYFKIYSKHTPINLVRDLPQGFSALEPLVDLPIGINITRFQTLLALHRSYLTPGDSSSGWTAGAAAYYVGYLQPRTFLLKYNENGTITDAVDCALDPLSETKCTLKSFTVEKGIYQTSNFRVQPTESIVRFPNITNLCPFGEVFNATRFASVYAWNRKRISNCVADYSVLYNSASFSTFKCYGVSPTKLNDLCFTNVYADSFVIRGDEVRQIAPGQTGKIADYNYKLPDDFTGCVIAWNSNNLDSKVGGNYNYLYRLFRKSNLKPFERDISTEIYQAGSTPCNGVEGFNCYFPLQSYGFQPTNGVGYQPYRVVVLSFELLHAPATVCGPKKSTNLVKNKCVNFNFNGLTGTGVLTESNKKFLPFQQFGRDIADTTDAVRDPQTLEILDITPCSFGGVSVITPGTNTSNQVAVLYQGVNCTEVPVAIHADQLTPTWRVYSTGSNVFQTRAGCLIGAEHVNNSYECDIPIGAGICASYQTQTNSPRRARSVASQSIIAYTMSLGAENSVAYSNNSIAICTNFTISVTTEILPVSMTKTSVDCTMYICGDSTECSNLLLQYGSFCTQLNRALTGIAVEQDKNTQEVFAQVKQIYKTPPIKDFGGFNFSQILPDPSKPSKRSFIEDLLFNKVTLADAGFIKQYGDCLGDIAARDLICAQKFNGLTVLPPLLTDEMIAQYTSALLAGTITSGWTFGAGAALQIPFAMQMAYRFNGIGVTQNVLYENQKLIANQFNSAIGKIQDSLSSTAPALGKLQDVVNQNAQALNTLVKQLSSNFGAISSVLNDILSRLDKVEAEVQIDRLITGRLQSLQTYVTQQLIRAAEIRASANLAATKMSECVLGQSKRVDFCGKGYHLMSFPQSAPHGVVFLHVTYVCAQEKNFTTAPAICHDGKAHFPREGVFVSNGTHWFVTQRNFYEPQIITTDNTFVSGNCDVVIGIVNNTVYDPLQPELDSFKEELDKYFKNHTSPDVDLGDISGINASVVNIQKEIDRLNEVAKNLNESLIDLQELGKYEQYIKGGGGSDIIKLLNEQVNKEMQSSNLYMSMSSWCYTHSLDGAGLFLFDHAAEEYEHAKKLIIFLNENNVPVQLTSISAPEHKFEGLTQIFQKAYEHEQHISESINNIVDHAIKSKDHATFNFLQWYVAEQHEEEVLFKDILDKIELIGNENHGLYLADQYVKGIAKSRKS

SEQ ID NO: 5125 - protein, 1379 aa, Artificial Sequence
  SARS-CoV-2/Germany/BavPat3/2020__EPI_ISL_414521 spike protein (1-1211)(P715C_P1069C) Ferritin construct
MFVFLVLLPLVSSQCVNLTTRTQLPPAYTNSFTRGVYYPDKVFRSSVLHSTQDLFLPFFSNVTWFHAIHVSGTNGTKRFDNPVLPFNDGVYFASTEKSNIIRGWIFGTTLDSKTQSLLIVNNATNVVIKVCEFQFCNDPFLGVYYHKNNKSWMESEFRVYSSANNCTFEYVSQPFLMDLEGKQGNFKNLREFVFKNIDGYFKIYSKHTPINLVRDLPQGFSALEPLVDLPIGINITRFQTLLALHRSYLTPGDSSSGWTAGAAAYYVGYLQPRTFLLKYNENGTITDAVDCALDPLSETKCTLKSFTVEKGIYQTSNFRVQPTESIVRFPNITNLCPFGEVFNATRFASVYAWNRKRISNCVADYSVLYNSASFSTFKCYGVSPTKLNDLCFTNVYADSFVIRGDEVRQIAPGQTGKIADYNYKLPDDFTGCVIAWNSNNLDSKVGGNYNYLYRLFRKSNLKPFERDISTEIYQAGSTPCNGVEGFNCYFPLQSYGFQPTNGVGYQPYRVVVLSFELLHAPATVCGPKKSTNLVKNKCVNFNFNGLTGTGVLTESNKKFLPFQQFGRDIADTTDAVRDPQTLEILDITPCSFGGVSVITPGTNTSNQVAVLYQDVNCTEVPVAIHADQLTPTWRVYSTGSNVFQTRAGCLIGAEHVNNSYECDIPIGAGICASYQTQTNSPRRARSVASQSIIAYTMSLGAENSVAYSNNSIAICTNFTISVTTEILPVSMTKTSVDCTMYICGDSTECSNLLLQYGSFCTQLNRALTGIAVEQDKNTQQVFAQVKQIYKTPPIKDFGGFNFSQILPDPSKPSKRSFIEDLLFNKVTLADAGFIKQYGDCLGDIAARDLICAQKFNGLTVLPPLLTDEMIAQYTSALLAGTITSGWTFGAGAALQIPFAMQMAYRFNGIGVTQNVLYENQKLIANQFNSAIGKIQDSLSSTASALGKLQDVVNQNAQALNTLVKQLSSNFGAISSVLNDILSRLDKVEAEVQIDRLITGRLQSLQTYVTQQLIRAAEIRASANLAATKMSECVLGQSKRVDFCGKGYHLMSFPQSAPHGVVFLHVTYVCAQEKNFTTAPAICHDGKAHFPREGVFVSNGTHWFVTQRNFYEPQIITTDNTFVSGNCDVVIGIVNNTVYDPLQPELDSFKEELDKYFKNHTSPDVDLGDISGINASVVNIQKEIDRLNEVAKNLNESLIDLQELGKYEQYIKGGGGSDIIKLLNEQVNKEMQSSNLYMSMSSWCYTHSLDGAGLFLFDHAAEEYEHAKKLIIFLNENNVPVQLTSISAPEHKFEGLTQIFQKAYEHEQHISESINNIVDHAIKSKDHATFNFLQWYVAEQHEEEVLFKDILDKIELIGNENHGLYLADQYVKGIAKSRKS

SEQ ID NO: 5126 - protein, 1379 aa, Artificial Sequence
  SARS-CoV-2/France/HF1805/2020__EPI_ISL_414628 spike protein (1-1211)(P715C_P1069C) Ferritin construct
MFVFLVLLPLVSSQCVNLTTRTQLPPAYTNSFTRGVYYPDKVFRSSVLHSTQDLFLPFFSNVTWFHAIHVSGTNGTKRFDNPVLPFNDGVYFASTEKSNIIRGWIFGTTLDSKTQSLLIVNNATNVVIKVCEFQFCNDPFLGVYYHKNNKSWMESEFRVYSSANNCTFEYVSQPFLMDLEGKQGNFKNLREFVFKNIDGYFKIYSKHTPINLVRDLPQGFSALEPLVDLPIGINITRFQTLLALHRSYLTPGDSSSGWTAGAAAYYVGYLQPRTFLLKYNENGTITDAVDCALDPLSETKCTLKSFTVEKGIYQTSNFRVQPTESIVRFPNITNLCPFGEVFNATRFASVYAWNRKRISNCVADYSVLYNSASFSTFKCYGVSPTKLNDLCFTNVYADSFVIRGDEVRQIAPGQTGKIADYNYKLPDDFTGCVIAWNSNNLDSKVGGNYNYLYRLFRKSNLKPFERDISTEIYQAGSTPCNGVEGFNCYFPLQSYGFQPTNGVGYQPYRVVVLSFELLHAPATVCGPKKSTNLVKNKCVNFNFNGLTGTGVLTESNKKFLPFQQFGRDIADTTDAVRDPQTLEILDITPCSFGGVSVITPGTNTSNQVAVLYQGVNCTEVPVAIHADQLTPTWRVYSTGSNVFQTRAGCLIGAEHVNNSYECDIPIGAGICASYQTQTNSPRRARSVASQSIIAYTMSLGAENSVAYSNNSIAICTNFTISVTTEILPVSMTKTSVDCTMYICGDSTECSNLLLQYGSFCTQLNRALTGIAVEQDKNTQEVFAQVKQIYKTPPIKDFGGFNFSQILPDPSKPSKRSFIEDLLFNKVTLADAGFIKQYGDCLGDIAARDLICAQKFNGLTVLPPLLTDEMIAQYTSALLAGTITSGWTFGAGAALQIPFAMQMAYRFNGIGVTQNVLYENQKLIANQFNSAIGKIQDSLSSTASALGKLQDVVNQNAQALNTLVKQLSSNFGAISSVLNDILSRLDKVEAEVQIDRLITGRLQSLQTYVTQQLIRAAEIRASANLAATKMSECVLGQSKRVDFCGKGYHLMSFPQSAPHGVVFLHVTYVCAQEKNFTTAPAICHDGKAHFPREGVFVSNGTHWFVTQRNFYEPQIITTDNTFVSGNCDVVIGVVNNTVYDPLQPELDSFKEELDKYFKNHTSPDVDLGDISGINASVVNIQKEIDRLNEVAKNLNESLIDLQELGKYEQYIKGGGGSDIIKLLNEQVNKEMQSSNLYMSMSSWCYTHSLDGAGLFLFDHAAEEYEHAKKLIIFLNENNVPVQLTSISAPEHKFEGLTQIFQKAYEHEQHISESINNIVDHAIKSKDHATFNFLQWYVAEQHEEEVLFKDILDKIELIGNENHGLYLADQYVKGIAKSRKS

SEQ ID NO: 5127 - protein, 1379 aa, Artificial Sequence
  SARS-CoV-2/Netherlands/ZuidHolland_9/2020__EPI_ISL_414445 spike protein (1-1211)(P715C_P1069C) Ferritin construct
MFVFLVLLPLVSSQCVNLTTRTQLPPAYTNSFTRGVYYPDKVFRSSVLHSTQDLFLPFFSNVTWFHAIHVSGTNGTKRFDNPVLPFNDGVYFASTEKSNIIRGWIFGTTLDSKTQSLLIVNNATNVVIKVCEFQFCNDPFLGVYYHKNNKSWMESEFRVYSSANNCTFEYVSQPFLMDLEGKQGNFKNLREFVFKNIDGYFKIYSKHTPINLVRDLPQGFSALEPLVDLPIGINITRFQTLLALHRSYLTPGDSSSGWTAGAAAYYVGYLQPRTFLLKYNENGTITDAVDCALDPLSETKCTLKSFTVEKGIYQTSNFRVQPTESIVRFPNITNLCPFGEVFNATRFASVYAWNRKRISNCVADYSVLYNSASFSTFKCYGVSPTKLNDLCFTNVYADSFVIRGDEVRQIAPGQTGKIADYNYKLPDDFTGCVIAWNSNNLDSKVGGNYNYLYRLFRKSNLKPFERDISTEIYQAGSTPCNGVEGFNCYFPLQSYGFQPTNGVGYQPYRVVVLSFELLHAPATVCGPKKSTNLVKNKCVNFNFNGLTGTGVLTESNKKFLPFQQFGRDIADTTDAVRDPQTLEILDITPCSFGGVSVITPGTNTSNQVAVLYQGVNCTEVPVAIHADQLTPTWRVYSTGSNVFQTRAGCLIGAEHVNNSYECDIPIGAGICASYQTQTNSPRRARSVASQSIIAYTMSLGAENSVAYSNNSIAICTNFTISVTTEILPVSMTKTSVDCTMYICGDSTECSNLLLQYGSFCTQLNRALTGIAVEQDKNTQEVFAQVKQIYKTPPIKDFGGFNFSQILPDPSKPSKRSFIEDLLFNKVTLADAGFIKQYGDCLGDIAARDLICVQKFNGLTVLPPLLTDEMIAQYTSALLAGTITSGWTFGAGAALQIPFAMQMAYRFNGIGVTQNVLYENQKLIANQFNSAIGKIQDSLSSTASALGKLQDVVNQNAQALNTLVKQLSSNFGAISSVLNDILSRLDKVEAEVQIDRLITGRLQSLQTYVTQQLIRAAEIRASANLAATKMSECVLGQSKRVDFCGKGYHLMSFPQSAPHGVVFLHVTYVCAQEKNFTTAPAICHDGKAHFPREGVFVSNGTHWFVTQRNFYEPQIITTDNTFVSGNCDVVIGIVNNTVYDPLQPELDSFKEELDKYFKNHTSPDVDLGDISGINASVVNIQKEIDRLNEVAKNLNESLIDLQELGKYEQYIKGGGGSDIIKLLNEQVNKEMQSSNLYMSMSSWCYTHSLDGAGLFLFDHAAEEYEHAKKLIIFLNENNVPVQLTSISAPEHKFEGLTQIFQKAYEHEQHISESINNIVDHAIKSKDHATFNFLQWYVAEQHEEEVLFKDILDKIELIGNENHGLYLADQYVKGIAKSRKS

SEQ ID NO: 5128 - protein, 1379 aa, Artificial Sequence
  SARS-CoV-2/Finland/FIN03032020A/2020__EPI_ISL_413602 spike protein (1-1211)(P715C_P1069C) Ferritin construct
MFVFLVLLPLVSSQCVNLTTRTQLPPAYTNSFTRGVYYPDKVFRSSVLHSTQDLFLPFFSNVTWFHAIHVSGTNGTKRFDNPVLPFNDGVYFASTEKSNIIRGWIFGTTLDSKTQSLLIVNNATNVVIKVCEFQFCNDPFLGVYYHKNNKSWMESEFRVYSSANNCTFEYVSQPFLMDLEGKQGNFKNLREFVFKNIDGYFKIYSKHTPINLVRDLPQGFSALEPLVDLPIGINITRFQTLLALHRSYLTPGDSSSGWTAGAAAYYVGYLQPRTFLLKYNENGTITDAVDCALDPLSETKCTLKSFTVEKGIYQTSNFRVQPTESIVRFPNITNLCPFGEVFNATRFASVYAWNRKRISNCVADYSVLYNSASFSTFKCYGVSPTKLNDLCFTNVYADSFVIRGDEVRQIAPGQTGKIADYNYKLPDDFTGCVISWNSNNLDSKVGGNYNYLYRLFRKSNLKPFERDISTEIYQAGSTPCNGVEGFNCYFPLQSYGFQPTNGVGYQPYRVVVLSFELLHAPATVCGPKKSTNLVKNKCVNFNFNGLTGTGVLTESNKKFLPFQQFGRDIADTTDAVRDPQTLEILDITPCSFGGVSVITPGTNTSNQVAVLYQGVNCTEVPVAIHADQLTPTWRVYSTGSNVFQTRAGCLIGAEHVNNSYECDIPIGAGICASYQTQTNSPRRARSVASQSIIAYTMSLGAENSVAYSNNSIAICTNFTISVTTEILPVSMTKTSVDCTMYICGDSTECSNLLLQYGSFCTQLNRALTGIAVEQDKNTQEVFAQVKQIYKTPPIKDFGGFNFSQILPDPSKPSKRSFIEDLLFNKVTLADAGFIKQYGDCLGDIAARDLICAQKFNGLTVLPPLLTDEMIAQYTSALLAGTITSGWTFGAGAALQIPFAMQMAYRFNGIGVTQNVLYENQKLIANQFNSAIGKIQDSLSSTASALGKLQDVVNQNAQALNTLVKQLSSNFGAISSVLNDILSRLDKVEAEVQIDRLITGRLQSLQTYVTQQLIRAAEIRASANLAATKMSECVLGQSKRVDFCGKGYHLMSFPQSAPHGVVFLHVTYVCAQEKNFTTAPAICHDGKAHFPREGVFVSNGTHWFVTQRNFYEPQIITTDNTFVSGNCDVVIGIVNNTVYDPLQPELDSFKEELDKYFKNHTSPDVDLGDISGINASVVNIQKEIDRLNEVAKNLNESLIDLQELGKYEQYIKGGGGSDIIKLLNEQVNKEMQSSNLYMSMSSWCYTHSLDGAGLFLFDHAAEEYEHAKKLIIFLNENNVPVQLTSISAPEHKFEGLTQIFQKAYEHEQHISESINNIVDHAIKSKDHATFNFLQWYVAEQHEEEVLFKDILDKIELIGNENHGLYLADQYVKGIAKSRKS

SEQ ID NO: 5129 - protein, 1379 aa, Artificial Sequence
  SARS-CoV-2/France/GE1977/2020__EPI_ISL_414632 spike protein (1-1211)(P715C_P1069C) Ferritin construct
MFVFLVLLPLVSSQCVNLTTRTQLPPAYTNSFTRGVYYPDKVFRSSVLHSTQDLFLPFFSNVTWFHAIHVSGTNGTKRFDNPVLPFNDGVYFASTEKSNIIRGWIFGTTLDSKTQSLLIVNNATNVVIKVCEFQFCNDPFLGVYYHKNNKSWMESEFRVYSSANNCTFEYVSQPFLMDLEGKQGNFKNLREFVFKNIDGYFKIYSKHTPINLVRDLPQGFSALEPLVDLPIGINITRFQTLLALHRSYLTPGDSSSGWTAGAAAYYVGYLQPRTFLLKYNENGTITDAVDCALDPLSETKCTLKSFTVEKGIYQTSNFRVQPTESIVRFPNITNLCPFGEVFNATRFASVYAWNRKRISNCVADYSVLYNSASFSTFKCYGVSPTKLNDLCFTNVYADSFVIRGDEVRQIAPGQTGKIADYNYKLPDDFTGCVIAWNSNNLDSKVGGNYNYLYRLFRKSNLKPFERDISTEIYQAGSTPCNGVEGFNCYFPLQSYGFQPTNGVGYQPYRVVVLSFELLHAPATVCGPKKSTNLVKNKCVNFNFNGLTGTGVLTESNKKFLPFQQFGRDIADTTDAVRDPQTLEILDITPCSFGGVSVITPGTNTSNQVAVLYQGVNCTEVPVAIHADQLTPTWRVYSTGSNVFQTRAGCLIGAEHVNNSYECDIPIGAGICASYQTQTNSPRRARSVASQSIIAYTMSLGAENSVAYSNNSIAICTNFTISVTTEILPVSMTKTSVDCTMYICGDSTECSNLLLQYGSFCTQLNRALTGIAVEQDKNTQEVFAQVKQIYKTPPIKDFGGFNFSQILPDPSKPSKRSFIEDLLFNKVTLADAGFIKQYGDCLGDIAARDLICAQKFNGLTVLPPLLTDEMIAQYTSALLAGTITSGWTFGAGAALQIPFAMQMAYRFNGIGVTQNVLYENQKLIANQFNSAIGKIQDSLFSTASALGKLQDVVNQNAQALNTLVKQLSSNFGAISSVLNDILSRLDKVEAEVQIDRLITGRLQSLQTYVTQQLIRAAEIRASANLAATKMSECVLGQSKRVDFCGKGYHLMSFPQSAPHGVVFLHVTYVCAQEKNFTTAPAICHDGKAHFPREGVFVSNGTHWFVTQRNFYEPQIITTDNTFVSGNCDVVIGIVNNTVYDPLQPELDSFKEELDKYFKNHTSPDVDLGDISGINASVVNIQKEIDRLNEVAKNLNESLIDLQELGKYEQYIKGGGGSDIIKLLNEQVNKEMQSSNLYMSMSSWCYTHSLDGAGLFLFDHAAEEYEHAKKLIIFLNENNVPVQLTSISAPEHKFEGLTQIFQKAYEHEQHISESINNIVDHAIKSKDHATFNFLQWYVAEQHEEEVLFKDILDKIELIGNENHGLYLADQYVKGIAKSRKS

SEQ ID NO: 5130 - protein, 1379 aa, Artificial Sequence
  SARS-CoV-2/Finland/FIN-313/2020__EPI_ISL_414641 spike protein (1-1211)(P715C_P1069C) Ferritin construct
MFVFLVLLPLVSSQCVNLTTRTQLPPAYTNSFTRGVYYPDKVFRSSVLHSTQDLFLPFFSNVTWFHAIHVSGTNGTKRFDNPVLPFNDGVYFASTEKSNIIRGWIFGTTLDSKTQSLLIVNNATNVVIKVCEFQFCNDPFLGVYYHKNNKSWMESEFRVYSSANNCTFEYVSQPFLMDLEGKQGNFKNLREFVFKNIDGYFKIYSKHTPINLVRDLPQGFSALEPLVDLPIGINITRFKTLLALHRSYLTPGDSSSGWTAGAAAYYVGYLQPRTFLLKYNENGTITDAVDCALDPLSETKCTLKSFTVEKGIYQTSNFRVQPTESIVRFPNITNLCPFGEVFNATRFASVYAWNRKRISNCVADYSVLYNSASFSTFKCYGVSPTKLNDLCFTNVYADSFVIRGDEVRQIAPGQTGKIADYNYKLPDDFTGCVIAWNSNNLDSKVGGNYNYLYRLFRKSNLKPFERDISTEIYQAGSTPCNGVEGFNCYFPLQSYGFQPTNGVGYQPYRVVVLSFELLHAPATVCGPKKSTNLVKNKCVNFNFNGLTGTGVLTESNKKFLPFQQFGRDIADTTDAVRDPQTLEILDITPCSFGGVSVITPGTNTSNQVAVLYQGVNCTEVPVAIHADQLTPTWRVYSTGSNVFQTRAGCLIGAEHVNNSYECDIPIGAGICASYQTQTNSPRRARSVASQSIIAYTMSLGAENSVAYSNNSIAICTNFTISVTTEILPVSMTKTSVDCTMYICGDSTECSNLLLQYGSFCTQLNRALTGIAVEQDKNTQEVFAQVKQIYKTPPIKDFGGFNFSQILPDPSKPSKRSFIEDLLFNKVTLADAGFIKQYGDCLGDIAARDLICAQKFNGLTVLPPLLTDEMIAQYTSALLAGTITSGWTFGAGAALQIPFAMQMAYRFNGIGVTQNVLYENQKLIANQFNSAIGKIQDSLSSTASALGKLQDVVNQNAQALNTLVKQLSSNFGAISSVLNDILSRLDKVEAEVQIDRLITGRLQSLQTYVTQQLIRAAEIRASANLAATKMSECVLGQSKRVDFCGKGYHLMSFPQSAPHGVVFLHVTYVCAQEKNFTTAPAICHDGKAHFPREGVFVSNGTHWFVTQRNFYEPQIITTDNTFVSGNCDVVIGIVNNTVYDPLQPELDSFKEELDKYFKNHTSPDVDLGDISGINASVVNIQKEIDRLNEVAKNLNESLIDLQELGKYEQYIKGGGGSDIIKLLNEQVNKEMQSSNLYMSMSSWCYTHSLDGAGLFLFDHAAEEYEHAKKLIIFLNENNVPVQLTSISAPEHKFEGLTQIFQKAYEHEQHISESINNIVDHAIKSKDHATFNFLQWYVAEQHEEEVLFKDILDKIELIGNENHGLYLADQYVKGIAKSRKS

SEQ ID NO: 5131 - protein, 1379 aa, Artificial Sequence
  SARS-CoV-2/Netherlands/ZuidHolland_2/2020__EPI_ISL_414556 spike protein (1-1211)(P715C_P1069C) Ferritin construct
MFVFLVLLPLVSSQCVNLTTRTQLPPAYTNSFTRGVYYPDKVFRSSVLHSTQDLFLPFFSNVTWFHAIHVSGTNGTKRFDNPVLPFNDGVYFASTEKSNIIRGWIFGTTLDSKTQSLLIVNNATNVVIKVCEFQFCNDPFLGVYYHKNNKSWMESEFRVYSSANNCTFEYVSQPFLMDLEGKQGNFKNLREFVFKNIDGYFKIYSKHTPINLVRDLPQGFSALEPLVDLPIGINITRFQTLLALHRSYLTPGDSSSGWTAGAAAYYVGYLQPRTFLLKYNENGTITDAVDCALDPLSETKCTLKSFTVEKGIYQTSNFRVQPTESIVRFPNITNLCPFGEVFNATRFASVYAWNRKRISNCVADYSVLYNSASFSTFKCYGVSPTKLNDLCFTNVYADSFVIRGDEVRQIAPGQTGKIADYNYKLPDDFTGCVIAWNSNNLDSKVGGNYNYLYRLFRKSNLKPFERDISTEIYQAGSTPCNGVEGFNCYFPLQSYGFQPTNGVGYQPYRVVVLSFELLHAPATVCGPKKSTNLVKNKCVNFNFNGLTGTGVLTESNKKFLPFQQFGRDIADTTDAVRDPQTLEILDITPCSFGGVSVITPGTNTSNQVAVLYQGVNCTEVPVAIHADQLTPTWRVYSTGSNVFQTRAGCLIGAEHVNNSYECDIPIGAGICASYQTQTNSPRRARSVASQSIIAYTMSLGAENSVAYSNNSIAICTNFTISVTTEILPVSMTKTSVDCTMYICGDSTECSNLLLQYGSFCTQLNRALTGIALEQDKNTQEVFAQVKQIYKTPPIKDFGGFNFSQILPDPSKPSKRSFIEDLLFNKVTLADAGFIKQYGDCLGDIAARDLICAQKFNGLTVLPPLLTDEMIAQYTSALLAGTITSGWTFGAGAALQIPFAMQMAYRFNGIGVTQNVLYENQKLIANQFNSAIGKIQDSLSSTASALGKLQDVVNQNAQALNTLVKQLSSNFGAISSVLNDILSRLDKVEAEVQIDRLITGRLQSLQTYVTQQLIRAAEIRASANLAATKMSECVLGQSKRVDFCGKGYHLMSFPQSAPHGVVFLHVTYVCAQEKNFTTAPAICHDGKAHFPREGVFVSNGTHWFVTQRNFYEPQIITTDNTFVSGNCDVVIGIVNNTVYDPLQPELDSFKEELDKYFKNHTSPDVDLGDISGINASVVNIQKEIDRLNEVAKNLNESLIDLQELGKYEQYIKGGGGSDIIKLLNEQVNKEMQSSNLYMSMSSWCYTHSLDGAGLFLFDHAAEEYEHAKKLIIFLNENNVPVQLTSISAPEHKFEGLTQIFQKAYEHEQHISESINNIVDHAIKSKDHATFNFLQWYVAEQHEEEVLFKDILDKIELIGNENHGLYLADQYVKGIAKSRKS

SEQ ID NO: 5132 - protein, 1379 aa, Artificial Sequence
  SARS-CoV-2/USA/WA-UW31/2020__EPI_ISL_414618 spike protein (1-1211)(P715C_P1069C) Ferritin construct
MFVFLVLLPLVSSQCVNLTTRTQLPPAYTNSFTRGVYYPDKVFRSSVLHSTQDLFLPFFSNVTWFHAIHVSGTNGTKRFDNPVLPFNDGVYFASTEKSNIIRGWIFGTTLDSKTQSLLIVNNATNVVIKVCEFQFCNDPFLGVYYHKNNKSWMESEFRVYSSANNCTFEYVSQPFLMDLEGKQGNFKNLREFVFKNIDGYFKIYSKHTPINLVRDLPQGFSALEPLVDLPIGINITRFQTLLALHRSYLTPGDSSSGWTAGAAAYYVGYLQPRTFLLKYNENGTITDAVDCALDPLSETKCTLKSFTVEKGIYQTSNFRVQPTESIVRFPNITNLCPFGEVFNATRFASVYAWNRKRISNCVADYSVLYNSASFSTFKCYGVSPTKLNDLCFTNVYADSFVIRGDEVRQIAPGQTGKIADYNYKLPDDFTGCVIAWNSNNLDSKVGGNYNYLYRLFRKSNLKPFERDISTEIYQAGSTPCNGAEGFNCYFPLQSYGFQPTNGVGYQPYRVVVLSFELLHAPATVCGPKKSTNLVKNKCVNFNFNGLTGTGVLTESNKKFLPFQQFGRDIADTTDAVRDPQTLEILDITPCSFGGVSVITPGTNTSNQVAVLYQDVNCTEVPVAIHADQLTPTWRVYSTGSNVFQTRAGCLIGAEHVNNSYECDIPIGAGICASYQTQTNSPRRARSVASQSIIAYTMSLGAENSVAYSNNSIAICTNFTISVTTEILPVSMTKTSVDCTMYICGDSTECSNLLLQYGSFCTQLNRALTGIAVEQDKNTQEVFAQVKQIYKTPPIKDFGGFNFSQILPDPSKPSKRSFIEDLLFNKVTLADAGFIKQYGDCLGDIAARDLICAQKFNGLTVLPPLLTDEMIAQYTSALLAGTITSGWTFGAGAALQIPFAMQMAYRFNGIGVTQNVLYENQKLIANQFNSAIGKIQDSLSSTASALGKLQDVVNQNAQALNTLVKQLSSNFGAISSVLNDILSRLDKVEAEVQIDRLITGRLQSLQTYVTQQLIRAAEIRASANLAATKMSECVLGQSKRVDFCGKGYHLMSFPQSAPHGVVFLHVTYVCAQEKNFTTAPAICHDGKAHFPREGVFVSNGTHWFVTQRNFYEPQIITTDNTFVSGNCDVVIGIVNNTVYDPLQPELDSFKEELDKYFKNHTSPDVDLGDISGINASVVNIQKEIDRLNEVAKNLNESLIDLQELGKYEQYIKGGGGSDIIKLLNEQVNKEMQSSNLYMSMSSWCYTHSLDGAGLFLFDHAAEEYEHAKKLIIFLNENNVPVQLTSISAPEHKFEGLTQIFQKAYEHEQHISESINNIVDHAIKSKDHATFNFLQWYVAEQHEEEVLFKDILDKIELIGNENHGLYLADQYVKGIAKSRKS

SEQ ID NO: 5133 - protein, 1379 aa, Artificial Sequence
  SARS-CoV-2/South Korea/SNU01/2020__EPI_ISL_411929 spike protein (1-1211)(P715C_P1069C) Ferritin construct
MFVFLVLLPLVSSQCVNLTTRTQLPPAYTNSFTRGVYYPDKVFRSSVLHSTQDLFLPFFSNVTWFHAIHVSGTNGTKRFDNPVLPFNDGVYFASTEKSNIIRGWIFGTTLDSKTQSLLIVNNATNVVIKVCEFQFCNDPFLGVYYHKNNKSWMESEFRVYSSANNCTFEYVSQPFLMDLEGKQGNFKNLREFVFKNIDGYFKIYSKHTPINLVRDLPQGFWALEPLVDLPIGINITRFQTLLALHRSYLTPGDSSSGWTAGAAAYYVGYLQPRTFLLKYNENGTITDAVDCALDPLSETKCTLKSFTVEKGIYQTSNFRVQPTESIVRFPNITNLCPFGEVFNATRFASVYAWNRKRISNCVADYSVLYNSASFSTFKCYGVSPTKLNDLCFTNVYADSFVIRGDEVRQIAPGQTGKIADYNYKLPDDFTGCVIAWNSNNLDSKVGGNYNYLYRLFRKSNLKPFERDISTEIYQAGSTPCNGVEGFNCYFPLQSYGFQPTNGVGYQPYRVVVLSFELLHAPATVCGPKKSTNLVKNKCVNFNFNGLTGTGVLTESNKKFLPFQQFGRDIADTTDAVRDPQTLEILDITPCSFGGVSVITPGTNTSNQVAVLYQDVNCTEVPVAIHADQLTPTWRVYSTGSNVFQTRAGCLIGAEHVNNSYECDIPIGAGICASYQTQTNSPRRARSVASQSIIAYTMSLGAENSVAYSNNSIAICTNFTISVTTEILPVSMTKTSVDCTMYICGDSTECSNLLLQYGSFCTQLNRALTGIAVEQDKNTQEVFAQVKQIYKTPPIKDFGGFNFSQILPDPSKPSKRSFIEDLLFNKVTLADAGFIKQYGDCLGDIAARDLICAQKFNGLTVLPPLLTDEMIAQYTSALLAGTITSGWTFGAGAALQIPFAMQMAYRFNGIGVTQNVLYENQKLIANQFNSAIGKIQDSLSSTASALGKLQDVVNQNAQALNTLVKQLSSNFGAISSVLNDILSRLDKVEAEVQIDRLITGRLQSLQTYVTQQLIRAAEIRASANLAATKMSECVLGQSKRVDFCGKGYHLMSFPQSAPHGVVFLHVTYVCAQEKNFTTAPAICHDGKAHFPREGVFVSNGTHWFVTQRNFYEPQIITTDNTFVSGNCDVVIGIVNNTVYDPLQPELDSFKEELDKYFKNHTSPDVDLGDISGINASVVNIQKEIDRLNEVAKNLNESLIDLQELGKYEQYIKGGGGSDIIKLLNEQVNKEMQSSNLYMSMSSWCYTHSLDGAGLFLFDHAAEEYEHAKKLIIFLNENNVPVQLTSISAPEHKFEGLTQIFQKAYEHEQHISESINNIVDHAIKSKDHATFNFLQWYVAEQHEEEVLFKDILDKIELIGNENHGLYLADQYVKGIAKSRKS

SEQ ID NO: 5134 - protein, 1379 aa, Artificial Sequence
  SARS-CoV-2/China/WF0004/2020__EPI_ISL_413694 spike protein (1-1211)(P715C_P1069C) Ferritin construct
MFVFLVLLPLVSSQCVNLTTRTQLPPAYTNSFTRGVYYPDKVFRSSVLHSTQDLFLPFFSNVTWFHAIHVSGTNGTKRFDNPVLPFNDGVYFASTEKSNIIRGWIFGTTLDSKTQSLLIVNNATNVVIKVCEFQFCNDPFLGVYYHKNNKSWTESEFRVYSSANNCTFEYVSQPFLMDLEGKQGNFKNLREFVFKNIDGYFKIYSKHTPINLVRDLPQGFSALEPLVDLPIGINITRFQTLLALHRSYLTPGDSSSGWTAGAAAYYVGYLQPRTFLLKYNENGTITDAVDCALDPLSETKCTLKSFTVEKGIYQTSNFRVQPTESIVRFPNITNLCPFGEVFNATRFASVYAWNRKRISNCVADYSVLYNSASFSTFKCYGVSPTKLNDLCFTNVYADSFVIRGDEVRQIAPGQTGKIADYNYKLPDDFTGCVIAWNSNNLDSKVGGNYNYLYRLFRKSNLKPFERDISTEIYQAGSTPCNGVEGFNCYFPLQSYGFQPTNGVGYQPYRVVVLSFELLHAPATVCGPKKSTNLVKNKCVNFNFNGLTGTGVLTESNKKFLPFQQFGRDIADTTDAVRDPQTLEILDITPCSFGGVSVITPGTNTSNQVAVLYQDVNCTEVPVAIHADQLTPTWRVYSTGSNVFQTRAGCLIGAEHVNNSYECDIPIGAGICASYQTQTNSPRRARSVASQSIIAYTMSLGAENSVAYSNNSIAICTNFTISVTTEILPVSMTKTSVDCTMYICGDSTECSNLLLQYGSFCTQLNRALTGIAVEQDKNTQEVFAQVKQIYKTPPIKDFGGFNFSQILPDPSKPSKRSFIEDLLFNKVTLADAGFIKQYGDCLGDIAARDLICAQKFNGLTVLPPLLTDEMIAQYTSALLAGTITSGWTFGAGAALQIPFAMQMAYRFNGIGVTQNVLYENQKLIANQFNSAIGKIQDSLSSTASALGKLQDVVNQNAQALNTLVKQLSSNFGAISSVLNDILSRLDKVEAEVQIDRLITGRLQSLQTYVTQQLIRAAEIRASANLAATKMSECVLGQSKRFDFCGKGYHLMSFPQSAPHGVVFLHVTYVCAQEKNFTTAPAICHDGKAHFPREGVFVSNGTHWFVTQRNFYEPQIITTDNTFVSGNCDVVIGIVNNTVYDPLQPELDSFKEELDKYFKNHTSPDVDLGDISGINASVVNIQKEIDRLNEVAKNLNESLIDLQELGKYEQYIKGGGGSDIIKLLNEQVNKEMQSSNLYMSMSSWCYTHSLDGAGLFLFDHAAEEYEHAKKLIIFLNENNVPVQLTSISAPEHKFEGLTQIFQKAYEHEQHISESINNIVDHAIKSKDHATFNFLQWYVAEQHEEEVLFKDILDKIELIGNENHGLYLADQYVKGIAKSRKS

SEQ ID NO: 5135 - protein, 1379 aa, Artificial Sequence
  SARS-CoV-2/China/WF0028/2020__EPI_ISL_413791 spike protein (1-1211)(P715C_P1069C) Ferritin construct
MFVFLVLLPLVSSQCVNLTTRTQLPPAYTNSFTRGVYYPDKVFRSSVLHSTQDLFLPFFSNVTWFHAIHVSGTNGTKRFDNPVLPFNDGVYFASTEKSNIIRGWIFGTTLDSKTQSLLIVNNATNVVIKVCEFQFCNDPFLGVYYHKNNKSWMESEFRVYSSANNCTFEYVSQPFLMDLEGKQGNFKNLREFVFKNIDGYFKIYSKHTPINLVRDLPQGFSALEPLVDLPIGINITRFQTLLALHRSYLTPGDSSSGWTAGAAAYYVGYLQPRTFLLKYNENGTITDAVDCALDPLSETKCTLKSFTVEKGIYQTSNFRVQPTESIVRFPNITNLCPFGEVFNATRFASVYAWNRKRISNCVADYSVLYNSASFSTFKCYGVSPTKLNDLCFTNVYADSFVIRGDEVRQIAPGQTGKIADYNYKLPDDFTGCVIAWNSNNLDSKVGGNYNYLYRLFRKSNLKPFERDISTEIYQAGSTPCNGVEGFNCYFPLQSYGFQPTNGVGYQPYRVVVLSFELLHAPATVCGPKKSTNLVKNKCVNFNFNGLTGTGVLTESNKKFLPFQQFGRDIADTTDAVRDPQTLEILDITPCSFGGVSVITPGTNTSNQVAVLYQDVNCTEVPVAIHADQLTPTWRVYSTGSNVFQTRAGCLIGAEHVNNSYECDIPIGAGICASYQTQTNSPRRARSVASQSIIAYTMSLGAENSVAYSNNSIAICTNFTISVTTEILPVSMTKTSVDCTMYICGDSTECSNLLLQYGSFCTQLNRALTGIAVEQDKNTQEVFAQVKQIYKTPPIKDFGGFNFSQILPDPSKPSKRSFIEDLLFNKVTLADAGFIKQYGDCLGDIAARDLICAQKFNGLTVLPPLLTDEMIAQYTSALLAGTITSGWTFGAGAALQIPFAMQMAYRFNGIGVTQNVLYENQKLIANQFNSAIGKIQDSLSSTASALGKLQDVVNQNAQALNTLVKQLSSNFGAISSVLNDILSRLDKVEAEVQIDRLITGRLQSLQTYVTQQLIRAAEIRASANLAATKMSECVLGQSKRVDFCGKGYHLMSFPQSAPHGVVFLHVTYVCAQEKNFTTAPAICHDGKAHFPREGVFVSNGTHWFVTQRNFYEPQIITTDNTFVSGNCDVVIGIVNNTVYDPLQPELESFKEELDKYFKNHTSPDVDLGDISGINASVVNIQKEIDRLNEVAKNLNESLIDLQELGKYEQYIKGGGGSDIIKLLNEQVNKEMQSSNLYMSMSSWCYTHSLDGAGLFLFDHAAEEYEHAKKLIIFLNENNVPVQLTSISAPEHKFEGLTQIFQKAYEHEQHISESINNIVDHAIKSKDHATFNFLQWYVAEQHEEEVLFKDILDKIELIGNENHGLYLADQYVKGIAKSRKS

SEQ ID NO: 5136 - protein, 1379 aa, Artificial Sequence
  SARS-CoV-2/2019-nCoV/USA-CruiseA-18/2020__MT159716.1 spike protein (1-1211)(P715C_P1069C) Ferritin construct
MFVFLVLLPLVSSQCVNLTTRTQLPPAYTNSFTRGVYYPDKVFRSSVLHSTQDLFLPFFSNVTWFHAIHVSGTNGTKRFDNPVLPFNDGVYFASTEKSNIIRGWIFGTTLDSKTQSLLIVNNATNVVIKVCEFQFCNDPFLGVYYHKNNKSWMESELRVYSSANNCTFEYVSQPFLMDLEGKQGNFKNLREFVFKNIDGYFKIYSKHTPINLVRDLPQGFSALEPLVDLPIGINITRFQTLLALHRSYLTPGDSSSGWTAGAAAYYVGYLQPRTFLLKYNENGTITDAVDCALDPLSETKCTLKSFTVEKGIYQTSNFRVQPTESIVRFPNITNLCPFGEVFNATRFASVYAWNRKRISNCVADYSVLYNSASFSTFKCYGVSPTKLNDLCFTNVYADSFVIRGDEVRQIAPGQTGKIADYNYKLPDDFTGCVIAWNSNNLDSKVGGNYNYLYRLFRKSNLKPFERDISTEIYQAGSTPCNGVEGFNCYFPLQSYGFQPTNGVGYQPYRVVVLSFELLHAPATVCGPKKSTNLVKNKCVNFNFNGLTGTGVLTESNKKFLPFQQFGRDIADTTDAVRDPQTLEILDITPCSFGGVSVITPGTNTSNQVAVLYQDVNCTEVPVAIHADQLTPTWRVYSTGSNVFQTRAGCLIGAEHVNNSYECDIPIGAGICASYQTQTNSPRRARSVASQSIIAYTMSLGAENSVAYSNNSIAICTNFTISVTTEILPVSMTKTSVDCTMYICGDSTECSNLLLQYGSFCTQLNRALTGIAVEQDKNTQEVFAQVKQIYKTPPIKDFGGFNFSQILPDPSKPSKRSFIEDLLFNKVTLADAGFIKQYGDCLGDIAARDLICAQKFNGLTVLPPLLTDEMIAQYTSALLAGTITSGWTFGAGAALQIPFAMQMAYRFNGIGVTQNVLYENQKLIANQFNSAIGKIQDSLSSTASALGKLQDVVNQNAQALNTLVKQLSSNFGAISSVLNDILSRLDKVEAEVQIDRLITGRLQSLQTYVTQQLIRAAEIRASANLAATKMSECVLGQSKRVDFCGKGYHLMSFPQSAPHGVVFLHVTYVCAQEKNFTTAPAICHDGKAHFPREGVFVSNGTHWFVTQRNFYEPQIITTDNTFVSGNCDVVIGIVNNTVYDPLQPELDSFKEELDKYFKNHTSPDVDLGDISGINASVVNIQKEIDRLNEVAKNLNESLIDLQELGKYEQYIKGGGGSDIIKLLNEQVNKEMQSSNLYMSMSSWCYTHSLDGAGLFLFDHAAEEYEHAKKLIIFLNENNVPVQLTSISAPEHKFEGLTQIFQKAYEHEQHISESINNIVDHAIKSKDHATFNFLQWYVAEQHEEEVLFKDILDKIELIGNENHGLYLADQYVKGIAKSRKS

SEQ ID NO: 5137 - protein, 1379 aa, Artificial Sequence
  SARS-CoV-2/SARS-CoV-2/Yunnan-01/human/2020/CHN__MT049951.1 spike protein (1-1211)(P715C_P1069C) Ferritin construct
MFVFLVLLPLVSSQCVNLTTRTQLPPANTNSFTRGVYYPDKVFRSSVLHSTQDLFLPFFSNVTWFHAIHVSGTNGTKRFDNPVLPFNDGVYFASTEKSNIIRGWIFGTTLDSKTQSLLIVNNATNVVIKVCEFQFCNDPFLGVYYHKNNKSWMESEFRVYSSANNCTFEYVSQPFLMDLEGKQGNFKNLREFVFKNIDGYFKIYSKHTPINLVRDLPQGFSALEPLVDLPIGINITRFQTLLALHRSYLTPGDSSSGWTAGAAAYYVGYLQPRTFLLKYNENGTITDAVDCALDPLSETKCTLKSFTVEKGIYQTSNFRVQPTESIVRFPNITNLCPFGEVFNATRFASVYAWNRKRISNCVADYSVLYNSASFSTFKCYGVSPTKLNDLCFTNVYADSFVIRGDEVRQIAPGQTGKIADYNYKLPDDFTGCVIAWNSNNLDSKVGGNYNYLYRLFRKSNLKPFERDISTEIYQAGSTPCNGVEGFNCYFPLQSYGFQPTNGVGYQPYRVVVLSFELLHAPATVCGPKKSTNLVKNKCVNFNFNGLTGTGVLTESNKKFLPFQQFGRDIADTTDAVRDPQTLEILDITPCSFGGVSVITPGTNTSNQVAVLYQDVNCTEVPVAIHADQLTPTWRVYSTGSNVFQTRAGCLIGAEHVNNSYECDIPIGAGICASYQTQTNSPRRARSVASQSIIAYTMSLGAENSVAYSNNSIAICTNFTISVTTEILPVSMTKTSVDCTMYICGDSTECSNLLLQYGSFCTQLNRALTGIAVEQDKNTQEVFAQVKQIYKTPPIKDFGGFNFSQILPDPSKPSKRSFIEDLLFNKVTLADAGFIKQYGDCLGDIAARDLICAQKFNGLTVLPPLLTDEMIAQYTSALLAGTITSGWTFGAGAALQIPFAMQMAYRFNGIGVTQNVLYENQKLIANQFNSAIGKIQDSLSSTASALGKLQDVVNQNAQALNTLVKQLSSNFGAISSVLNDILSRLDKVEAEVQIDRLITGRLQSLQTYVTQQLIRAAEIRASANLAATKMSECVLGQSKRVDFCGKGYHLMSFPQSAPHGVVFLHVTYVCAQEKNFTTAPAICHDGKAHFPREGVFVSNGTHWFVTQRNFYEPQIITTDNTFVSGNCDVVIGIVNNTVYDPLQPELDSFKEELDKYFKNHTSPDVDLGDISGINASVVNIQKEIDRLNEVAKNLNESLIDLQELGKYEQYIKGGGGSDIIKLLNEQVNKEMQSSNLYMSMSSWCYTHSLDGAGLFLFDHAAEEYEHAKKLIIFLNENNVPVQLTSISAPEHKFEGLTQIFQKAYEHEQHISESINNIVDHAIKSKDHATFNFLQWYVAEQHEEEVLFKDILDKIELIGNENHGLYLADQYVKGIAKSRKS

SEQ ID NO: 5138 - protein, 1379 aa, Artificial Sequence
  SARS-CoV-2/USA/WA-UW292/2020__EPI_ISL_418077 spike protein (1-1211)(P715C_P1069C) Ferritin construct
MFVFLVLLPLVSSQCVNLTTRTQLPPAYTNSFTRGVYYPDKVFRSSVLHSTQDLFLPFFSNVTWFHAIHVSGTNGTKRFDNPVLPFNDGVYFASTEKSNIIRGWIFGTTLDSKTQSLLIVNNATNVVIKVCEFQFCNDPFLGVYYHKNNKSWMESEFRVYSSANNCTFEYVSQPFLMDLEGKQGNFKNLREFVFKNIDGYFKIYSKHTPINLVRDLPQGFSALEPLVDLPIGINITRFQTLLALHRSYLTPGDSSSGWTAGAAAYYVGYLQPRTFLLKYNENGTITDAVDCALDPLSETKCTLKSFTVEKGIYQTSNFRVQPTESIVRFPNITNLCPFGEVFNATRFASVYAWNRKRISNCVADYSVLYNSASFSTFKCYGVSPTKLNDLCFTNVYADSFVIRGDEVRQIAPGQTGKIADYNYKLPDDFTGCVIAWNSNNLDSKVGGNYNYLYRLFRKSNLKPFERDISTEIYQASSTPCNGVEGFNCYFPLQSYGFQPTNGVGYQPYRVVVLSFELLHAPATVCGPKKSTNLVKNKCVNFNFNGLTGTGVLTESNKKFLPFQQFGRDIADTTDAVRDPQTLEILDITPCSFGGVSVITPGTNTSNQVAVLYQDVNCTEVPVAIHADQLTPTWRVYSTGSNVFQTRAGCLIGAEHVNNSYECDIPIGAGICASYQTQTNSPRRARSVASQSIIAYTMSLGAENSVAYSNNSIAICTNFTISVTTEILPVSMTKTSVDCTMYICGDSTECSNLLLQYGSFCTQLNRALTGIAVEQDKNTQEVFAQVKQIYKTPPIKDFGGFNFSQILPDPSKPSKRSFIEDLLFNKVTLADAGFIKQYGDCLGDIAARDLICAQKFNGLTVLPPLLTDEMIAQYTSALLAGTITSGWTFGAGAALQIPFAMQMAYRFNGIGVTQNVLYENQKLIANQFNSAIGKIQDSLSSTASALGKLQDVVNQNAQALNTLVKQLSSNFGAISSVLNDILSRLDKVEAEVQIDRLITGRLQSLQTYVTQQLIRAAEIRASANLAATKMSECVLGQSKRVDFCGKGYHLMSFPQSAPHGVVFLHVTYVCAQEKNFTTAPAICHDGKAHFPREGVFVSNGTHWFVTQRNFYEPQIITTDNTFVSGNCDVVIGIVNNTVYDPLQPELDSFKEELDKYFKNHTSPDVDLGDISGINASVVNIQKEIDRLNEVAKNLNESLIDLQELGKYEQYIKGGGGSDIIKLLNEQVNKEMQSSNLYMSMSSWCYTHSLDGAGLFLFDHAAEEYEHAKKLIIFLNENNVPVQLTSISAPEHKFEGLTQIFQKAYEHEQHISESINNIVDHAIKSKDHATFNFLQWYVAEQHEEEVLFKDILDKIELIGNENHGLYLADQYVKGIAKSRKS

SEQ ID NO: 5139 - protein, 1379 aa, Artificial Sequence
  SARS-CoV-2/Iceland/192/2020__EPI_ISL_417819 spike protein (1-1211)(P715C_P1069C) Ferritin construct
MFVFFVLLPLVSSQCVNLTTRTQLPPAYTNSFTRGVYYPDKVFRSSVLHSTQDLFLPFFSNVTWFHAIHVSGTNGTKRFDNPVLPFNDGVYFASTEKSNIIRGWIFGTTLDSKTQSLLIVNNATNVVIKVCEFQFCNDPFLGVYYHKNNKSWMESEFRVYSSANNCTFEYVSQPFLMDLEGKQGNFKNLREFVFKNIDGYFKIYSKHTPINLVRDLPQGFSALEPLVDLPIGINITRFQTLLALHRSYLTPGDSSSGWTAGAAAYYVGYLQPRTFLLKYNENGTITDAVDCALDPLSETKCTLKSFTVEKGIYQTSNFRVQPTESIVRFPNITNLCPFGEVFNATRFASVYAWNRKRISNCVADYSVLYNSASFSTFKCYGVSPTKLNDLCFTNVYADSFVIRGDEVRQIAPGQTGKIADYNYKLPDDFTGCVIAWNSNNLDSKVGGNYNYLYRLFRKSNLKPFERDISTEIYQAGSTPCNGVEGFNCYFPLQSYGFQPTNGVGYQPYRVVVLSFELLHAPATVCGPKKSTNLVKNKCVNFNFNGLTGTGVLTESNKKFLPFQQFGRDIADTTDAVRDPQTLEILDITPCSFGGVSVITPGTNTSNQVAVLYQGVNCTEVPVAIHADQLTPTWRVYSTGSNVFQTRAGCLIGAEHVNNSYECDIPIGAGICASYQTQTNSPRRARSVASQSIIAYTMSLGAENSVAYSNNSIAICTNFTISVTTEILPVSMTKTSVDCTMYICGDSTECSNLLLQYGSFCTQLNRALTGIAVEQDKNTQEVFAQVKQIYKTPPIKDFGGFNFSQILPDPSKPSKRSFIEDLLFNKVTLADAGFIKQYGDCLGDIAARDLICAQKFNGLTVLPPLLTDEMIAQYTSALLAGTITSGWTFGAGAALQIPFAMQMAYRFNGIGVTQNVLYENQKLIANQFNSAIGKIQDSLSSTASALGKLQDVVNQNAQALNTLVKQLSSNFGAISSVLNDILSRLDKVEAEVQIDRLITGRLQSLQTYVTQQLIRAAEIRASANLAATKMSECVLGQSKRVDFCGKGYHLMSFPQSAPHGVVFLHVTYVCAQEKNFTTAPAICHDGKAHFPREGVFVSNGTHWFVTQRNFYEPQIITTDNTFVSGNCDVVIGIVNNTVYDPLQPELDSFKEELDKYFKNHTSPDVDLGDISGINASVVNIQKEIDRLNEVAKNLNESLIDLQELGKYEQYIKGGGGSDIIKLLNEQVNKEMQSSNLYMSMSSWCYTHSLDGAGLFLFDHAAEEYEHAKKLIIFLNENNVPVQLTSISAPEHKFEGLTQIFQKAYEHEQHISESINNIVDHAIKSKDHATFNFLQWYVAEQHEEEVLFKDILDKIELIGNENHGLYLADQYVKGIAKSRKS

SEQ ID NO: 5140 - protein, 1379 aa, Artificial Sequence
  SARS-CoV-2/Belgium/ULG-6939/2020__EPI_ISL_417020 spike protein (1-1211)(P715C_P1069C) Ferritin construct
MFVFLVLLPLVSSQCVNLTTRTQLPPAYTNSFTRGVYYPDKVFRSSVLHSTQDLFLPFFSNVTWFHAIHVSGTNGTKRFDNPVLPFNDGVYFASTEKSNIIRGWIFGTTLDSKTQSLLIVNNATNVVIKVCEFQFCNDPFLGVYYHKNNKSWMESEFRVYSSANNCTFEYVSQPFLMDLEGKQGNFKNLREFVFKNIDGYFKIYSKHTPINLVRDLPQGFSALEPLVDLPIGINITRFQTLLALHRSYLTPGDSSSGWTAGAAAYYVGYLQPRTFLLKYNENGTITDAVDCALDPLSETKCTLKSFTVEKGIYQTSNFRVQPTESIVRFPNITNLCPFGEVFNATRFASVYAWNRKRISNCVADYSVLYNSASFSTFKCYGVSPTKLNDLCFTNVYADSFVIRGDEVRQIAPGQTGKIADYNYKLPDDFTGCVIAWNSNNLDSKVGGNYNYLYRLFRKSNLKPFERDISTEIYQAGSTPCNGVEGFNCYFPLQSYGFQPTNGVGYQPYRVVVLSFELLHAPATVCGPKKSTNLVKNKCVNFNFNGLTGTGVLTESNKKFLPFQQFGRDIADTTDAVRDPQTLEILDITPCSFGGVSVITPGTNTSNQVAVLYQGVNCTEVPVAIHADQLTPTWRVYSTGSNVFQTRAGCLIGAEHVNNSYECDIPIGAGICASYQTQTNSPRRARSVASQSIIAYTMSLGAENSVVYSNNSIAICTNFTISVTTEILPVSMTKTSVDCTMYICGDSTECSNLLLQYGSFCTQLNRALTGIAVEQDKNTQEVFAQVKQIYKTPPIKDFGGFNFSQILPDPSKPSKRSFIEDLLFNKVTLADAGFIKQYGDCLGDIAARDLICAQKFNGLTVLPPLLTDEMIAQYTSALLAGTITSGWTFGAGAALQIPFAMQMAYRFNGIGVTQNVLYENQKLIANQFNSAIGKIQDSLSSTASALGKLQDVVNQNAQALNTLVKQLSSNFGAISSVLNDILSRLDKVEAEVQIDRLITGRLQSLQTYVTQQLIRAAEIRASANLAATKMSECVLGQSKRVDFCGKGYHLMSFPQSAPHGVVFLHVTYVCAQEKNFTTAPAICHDGKAHFPREGVFVSNGTHWFVTQRNFYEPQIITTDNTFVSGNCDVVIGIVNNTVYDPLQPELDSFKEELDKYFKNHTSPDVDLGDISGINASVVNIQKEIDRLNEVAKNLNESLIDLQELGKYEQYIKGGGGSDIIKLLNEQVNKEMQSSNLYMSMSSWCYTHSLDGAGLFLFDHAAEEYEHAKKLIIFLNENNVPVQLTSISAPEHKFEGLTQIFQKAYEHEQHISESINNIVDHAIKSKDHATFNFLQWYVAEQHEEEVLFKDILDKIELIGNENHGLYLADQYVKGIAKSRKS

SEQ ID NO: 5141 - protein, 1379 aa, Artificial Sequence
  SARS-CoV-2/France/HF2496/2020__EPI_ISL_418231 spike protein (1-1211)(P715C_P1069C) Ferritin construct
MFVFLVLLPLVSSQCVNLTTRTQLPPAYTNSFTRGVYYPDKVFRSSVLHSTQDLFLPFFSNVTWFHAIHVSGTNGTKRFDNPVLPFNDGVYFASTEKSNIIRGWIFGTTLDSKTQSLLIVNNATNVVIKVCEFQFCNDPFLGVYYHKNNKSWMESEFRVYSSANNCTFEYVSQPFLMDLEGKQGNFKNLREFVFKNIDGYFKIYSKHTPINLVRDLPQGFSALEPLVDLPIGINITRFQTLLALHRSYLTPGDSSSGWTAGAAAYYVGYLQPRTFLLKYNENGTITDAVDCALDPLSETKCTLKSFTVEKGIYQTSNFRVQPTESIVRFPNITNLCPFGEVFNATRFASVYAWNRKRISNCVADYSVLYNSASFSTFKCYGVSPTKLNDLCFTNVYADSFVIRGDEVRQIAPGQTGKIADYNYKLPDDFTGCVIAWNSNNLDSKVGGNYNYLYRLFRKSNLKPFERDISTEIYQAGSTPCNGVEGFNCYFPLQSYGFQPTNGVGYQPYRVVVLSFELLHAPATVCGPKKSTNLVKNKCVNFNFNGLTGTGVLTESNKKFLPFQQFGRDIADTTDAVRDPQTLEILDITPCSFGGVSVITPGTNTSNQVAVLYQGVNCTEVPVAIHADQLTPTWRVYSTGSNVFQTRAGCLIGAEHVNNSYECDIPIGAGICASYQTQTNSPRRARSVASQSIIAYTMSLGAENSVAYSNNSIAICTNFTISVTTEILPVSMTKTSVDCTMYICGDSTECSNLLLQYGSFCTQLNRALTGIAVEQDKNTQEVFAQVKQIYKTPPIKDFGGFNFSQILPDPSKPSKRSFIEDLLFNKVTLADAGFIKQYGDCLGDIVARDLICAQKFNGLTVLPPLLTDEMIAQYTSALLAGTITSGWTFGAGAALQIPFAMQMAYRFNGIGVTQNVLYENQKLIANQFNSAIGKIQDSLSSTASALGKLQDVVNQNAQALNTLVKQLSSNFGAISSVLNDILSRLDKVEAEVQIDRLITGRLQSLQTYVTQQLIRAAEIRASANLAATKMSECVLGQSKRVDFCGKGYHLMSFPQSAPHGVVFLHVTYVCAQEKNFTTAPAICHDGKAHFPREGVFVSNGTHWFVTQRNFYEPQIITTDNTFVSGNCDVVIGIVNNTVYDPLQPELDSFKEELDKYFKNHTSPDVDLGDISGINASVVNIQKEIDRLNEVAKNLNESLIDLQELGKYEQYIKGGGGSDIIKLLNEQVNKEMQSSNLYMSMSSWCYTHSLDGAGLFLFDHAAEEYEHAKKLIIFLNENNVPVQLTSISAPEHKFEGLTQIFQKAYEHEQHISESINNIVDHAIKSKDHATFNFLQWYVAEQHEEEVLFKDILDKIELIGNENHGLYLADQYVKGIAKSRKS

SEQ ID NO: 5142 - protein, 1379 aa, Artificial Sequence
  SARS-CoV-2/USA/WA-UW291/2020__EPI_ISL_418076 spike protein (1-1211)(P715C_P1069C) Ferritin construct
MFVFLVLLPLVSSQCVNLTTRTQLPPAYTNSFTRGVYYPDKVFRSSVLHSTQDLFLPFFSNVTWFHAIHVSGTNGTKRFDNPVLPFNDGVYFASTEKSNIIRGWIFGTTLDSKTQSLLIVNNATNVVIKVCEFQFCNDPFLGVYYHKNNKSWMESEFRVYSSANNCTFEYVSQPFLMDLEGKQGNFKNLREFVFKNIDGYFKIYSKHTPINLVRDLPQGFSALEPLVDLPIGINITRFQTLLALHRSYLTPGDSSSGWTAGAAAYYVGYLQPRTFLLKYNENGTITDAVDCALDPLSETKCTLKSFTVEKGIYQTSNFRVQPTESIVRFPNITNLCPFGEVFNATRFASVYAWNRKRISNCVADYSVLYNSASFSTFKCYGVSPTKLNDLCFTNVYADSFVIRGDEVRQIAPGQTGKIADYNYKLPDDFTGCVIAWNSNNLDSKVGGNYNYLYRLFRKSNLKPFERDISTEIYQAGSTPCNGVEGFNCYFPLQSYGFQPTNGVGYQPYRVVVLSFELLHAPATVCGPKKSTNLVKNKCVNFNFNGLTGTGVLTESNKKFLPFQQFGRDIADTTDAVRDPQTLEILDITPCSFGGVSVITPGTNTSNQVAVLYQGVNCTEVPVAIHADQLTPTWRVYSTGSNVFQTRAGCLIGAEHVNNSYECDIPIGAGICASYQTQTNSPRRARSVASQSIIAYTMSLGAENSVAYSNNSIAICTNFTISVTTEILPVSMTKTSVDCTMYICGDSTECSNLLLQYGSFCTQLNRALTGIAVEQDKNTQEVFAQVKQIYKTPPIKDFGGFNFSQILPDPSKPSKRSFIEDLLFNKVTLADAGFIKQYGDCLGDIAARDLICAQKFNGLTVLPPLLTDEMIAQYTSALLAGTITSGWTFGAGAALQIPFAMQMAYRFNGIGVTQNVLYENQKLIANQFNSAIGKIQYSLSSTASALGKLQDVVNQNAQALNTLVKQLSSNFGAISSVLNDILSRLDKVEAEVQIDRLITGRLQSLQTYVTQQLIRAAEIRASANLAATKMSECVLGQSKRVDFCGKGYHLMSFPQSAPHGVVFLHVTYVCAQEKNFTTAPAICHDGKAHFPREGVFVSNGTHWFVTQRNFYEPQIITTDNTFVSGNCDVVIGIVNNTVYDPLQPELDSFKEELDKYFKNHTSPDVDLGDISGINASVVNIQKEIDRLNEVAKNLNESLIDLQELGKYEQYIKGGGGSDIIKLLNEQVNKEMQSSNLYMSMSSWCYTHSLDGAGLFLFDHAAEEYEHAKKLIIFLNENNVPVQLTSISAPEHKFEGLTQIFQKAYEHEQHISESINNIVDHAIKSKDHATFNFLQWYVAEQHEEEVLFKDILDKIELIGNENHGLYLADQYVKGIAKSRKS

SEQ ID NO: 5143 - protein, 1379 aa, Artificial Sequence; identical to SEQ ID NO: 5106
  SARS-CoV-2/Portugal/PT0034/2020__EPI_ISL_418019 spike protein (1-1211)(P715C_P1069C) Ferritin construct

SEQ ID NO: 5144 - protein, 1379 aa, Artificial Sequence
  SARS-CoV-2/Iceland/202/2020__EPI_ISL_417750 spike protein (1-1211)(P715C_P1069C) Ferritin construct
MFVFLVLLPLVSSQCVNLTTRTQLPPAYTNSFTRGVYYPDKVFRSSVLHSTQDLFLPFFSNVTWFHAIHVSGTNGTKRFDNPVLPFNDGVYFASTEKSNIIRGWIFGTTLDSKTQSLLIVNNATNVVIKVCEFQFCNDPFLGVYYHKNNKSWMESEFRVYSSANNCTFEYVSQPFLMDLEGKQGNFKNLREFVFKNIDGYFKIYSKHTPINLVRDLPQGFSALEPLVDLPIGINITRFQTLLALHRSYLTPGDSSSGWTAGAAAYYVGYLQPRTFLLKYNENGTITDAVDCALDPLSETKCTLKSFTVEKGIYQTSNFRVQPTESIVRFPNITNLCPFGEVFNATRFASVYAWNRKRISNCVADYSVLYNSASFSTFKCYGVSPTKLNDLCFTNVYADSFVIRGDEVRQIAPGQTGKIADYNYKLPDDFTGCVIAWNSNNLDSKVGGNYNYLYRLFRKSNLKPFERDISTEIYQAGSTPCNGVEGFNCYFPLQSYGFQPTNGVGYQPYRVVVLSFELLHAPATVCGPKKSTNLVKNKCVNFNFNGLTGTGVLTESNKKFLPFQQFGRDIADTTDAVRDPQTLEILDITPCSFGGVSVITPGTNTSNQVAVLYQDVNCTEVPVAIHADQLTPTWRVYSTGSNVFQTRAGCLIGAEHVNNSYECDIPIGAGICASYQTQTNSPRRARSVASQSIIAYTMSLGAENSVAYSNNSIAICTNFTISVTTEILPVSMTKTSVDCTMYICGDSTECSNLLLQYGSFCTQLNRALTGIAVEQDKNTQEVFAQVKQIYKTPPIKDFGGFNFSQILPDPSKPSKRSFIEDLLFNKVTLADAGFIKQYGDCLGDIAARDLICAQKFNGLTVLPPLLTDEMIAQYTSALLAGTITSGWTFGAGAALQIPFAMQMAYRFNGIGVTQNVLYENQKLIANQFNSAIGKIQDSLSSTASALGKLQDVVNQNAQALNTLVKQLSSNFGAISSVLNDILSRLDKVEAEVQIDRLITGRLQSLQTYVTQQLIRAAEIRASANLAATKMSECVLGQSKRVDFCGKGYHLMSFPQSAPHGVVFLHVTYVCAQEKNFTTAPAICHDGKAHFPREGVFVSNGTHWFVTQRNFYEPQIITTDNTFVSGNCDVVIGIVNNTVYDPLQPELDSFKEELDKYFKNHTSPDVDLGDIPGINASVVNIQKEIDRLNEVAKNLNESLIDLQELGKYEQYIKGGGGSDIIKLLNEQVNKEMQSSNLYMSMSSWCYTHSLDGAGLFLFDHAAEEYEHAKKLIIFLNENNVPVQLTSISAPEHKFEGLTQIFQKAYEHEQHISESINNIVDHAIKSKDHATFNFLQWYVAEQHEEEVLFKDILDKIELIGNENHGLYLADQYVKGIAKSRKS

SEQ ID NO: 5145 - protein, 1379 aa, Artificial Sequence
  SARS-CoV-2/USA/WA-UW261/2020__EPI_ISL_418046 spike protein (1-1211)(P715C_P1069C) Ferritin construct
MFVFLVLLPLVSSQCVNLTTRTQLPPAYTNSFTRGVYYPDKVFRSSVLHSTQDLFLPFFSNVTWFHAIHVSGTNGTKRFDNPVLPFNDGVYFASTEKSNIIRGWIFGTTLDSKTQSLLIVNNATNVVIKVCEFQFCNDPFLGVYYHKNNKSWMESEFRVYSSANNCTFEYVSQPFLMDLEGKQGNFKNLREFVFKNIDGYFKIYSKHTPINLVRDLPQGFSALEPLVDLPIGINITRFQTLLALHRSYLTPGDSSSGWTAGAAAYYVGYLQPRTFLLKYNENGTITDAVDCALDPLSETKCTLKSFTVEKGIYQTSNFRVQPTESIVRFPNITNLCPFGEVFNATRFTSVYAWNRKRISNCVADYSVLYNSASFSTFKCYGVSPTKLNDLCFTNVYADSFVIRGDEVRQIAPGQTGKIADYNYKLPDDFTGCVIAWNSNNLDSKVGGNYNYLYRLFRKSNLKPFERDISTEIYQAGSTPCNGVEGFNCYFPLQSYGFQPTNGVGYQPYRVVVLSFELLHAPATVCGPKKSTNLVKNKCVNFNFNGLTGTGVLTESNKKFLPFQQFGRDIADTTDAVRDPQTLEILDITPCSFGGVSVITPGTNTSNQVAVLYQDVNCTEVPVAIHADQLTPTWRVYSTGSNVFQTRAGCLIGAEHVNNSYECDIPIGAGICASYQTQTNSPRRARSVASQSIIAYTMSLGAENSVAYSNNSIAICTNFTISVTTEILPVSMTKTSVDCTMYICGDSTECSNLLLQYGSFCTQLNRALTGIAVEQDKNTQEVFAQVKQIYKTPPIKDFGGFNFSQILPDPSKPSKRSFIEDLLFNKVTLADAGFIKQYGDCLGDIAARDLICAQKFNGLTVLPPLLTDEMIAQYTSALLAGTITSGWTFGAGAALQIPFAMQMAYRFNGIGVTQNVLYENQKLIANQFNSAIGKIQDSLSSTASALGKLQDVVNQNAQALNTLVKQLSSNFGAISSVLNDILSRLDKVEAEVQIDRLITGRLQSLQTYVTQQLIRAAEIRASANLAATKMSECVLGQSKRVDFCGKGYHLMSFPQSAPHGVVFLHVTYVCAQEKNFTTAPAICHDGKAHFPREGVFVSNGTHWFVTQRNFYEPQIITTDNTFVSGNCDVVIGIVNNTVYDPLQPELDSFKEELDKYFKNHTSPDVDLGDISGINASVVNIQKEIDRLNEVAKNLNESLIDLQELGKYEQYIKGGGGSDIIKLLNEQVNKEMQSSNLYMSMSSWCYTHSLDGAGLFLFDHAAEEYEHAKKLIIFLNENNVPVQLTSISAPEHKFEGLTQIFQKAYEHEQHISESINNIVDHAIKSKDHATFNFLQWYVAEQHEEEVLFKDILDKIELIGNENHGLYLADQYVKGIAKSRKS

SEQ ID NO: 5146 - protein, 1379 aa, Artificial Sequence
  SARS-CoV-2/Portugal/PT0035/2020__EPI_ISL_418020 spike protein (1-1211)(P715C_P1069C) Ferritin construct
MFVFLVLLPLVSSQCVNLTTRTQLPPAYTNSFTRGVYYPDKVFRSSVLHSTQDLFLPFFSNVTWFHAIHVSGTNGTKRFDNPVLPFNDGVYFASTEKSNIIRGWIFGTTLDSKTQSLLIVNNATNVVIKVCEFQFCNDPFLGVYYHKNNKSWMESEFRVYSSANNCTFEYVSQPFLMDLEGKQGNFKNLREFVFKNIDGYFKIYSKHTPINLVRDLPQGFSALEPLVDLPIGINITRFQTLLALHRSYLTPGDSSSGWTAGAAAYYVGYLQPRTFLLKYNENGTITDAVDCALDPLSETKCTLKSFTVEKGIYQTSNFRVQPTESIVRFPNITNLCPFGEVFNATRFASVYAWNRKRISNCVADYSVLYNSASFSTFKCYGVSPTKLNDLCFTNVYADSFVIRGDEVRQIAPGQTGKIADYNYKLPDDFTGCVIAWNSNNLDSKVGGNYNYLYRLFRKSNLKPFERDISTEIYQAGSTPCNGVEGFNCYFPLQSYGFQPTNGVGYQPYRVVVLSFELLHAPATVCGPKKSTNLVKNKCVNFNFNGLTGTGVLTESNKKFLPFQQFGRDIADTTDAVRDPQTLEILDITPCSFGGVSVITPGTNTSNQVAVLYQDVNCTEVPVAIHADQLTPTWRVYSTGSNVFQTRAGCLIGAEHVNNSYECDIPIGAGICASYQTQTNSPRRARSVASQSIIAYTMSLGAENSVAYSNNSIAICTNFTISVTTEILPVSMTKTSVDCTMYICGDSTECSNLLLQYGSFCTQLNRALTGIAVEQDKNTQEVFAQVKQIYKTPPIKDFGGFNFSQILPDPSKPSKRSFIEDLLFNKVTLADAGFIKQYGDCLGDISARDLICAQKFNGLTVLPPLLTDEMIAQYTSALLAGTITSGWTFGAGAALQIPFAMQMAYRFNGIGVTQNVLYENQKLIANQFNSAIGKIQDSLSSTASALGKLQDVVNQNAQALNTLVKQLSSNFGAISSVLNDILSRLDKVEAEVQIDRLITGRLQSLQTYVTQQLIRAAEIRASANLAATKMSECVLGQSKRVDFCGKGYHLMSFPQSAPHGVVFLHVTYVCAQEKNFTTAPAICHDGKAHFPREGVFVSNGTHWFVTQRNFYEPQIITTDNTFVSGNCDVVIGIVNNTVYDPLQPELDSFKEELDKYFKNHTSPDVDLGDISGINASVVNIQKEIDRLNEVAKNLNESLIDLQELGKYEQYIKGGGGSDIIKLLNEQVNKEMQSSNLYMSMSSWCYTHSLDGAGLFLFDHAAEEYEHAKKLIIFLNENNVPVQLTSISAPEHKFEGLTQIFQKAYEHEQHISESINNIVDHAIKSKDHATFNFLQWYVAEQHEEEVLFKDILDKIELIGNENHGLYLADQYVKGIAKSRKS

SEQ ID NO: 5147 - protein, 1379 aa, Artificial Sequence
  SARS-CoV-2/USA/NY-NYUMC7/2020__EPI_ISL_418192 spike protein (1-1211)(P715C_P1069C) Ferritin construct
MFVFLVLLPLVSSQCVNLTTRTQLPPAYTNSFTRGVYYPDKVFRSSVLHSTQDLFLPFFSNVTWFHAIHVSGTNGTKRFDNPVLPFNDGVYFASTEKSNIIRGWIFGTTLDSKTQSLLIVNNATNVVIKVCEFQFCNDPFLGVYHHKNNKSWMESEFRVYSSANNCTFEYVSQPFLMDLEGKQGNFKNLREFVFKNIDGYFKIYSKHTPINLVRDLPQGFSALEPLVDLPIGINITRFQTLLALHRSYLTPGDSSSGWTAGAAAYYVGYLQPRTFLLKYNENGTITDAVDCALDPLSETKCTLKSFTVEKGIYQTSNFRVQPTESIVRFPNITNLCPFGEVFNATRFASVYAWNRKRISNCVADYSVLYNSASFSTFKCYGVSPTKLNDLCFTNVYADSFVIRGDEVRQIAPGQTGKIADYNYKLPDDFTGCVIAWNSNNLDSKVGGNYNYLYRLFRKSNLKPFERDISTEIYQAGSTPCNGVEGFNCYFPLQSYGFQPTNGVGYQPYRVVVLSFELLHAPATVCGPKKSTNLVKNKCVNFNFNGLTGTGVLTESNKKFLPFQQFGRDIADTTDAVRDPQTLEILDITPCSFGGVSVITPGTNTSNQVAVLYQGVNCTEVPVAIHADQLTPTWRVYSTGSNVFQTRAGCLIGAEHVNNSYECDIPIGAGICASYQTQTNSPRRARSVASQSIIAYTMSLGAENSVAYSNNSIAICTNFTISVTTEILPVSMTKTSVDCTMYICGDSTECSNLLLQYGSFCTQLNRALTGIAVEQDKNTQEVFAQVKQIYKTPPIKDFGGFNFSQILPDPSKPSKRSFIEDLLFNKVTLADAGFIKQYGDCLGDIAARDLICAQKFNGLTVLPPLLTDEMIAQYTSALLAGTITSGWTFGAGAALQIPFAMQMAYRFNGIGVTQNVLYENQKLIANQFNSAIGKIQDSLSSTASALGKLQDVVNQNAQALNTLVKQLSSNFGAISSVLNDILSRLDKVEAEVQIDRLITGRLQSLQTYVTQQLIRAAEIRASANLAATKMSECVLGQSKRVDFCGKGYHLMSFPQSAPHGVVFLHVTYVCAQEKNFTTAPAICHDGKAHFPREGVFVSNGTHWFVTQRNFYEPQIITTDNTFVSGNCDVVIGIVNNTVYDPLQPELDSFKEELDKYFKNHTSPDVDLGDISGINASVVNIQKEIDRLNEVAKNLNESLIDLQELGKYEQYIKGGGGSDIIKLLNEQVNKEMQSSNLYMSMSSWCYTHSLDGAGLFLFDHAAEEYEHAKKLIIFLNENNVPVQLTSISAPEHKFEGLTQIFQKAYEHEQHISESINNIVDHAIKSKDHATFNFLQWYVAEQHEEEVLFKDILDKIELIGNENHGLYLADQYVKGIAKSRKS

SEQ ID NO: 5148 - protein, 1379 aa, Artificial Sequence
  SARS-CoV-2/Iceland/189/2020__EPI_ISL_417709 spike protein (1-1211)(P715C_P1069C) Ferritin construct
MFVFLVLLPLVSSQCVNLTTRTQLPPAYTNSFTRGVYYPDKVFRSSVLHSTQDLFLPFFSNVTWFHAIHVSGTNGTKRFDNPVLPFNDGVYFASTEKSNIIRGWIFGTTLDSKTQSLLIVNNATNVVIKVCEFQFCNDPFLGVYYHKNNKSWMESEFRVYSSANNCTFEYVSQPFLMDLEGKQGNFKNLREFVFKNIDGYFKIYSKHTPINLVRDLPQGFSALEPLVDLPIGINITRFQTLLALHRSYLTPGDSSSGWTAGAAAYYVGYLQPRTFLLKYNENGTITDAVDCALDPLSETKCTLKSFTVEKGIYQTSNFRVQPTESIVRFPNITNLCPFGEVFNATRFASVYAWNRKRISNCVADYSVLYNSASFSTFKCYGVSPTKLNDLCFTNVYADSFVIRGDEVRQIAPGQTGKIADYNYKLPDDFTGCVIAWNSNNLDSKVGGNYNYLYRLFRKSNLKPFERDISTEIYQAGSTPCNGVEGFNCYFPLQSYGFQPTNGVGYQPYRVVVLSFELLHAPATVCGPKKSTNLVKNKCVNFNFNGLTGTGVLTESNKKFLPFQQFGRDIADTTDAVRDPQTLEILDITPCSFGGVSVITPGTNTSNQVAVLYQGVNCTEVPVAIHADQLTPTWRVYSTGSNVFQTRAGCLIGAEHVNNSYECDIPIGAGICASYQTQTNSPRRARSVASQSIIAYTMSLGAENSVAYSNNSIAICTNFTISVTTEILPVSMTKTSVDCTMYICGDSTECSNLLLQYGSFCTQLNRALTGIAVEQDKNTQEVFAQVKQIYKTPPIKDFGGFNFSQILPDPSKPSKRSFIEDLLFNKVTLADAGFTKQYGDCLGDIAARDLICAQKFNGLTVLPPLLTDEMIAQYTSALLAGTITSGWTFGAGAALQIPFAMQMAYRFNGIGVTQNVLYENQKLIANQFNSAIGKIQDSLSSTASALGKLQDVVNQNAQALNTLVKQLSSNFGAISSVLNDILSRLDKVEAEVQIDRLITGRLQSLQTYVTQQLIRAAEIRASANLAATKMSECVLGQSKRVDFCGKGYHLMSFPQSAPHGVVFLHVTYVCAQEKNFTTAPAICHDGKAHFPREGVFVSNGTHWFVTQRNFYEPQIITTDNTFVSGNCDVVIGIVNNTVYDPLQPELDSFKEELDKYFKNHTSPDVDLGDISGINASVVNIQKEIDRLNEVAKNLNESLIDLQELGKYEQYIKGGGGSDIIKLLNEQVNKEMQSSNLYMSMSSWCYTHSLDGAGLFLFDHAAEEYEHAKKLIIFLNENNVPVQLTSISAPEHKFEGLTQIFQKAYEHEQHISESINNIVDHAIKSKDHATFNFLQWYVAEQHEEEVLFKDILDKIELIGNENHGLYLADQYVKGIAKSRKS

SEQ ID NO: 5149 - protein, 1379 aa, Artificial Sequence
  SARS-CoV-2/Australia/NSW56/2020__EPI_ISL_417408 spike protein (1-1211)(P715C_P1069C) Ferritin construct
MFVFLVLLPLVSSQCVNLTTRTQLPPAYTNSFTRGVYYPDKVFRSSVLHSTQDLFLPFFSNVTWFHAIHVSGTNGTKRFDNPVLPFNDGVYFASTEKSNIIRGWIFGTTLDSKTQSLLIVNNATNVVIKVCEFQFCNDPFLGVYYHKNNKSWMESEFRVYSSANNCTFEYVSQPFLMDLEGKQGNFKNLREFVFKNIDGYFKIYSKHTPINLVRDLPQGFSALEPLVDLPIGINITRFQTLLALHRSYLTPGDSSSGWTAGAAAYYVGYLQPRTFLLKYNENGTITDAVDCALDPLSETKCTLKSFTVEKGIYQTSNFRVQPTESIVRFPNITNLCPFGEVFNATRFASVYAWNRKRISNCVADYSVLYNSASFSTFKCYGVSPTKLNDLCFTNVYADSFVIRGDEVRQIAPGQTGKIADYNYKLPDDFTGCVIAWNSNNLDSKVGGNYNYLYRLFRKSNLKPFERDISTEIYQAGSTPCNGVEGFNCYFPLQSYGFQPTNGVGYQPYRVVVLSFELLHAPATVCGPKKSTNLVKNKCVNFNFNGLTGTGVLTESNKKFLPFQQFGRDIADTTDAVRDPQTLEILDITPCSFGGVSVITPGTNTSNQVAVLYQDVNCTEVPVAIHADQLTPTWRVYSTGSNVFQTRAGCLIGAEHVNNSYECDIPIGAGICASYQTQTNSPRRARSVASQSIIAYTMSLGAENSVAYSNNSIAICTNFTISVTTEILPVSMTKTSVDCTMYICGDSTECSNLLLQYGSFCTQLNRALTGIAVEQDKNTQEVFAQVKQIYKTPPIKDFGGFNFSQILPDSSKPSKRSFIEDLLFNKVTLADAGFIKQYGDCLGDIAARDLICAQKFNGLTVLPPLLTDEMIAQYTSALLAGTITSGWTFGAGAALQIPFAMQMAYRFNGIGVTQNVLYENQKLIANQFNSAIGKIQDSLSSTASALGKLQDVVNQNAQALNTLVKQLSSNFGAISSVLNDILSRLDKVEAEVQIDRLITGRLQSLQTYVTQQLIRAAEIRASANLAATKMSECVLGQSKRVDFCGKGYHLMSFPQSAPHGVVFLHVTYVCAQEKNFTTAPAICHDGKAHFPREGVFVSNGTHWFVTQRNFYEPQIITTDNTFVSGNCDVVIGIVNNTVYDPLQPELDSFKEELDKYFKNHTSPDVDLGDISGINASVVNIQKEIDRLNEVAKNLNESLIDLQELGKYEQYIKGGGGSDIIKLLNEQVNKEMQSSNLYMSMSSWCYTHSLDGAGLFLFDHAAEEYEHAKKLIIFLNENNVPVQLTSISAPEHKFEGLTQIFQKAYEHEQHISESINNIVDHAIKSKDHATFNFLQWYVAEQHEEEVLFKDILDKIELIGNENHGLYLADQYVKGIAKSRKS

SEQ ID NO: 5150 - protein, 1379 aa, Artificial Sequence
  SARS-CoV-2/Iceland/280/2020__EPI_ISL_417608 spike protein (1-1211)(P715C_P1069C) Ferritin construct
MFVFLVLLPLVSSQCVNLTTRTQLPPAYTNSFTRGVYYPDKVFRSSVLHSTQDLFLPFFSNVTWFHAIHVSGTNGTKRFDNPVLPFNDGVYFASTEKSNIIRGWIFGTTLDSKTQSLLIVNNATNVVIKVCEFQFCNDPFLGVYYHKNNKSWMESEFRVYSSANNCTFEYVSQPFLMDLEGKQGNFKNLREFVFKNIDGYFKIYSKHTPINLVRDLPQGFSALEPLVDLPIGINITRFQTLLALHRSYLTPGDSSSGWTAGAAAYYVGYLQPRTFLLKYNENGTITDAVDCALDPLSETKCTLKSFTVEKGIYQTSNFRVQPTESIVRFPNITNLCPFGEVFNATRFASVYAWNRKRISNCVADYSVLYNSASFSTFKCYGVSPTKLNDLCFTNVYADSFVIRGDEVRQIAPGQTGKIADYNYKLPDDFTGCVIAWNSNNLDSKVGGNYNYLYRLFRKSNLKPFERDISTEIYQAGSTPCNGVEGFNCYFPLQSYGFQPTNGVGYQPYRVVVLSFELLHAPATVCGPKKSTNLVKNKCVNFNFNGLTGTGVLTESNKKFLPFQQFGRDIADTTDAVRDPQTLEILDITPCSFGGVSVITPGTNTSNQVAVLYQGVNCTEVPVAIHADQLTPTWRVYSTGSNVFQTRAGCLIGAEHVNNSYECDIPIGAGICASYHTQTNSPRRARSVASQSIIAYTMSLGAENSVAYSNNSIAICTNFTISVTTEILPVSMTKTSVDCTMYICGDSTECSNLLLQYGSFCTQLNRALTGIAVEQDKNTQEVFAQVKQIYKTPPIKDFGGFNFSQILPDPSKPSKRSFIEDLLFNKVTLADAGFIKQYGDCLGDIAARDLICAQKFNGLTVLPPLLTDEMIAQYTSALLAGTITSGWTFGAGAALQIPFAMQMAYRFNGIGVTQNVLYENQKLIANQFNSAIGKIQDSLSSTASALGKLQDVVNQNAQALNTLVKQLSSNFGAISSVLNDILSRLDKVEAEVQIDRLITGRLQSLQTYVTQQLIRAAEIRASANLAATKMSECVLGQSKRVDFCGKGYHLMSFPQSAPHGVVFLHVTYVCAQEKNFTTAPAICHDGKAHFPREGVFVSNGTHWFVTQRNFYEPQIITTDNTFVSGNCDVVIGIVNNTVYDPLQPELDSFKEELDKYFKNHTSPDVDLGDISGINASVVNIQKEIDRLNEVAKNLNESLIDLQELGKYEQYIKGGGGSDIIKLLNEQVNKEMQSSNLYMSMSSWCYTHSLDGAGLFLFDHAAEEYEHAKKLIIFLNENNVPVQLTSISAPEHKFEGLTQIFQKAYEHEQHISESINNIVDHAIKSKDHATFNFLQWYVAEQHEEEVLFKDILDKIELIGNENHGLYLADQYVKGIAKSRKS

SEQ ID NO: 5151 - protein, 1379 aa, Artificial Sequence; identical to SEQ ID NO: 5106
  SARS-CoV-2/Iceland/247/2020__EPI_ISL_417575 spike protein (1-1211)(P715C_P1069C) Ferritin construct

SEQ ID NO: 5152 - protein, 1379 aa, Artificial Sequence
  SARS-CoV-2/Iceland/238/2020__EPI_ISL_417566 spike protein (1-1211)(P715C_P1069C) Ferritin construct
MFVFLVLLPLVSSQCVNLTTRTQLPPAYTNSFTRGVYYPDKVFRSSVLHSTQDLFLPFFSNVTWFHAIHVSGTNGTKRFDNPVLPFNDGVYFASTEKSNIIRGWIFGTTLDSKTQSLLIVNNATNVVIKVCEFQFCNDPFLGVYYHKNNKSWMESEFRVYSSANNCTFEYVSQPFLMDLEGKQGNFKNLREFVFKNIDGYFKIYSKHTPINLVRDLPQGFSALEPLVDLPIGINITRFQTLLALHRSYLTPGDSSSGWTAGAAAYYVGYLQPRTFLLKYNENGTITDAVDCALDPLSETKCTLKSFTVEKGIYQTSNFRVQPTESIVRFPNITNLCPFGEVFNATRFASVYAWNRKRISNCVADYSVLYNSASFSTFKCYGVSPTKLNDLCFTNVYADSFVIRGDEVRQIAPGQTGKIADYNYKLPDDFTGCVIAWNSNNLDSKVGGNYNYLYRLFRKSNLKPFERDISTEIYQAGSTPCNGVEGFNCYFPLQSYGFQPTNGVGYQPYRVVVLSFELLHAPATVCGPKKSTNLVKNKCVNFNFNGLTGTGVLTESNKKFLPFQQFGRDIADTTDAVRDPQTLEILDITPCSFGGVSVITPGTNTSNQVAVLYQGVNCTEVPVAIHADQLTPTWRVYSTGSNVFQTRAGCLIGAEHVNNSYECDIPIGAGICASYQTQTNSPRRARSVASQSIIAYTMSLGAENSVAYSNNSIAICTNFTISVTTEILPVSMTKTSVDCTMYICGDSTECSNLLLQYGSFCTQLNRALTGIAVEQDKNTQEVFAQVKQIYKTPPIKDFGGFNFSQILPDPSKPSKRSFIEDLLFNKVTLADVGFIKQYGDCLGDIAARDLICAQKFNGLTVLPPLLTDEMIAQYTSALLAGTITSGWTFGAGAALQIPFAMQMAYRFNGIGVTQNVLYENQKLIANQFNSAIGKIQDSLSSTASALGKLQDVVNQNAQALNTLVKQLSSNFGAISSVLNDILSRLDKVEAEVQIDRLITGRLQSLQTYVTQQLIRAAEIRASANLAATKMSECVLGQSKRVDFCGKGYHLMSFPQSAPHGVVFLHVTYVCAQEKNFTTAPAICHDGKAHFPREGVFVSNGTHWFVTQRNFYEPQIITTDNTFVSGNCDVVIGIVNNTVYDPLQPELDSFKEELDKYFKNHTSPDVDLGDISGINASVVNIQKEIDRLNEVAKNLNESLIDLQELGKYEQYIKGGGGSDIIKLLNEQVNKEMQSSNLYMSMSSWCYTHSLDGAGLFLFDHAAEEYEHAKKLIIFLNENNVPVQLTSISAPEHKFEGLTQIFQKAYEHEQHISESINNIVDHAIKSKDHATFNFLQWYVAEQHEEEVLFKDILDKIELIGNENHGLYLADQYVKGIAKSRKS

SEQ ID NO: 5153 - protein, 1379 aa, Artificial Sequence
  SARS-CoV-2/Greece/16/2020__EPI_ISL_418265 spike protein (1-1211)(P715C_P1069C) Ferritin construct
MFVFLVLLPLVSSQCVNLTTRTQLPPAYTNSFTRGVYYPDKVFRSSVLHSTQDLFLPFFSNVTWFHAIHVSGTNGTKRFDNPVLPFNDGVYFASTEKSNIIRGWIFGTTLDSKTQSLLIVNNATNVVIKVCEFQFCNDPFLGVYYHKNNKSWMESEFRVYSSANNCTFEYVSQPFLMDLEGKQGNFKNLREFVFKNVDGYFKIYSKHTPINLVRDLPQGFSALEPLVDLPIGINITRFQTLLALHRSYLTPGDSSSGWTAGAAAYYVGYLQPRTFLLKYNENGTITDAVDCALDPLSETKCTLKSFTVEKGIYQTSNFRVQPTESIVRFPNITNLCPFGEVFNATRFASVYAWNRKRISNCVADYSVLYNSASFSTFKCYGVSPTKLNDLCFTNVYADSFVIRGDEVRQIAPGQTGKIADYNYKLPDDFTGCVIAWNSNNLDSKVGGNYNYLYRLFRKSNLKPFERDISTEIYQAGSTPCNGVEGFNCYFPLQSYGFQPTNGVGYQPYRVVVLSFELLHAPATVCGPKKSTNLVKNKCVNFNFNGLTGTGVLTESNKKFLPFQQFGRDIADTTDAVRDPQTLEILDITPCSFGGVSVITPGTNTSNQVAVLYQDVNCTEVPVAIHADQLTPTWRVYSTGSNVFQTRAGCLIGAEHVNNSYECDIPIGAGICASYQTQTNSPRRARSVASQSIIAYTMSLGAENSVAYSNNSIAICTNFTISVTTEILPVSMTKTSVDCTMYICGDSTECSNLLLQYGSFCTQLNRALTGIAVEQDKNTQEVFAQVKQIYKTPPIKDFGGFNFSQILPDPSKPSKRSFIEDLLFNKVTLADAGFIKQYGDCLGDIAARDLICAQKFNGLTVLPPLLTDEMIAQYTSALLAGTITSGWTFGAGAALQIPFAMQMAYRFNGIGVTQNVLYENQKLIANQFNSAIGKIQDSLSSTASALGKLQDVVNQNAQALNTLVKQLSSNFGAISSVLNDILSRLDKVEAEVQIDRLITGRLQSLQTYVTQQLIRAAEIRASANLAATKMSECVLGQSKRVDFCGKGYHLMSFPQSAPHGVVFLHVTYVCAQEKNFTTAPAICHDGKAHFPREGVFVSNGTHWFVTQRNFYEPQIITTDNTFVSGNCDVVIGIVNNTVYDPLQPELDSFKEELDKYFKNHTSPDVDLGDISGINASVVNIQKEIDRLNEVAKNLNESLIDLQELGKYEQYIKGGGGSDIIKLLNEQVNKEMQSSNLYMSMSSWCYTHSLDGAGLFLFDHAAEEYEHAKKLIIFLNENNVPVQLTSISAPEHKFEGLTQIFQKAYEHEQHISESINNIVDHAIKSKDHATFNFLQWYVAEQHEEEVLFKDILDKIELIGNENHGLYLADQYVKGIAKSRKS

SEQ ID NO: 5154 - protein, 1379 aa, Artificial Sequence
  SARS-CoV-2/Iceland/319/2020__EPI_ISL_417648 spike protein (1-1211)(P715C_P1069C) Ferritin construct
MFVFLVLLPLVSSQCVNLTTRTQLPPAYTNSFTRGVYYPDKVFRSSVLHSTQDLFLPFFSNVTWFHAIHVSGTNGTKRFDNPVLPFNDGVYFASTEKSNIIRGWIFGTTLDSKTQSLLIVNNATNVVIKVCEFQFCNDPFLGVYYHKNNKSWMESEFRVYSSANNCTFEYVSQPFLIDLEGKQGNFKNLREFVFKNIDGYFKIYSKHTPINLVRDLPQGFSALEPLVDLPIGINITRFQTLLALHRSYLTPGDSSSGWTAGAAAYYVGYLQPRTFLLKYNENGTITDAVDCALDPLSETKCTLKSFTVEKGIYQTSNFRVQPTESIVRFPNITNLCPFGEVFNATRFASVYAWNRKRISNCVADYSVLYNSASFSTFKCYGVSPTKLNDLCFTNVYADSFVIRGDEVRQIAPGQTGKIADYNYKLPDDFTGCVIAWNSNNLDSKVGGNYNYLYRLFRKSNLKPFERDISTEIYQAGSTPCNGVEGFNCYFPLQSYGFQPTNGVGYQPYRVVVLSFELLHAPATVCGPKKSTNLVKNKCVNFNFNGLTGTGVLTESNKKFLPFQQFGRDIADTTDAVRDPQTLEILDITPCSFGGVSVITPGTNTSNQVAVLYQGVNCTEVPVAIHADQLTPTWRVYSTGSNVFQTRAGCLIGAEHVNNSYECDIPIGAGICASYQTQTNSPRRARSVASQSIIAYTMSLGAENSVAYSNNSIAICTNFTISVTTEILPVSMTKTSVDCTMYICGDSTECSNLLLQYGSFCTQLNRALTGIAVEQDKNTQEVFAQVKQIYKTPPIKDFGGFNFSQILPDPSKPSKRSFIEDLLFNKVTLADAGFIKQYGDCLGDIAARDLICAQKFNGLTVLPPLLTDEMIAQYTSALLAGTITSGWTFGAGAALQIPFAMQMAYRFNGIGVTQNVLYENQKLIANQFNSAIGKIQDSLSSTASALGKLQDVVNQNAQALNTLVKQLSSNFGAISSVLNDILSRLDKVEAEVQIDRLITGRLQSLQTYVTQQLIRAAEIRASANLAATKMSECVLGQSKRVDFCGKGYHLMSFPQSAPHGVVFLHVTYVCAQEKNFTTAPAICHDGKAHFPREGVFVSNGTHWFVTQRNFYEPQIITTDNTFVSGNCDVVIGIVNNTVYDPLQPELDSFKEELDKYFKNHTSPDVDLGDISGINASVVNIQKEIDRLNEVAKNLNESLIDLQELGKYEQYIKGGGGSDIIKLLNEQVNKEMQSSNLYMSMSSWCYTHSLDGAGLFLFDHAAEEYEHAKKLIIFLNENNVPVQLTSISAPEHKFEGLTQIFQKAYEHEQHISESINNIVDHAIKSKDHATFNFLQWYVAEQHEEEVLFKDILDKIELIGNENHGLYLADQYVKGIAKSRKS

SEQ ID NO: 5155 - protein, 1379 aa, Artificial Sequence
  SARS-CoV-2/Congo/94/2020__EPI_ISL_417947 spike protein (1-1211)(P715C_P1069C) Ferritin construct
MFVFLVLLPLVSSQCVNLTTRTQLPPAYTNSFTRGVYYPDKVFRSSVLHSTQDLFLPFFSNVTWFHAIHVSGTNGTKRFDNPVLPFNDGVYFASTEKSNIIRGWIFGTTLDSKTQSLLIVNNATNVVIKVCEFQFCNDPFLGVYYHKNNKSWMESEFRVYSSANNCTFEYVSQPFLMDLEGKQGNFKNLREFVFKNIDGYFKIYSKHTPINLVRDLPQGFSALEPLVDLPIGINITRFQTLLALHRSYLTPGDSSSGWTAGAAAYYVGYLQPRTFLLKYNENGTITDAVDCALDPLSETKCTLKSFTVEKGIYQTSNFRVQPTESIVRFPNITNLCPFGEVFNATRFASVYAWNRKRISNCVADYSVLYNSASFSTFKCYGVSPTKLNDLCFTNVYADSFVIRGDEVRQIAPGQTGKIADYNYKLPDDFTGCVIAWNSNNLDSKVGGNYNYLYRLFRKSNLKPFERDISTEIYQAGSTPCNGVEGFNCYFPLQSYGFQPTNGVGYQPYRVVVLSFELLHAPATVCGPKKSTNLVKNKCVNFNFNGLTGTGVLTESNKKFLPFQQFGRDIADTTDAVRDPQTLEILDITPCSFGGVSVITPGTNTSNQVAVLYQGVNCTEVPVAIHADQLTPTWRVYSTGSNVFQTRAGCLIGAEHVNNSYECDIPIGAGICASYQTQTNSPRRARSVASQSIIAYTMSLGAENSVAYSNNSIAICTNFTISVTTEILPVSMTKTSVDCTMYICGDSTECSNLLLQYGSFCTQLNRALTGIAVEQDKNTQEVFAQVKQIYKTPPIKDFGGFNFSQILPDPSKPSKRSFIEDILFNKVTLADAGFIKQYGDCLGDIAARDLICAQKFNGLTVLPPLLTDEMIAQYTSALLAGTITSGWTFGAGAALQIPFAMQMAYRFNGIGVTQNVLYENQKLIANQFNSAIGKIQDSLSSTASALGKLQDVVNQNAQALNTLVKQLSSNFGAISSVLNDILSRLDKVEAEVQIDRLITGRLQSLQTYVTQQLIRAAEIRASANLAATKMSECVLGQSKRVDFCGKGYHLMSFPQSAPHGVVFLHVTYVCAQEKNFTTAPAICHDGKAHFPREGVFVSNGTHWFVTQRNFYEPQIITTDNTFVSGNCDVVIGIVNNTVYDPLQPELDSFKEELDKYFKNHTSPDVDLGDISGINASVVNIQKEIDRLNEVAKNLNESLIDLQELGKYEQYIKGGGGSDIIKLLNEQVNKEMQSSNLYMSMSSWCYTHSLDGAGLFLFDHAAEEYEHAKKLIIFLNENNVPVQLTSISAPEHKFEGLTQIFQKAYEHEQHISESINNIVDHAIKSKDHATFNFLQWYVAEQHEEEVLFKDILDKIELIGNENHGLYLADQYVKGIAKSRKS

SEQ ID NO: 5156 - protein, 1379 aa, Artificial Sequence
  SARS-CoV-2/Congo/158/2020__EPI_ISL_417950 spike protein (1-1211)(P715C_P1069C) Ferritin construct
MFVFLVLLPLVSSQCVNLTTRTQLPPAYTNSFTRGVYYPDKVFRSSVLHSTQDLFLPFFSNVTWFHAIHVSGTNGTKRFDNPVLPFNDGVYFASTEKSNIIRGWIFGTTLDSKTQSLLIVNNATNVVIKVCEFQFCNDPFLGVYYHKNNKSWMESEFRVYSSANNCTFEYVSQPFLMDLEGKQGNFKNLREFVFKNIDGYFKIYSKHTPINLVRDLPQGFSALEPLVDLPIGINITRFQTLLALHRSYLTPGDSSSGWTAGAAAYYVGYLQPRTFLLKYNENGTITDAVDCALDPLSETKCTLKSFTVEKGIYQTSNFRVQPTESIVRFPNITNLCPFGEVFNATRFASVYAWNRKRISNCVADYSVLYNSASFSTFKCYGVSPTKLNDLCFTNVYADSFVIRGDEVRQIAPGQTGKIADYNYKLPDDFTGCVIAWNSNNLDSKVGGNYNYLYRLFRKSNLKPFERDISTEIYQAGSTPCNGVEGFNCYFPLQSYGFQPTNGVGYQPYRVVVLSFELLHAPATVCGPKKSTNLVKNKCVNFNFNGLTGTGVLTESNKKFLPFQQFGRDIADTTDAVRDPQTLEILDITPCSFGGVSVITPGTNTSNQVAVLYQDVNCTEVPVAIHADQLTPTWRVYSTGSNVFQTRAGCLIGAEHVNNSYECDIPIGAGICASYQTQTNSPRRARSVASQSIIAYTMSLGAENSVAYSNNSIAICTNFTISVTTEILPVSMTKTSVDCTMYICGDSTECSNLLLQYGSFCTQLNRALTGIAVEQDKNTQEVFAQVKQIYKTPPIKDFGGFNFSQILPDPSKPSKRSFIEDLLFNKVTLADAGFIKQYGDCLGDIAARDLICAQKFNGLTVLPPLLTDEMIAQYTSALLAGTITSGWTFGAGAALQIPFAMQMAYRFNGIGVTQNVLYENQKLIANQFNSAIGKIQDSLSSTASALGKLQDVVNQNAQALNTLVKQLSSNFGAISSVLNDILSRLDKVEAEVQIDRLITGRLQSLQTYVTQQLIRAAEIRASANLAATKMSECVLGQSKRVDFCGKGYHLMSFPQSAPHGVVFLHVTYVCAQEKNFTTAPAICHDGKAHFPREGVFVSNGTHWFVTQRNFYEPQIITTDNTFLSGNCDVVIGIVNNTVYDPLQPELDSFKEELDKYFKNHTSPDVDLGDISGINASVVNIQKEIDRLNEVAKNLNESLIDLQELGKYEQYIKGGGGSDIIKLLNEQVNKEMQSSNLYMSMSSWCYTHSLDGAGLFLFDHAAEEYEHAKKLIIFLNENNVPVQLTSISAPEHKFEGLTQIFQKAYEHEQHISESINNIVDHAIKSKDHATFNFLQWYVAEQHEEEVLFKDILDKIELIGNENHGLYLADQYVKGIAKSRKS

SEQ ID NO: 5157 - protein, 1379 aa, Artificial Sequence
  SARS-CoV-2/USA/UT-00034/2020__EPI_ISL_417977 spike protein (1-1211)(P715C_P1069C) Ferritin construct
MFVFLVLLPLVSSQCVNLTTRTQLPPAYTNSFTRGVYYPDKVFRSSVLHSTQDLFLPFFSNVTWFHAIHVSGTNGTKRFDNPVLPFNDGVYFASTEKSNIIRGWIFGTTLDSKTQSLLIVNNATNVVIKVCEFQFCNDPFLGVYYYKNNKSWMESEFRVYSSANNCTFEYVSQPFLMDLEGKQGNFKNLREFVFKNIDGYFKIYSKHTPINLVRDLPQGFSALEPLVDLPIGINITRFQTLLALHRSYLTPGDSSSGWTAGAAAYYVGYLQPRTFLLKYNENGTITDAVDCALDPLSETKCTLKSFTVEKGIYQTSNFRVQPTESIVRFPNITNLCPFGEVFNATRFASVYAWNRKRISNCVADYSVLYNSASFSTFKCYGVSPTKLNDLCFTNVYADSFVIRGDEVRQIAPGQTGKIADYNYKLPDDFTGCVIAWNSNNLDSKVGGNYNYLYRLFRKSNLKPFERDISTEIYQAGSTPCNGVEGFNCYFPLQSYGFQPTNGVGYQPYRVVVLSFELLHAPATVCGPKKSTNLVKNKCVNFNFNGLTGTGVLTESNKKFLPFQQFGRDIADTTDAVRDPQTLEILDITPCSFGGVSVITPGTNTSNQVAVLYQGVNCTEVPVAIHADQLTPTWRVYSTGSNVFQTRAGCLIGAEHVNNSYECDIPIGAGICASYQTQTNSPRRARSVASQSIIAYTMSLGAENSVAYSNNSIAICTNFTISVTTEILPVSMTKTSVDCTMYICGDSTECSNLLLQYGSFCTQLNRALTGIAVEQDKNTQEVFAQVKQIYKTPPIKDFGGFNFSQILPDPSKPSKRSFIEDLLFNKVTLADAGFIKQYGDCLGDIAARDLICAQKFNGLTVLPPLLTDEMIAQYTSALLAGTITSGWTFGAGAALQIPFAMQMAYRFNGIGVTQNVLYENQKLIANQFNSAIGKIQDSLSSTASALGKLQDVVNQNAQALNTLVKQLSSNFGAISSVLNDILSRLDKVEAEVQIDRLITGRLQSLQTYVTQQLIRAAEIRASANLAATKMSECVLGQSKRVDFCGKGYHLMSFPQSAPHGVVFLHVTYVCAQEKNFTTAPAICHDGKAHFPREGVFVSNGTHWFVTQRNFYEPQIITTDNTFVSGNCDVVIGIVNNTVYDPLQPELDSFKEELDKYFKNHTSPDVDLGDISGINASVVNIQKEIDRLNEVAKNLNESLIDLQELGKYEQYIKGGGGSDIIKLLNEQVNKEMQSSNLYMSMSSWCYTHSLDGAGLFLFDHAAEEYEHAKKLIIFLNENNVPVQLTSISAPEHKFEGLTQIFQKAYEHEQHISESINNIVDHAIKSKDHATFNFLQWYVAEQHEEEVLFKDILDKIELIGNENHGLYLADQYVKGIAKSRKS

SEQ ID NO: 5158 - protein, 1379 aa, Artificial Sequence
  SARS-CoV-2/USA/UT-00033/2020__EPI_ISL_417976 spike protein (1-1211)(P715C_P1069C) Ferritin construct
MFVFLVLLPLVSSQCVNLTTRTQLPPAYTNSFTRGVYYPDKVFRSSVLHSTQDLFLPFFSNVTWFHAIHVSGTNGTKRFDNPVLPFNDGVYFASTEKSNIIRGWIFGTTLDSKTQSLLIVNNATNVVIKVCEFQFCNDPFLGVYYHKNNKSWMESEFRVYSSANNCTFEYVSQPFLMDLEGKQGNFKNLREFVFKNIDGYFKIYSKHTPINLVRDLPQGFSALEPLVDLPIGINITRFQTLLALHRSYLTPGDSSSGLTAGAAAYYVGYLQPRTFLLKYNENGTITDAVDCALDPLSETKCTLKSFTVEKGIYQTSNFRVQPTESIVRFPNITNLCPFGEVFNATRFASVYAWNRKRISNCVADYSVLYNSASFSTFKCYGVSPTKLNDLCFTNVYADSFVIRGDEVRQIAPGQTGKIADYNYKLPDDFTGCVIAWNSNNLDSKVGGNYNYLYRLFRKSNLKPFERDISTEIYQAGSTPCNGVEGFNCYFPLQSYGFQPTNGVGYQPYRVVVLSFELLHAPATVCGPKKSTNLVKNKCVNFNFNGLTGTGVLTESNKKFLPFQQFGRDIADTTDAVRDPQTLEILDITPCSFGGVSVITPGTNTSNQVAVLYQGVNCTEVPVAIHADQLTPTWRVYSTGSNVFQTRAGCLIGAEHVNNSYECDIPIGAGICASYQTQTNSPRRARSVASQSIIAYTMSLGAENSVAYSNNSIAICTNFTISVTTEILPVSMTKTSVDCTMYICGDSTECSNLLLQYGSFCTQLNRALTGIAVEQDKNTQEVFAQVKQIYKTPPIKDFGGFNFSQILPDPSKPSKRSFIEDLLFNKVTLADAGFIKQYGDCLGDIAARDLICAQKFNGLTVLPPLLTDEMIAQYTSALLAGTITSGWTFGAGAALQIPFAMQMAYRFNGIGVTQNVLYENQKLIANQFNSAIGKIQDSLSSTASALGKLQDVVNQNAQALNTLVKQLSSNFGAISSVLNDILSRLDKVEAEVQIDRLITGRLQSLQTYVTQQLIRAAEIRASANLAATKMSECVLGQSKRVDFCGKGYHLMSFPQSAPHGVVFLHVTYVCAQEKNFTTAPAICHDGKAHFPREGVFVSNGTHWFVTQRNFYEPQIITTDNTFVSGNCDVVIGIVNNTVYDPLQPELDSFKEELDKYFKNHTSPDVDLGDISGINASVVNIQKEIDRLNEVAKNLNESLIDLQELGKYEQYIKGGGGSDIIKLLNEQVNKEMQSSNLYMSMSSWCYTHSLDGAGLFLFDHAAEEYEHAKKLIIFLNENNVPVQLTSISAPEHKFEGLTQIFQKAYEHEQHISESINNIVDHAIKSKDHATFNFLQWYVAEQHEEEVLFKDILDKIELIGNENHGLYLADQYVKGIAKSRKS

SEQ ID NO: 5159 - protein, 1379 aa, Artificial Sequence
  SARS-CoV-2/USA/WI-13/2020__EPI_ISL_417516 spike protein (1-1211)(P715C_P1069C) Ferritin construct
MFVFLVLLPLVSSQCVNLTTRTQLPPAYTNSFTRGVYYPDKVFRSSVLHSTQDLFLPFFSNVTWFHAIHVSGTNGTKRFDNPVLPFNDGVYFASTEKSNIIRGWIFGTTLDSKTQSLLIVNNATNVVIKVCEFQFCNDPFLGVYYHKNNKSWMESEFRVYSSANNCTFEYVSQPFLMDLEGKQGNFKNLREFVFKNIDGYFKIYSKHTPINLVRDLPQGFSALEPLVDLPIGINITRFQTLLALHRSYLTPGDSSSGWTAGAAAYYVGYLQPRTFLLKYNENGTITDAVDCALDPLSETKCTLKSFTVEKGIYQTSNFRVLPTESIVRFPNITNLCPFGEVFNATRFASVYAWNRKRISNCVADYSVLYNSASFSTFKCYGVSPTKLNDLCFTNVYADSFVIRGDEVRQIAPGQTGKIADYNYKLPDDFTGCVIAWNSNNLDSKVGGNYNYLYRLFRKSNLKPFERDISTEIYQAGSTPCNGVEGFNCYFPLQSYGFQPTNGVGYQPYRVVVLSFELLHAPATVCGPKKSTNLVKNKCVNFNFNGLTGTGVLTESNKKFLPFQQFGRDIADTTDAVRDPQTLEILDITPCSFGGVSVITPGTNTSNQVAVLYQGVNCTEVPVAIHADQLTPTWRVYSTGSNVFQTRAGCLIGAEHVNNSYECDIPIGAGICASYQTQTNSPRRARSVASQSIIAYTMSLGAENSVAYSNNSIAICTNFTISVTTEILPVSMTKTSVDCTMYICGDSTECSNLLLQYGSFCTQLNRALTGIAVEQDKNTQEVFAQVKQIYKTPPIKDFGGFNFSQILPDPSKPSKRSFIEDLLFNKVTLADAGFIKQYGDCLGDIAARDLICAQKFNGLTVLPPLLTDEMIAQYTSALLAGTITSGWTFGAGAALQIPFAMQMAYRFNGIGVTQNVLYENQKLIANQFNSAIGKIQDSLSSTASALGKLQDVVNQNAQALNTLVKQLSSNFGAISSVLNDILSRLDKVEAEVQIDRLITGRLQSLQTYVTQQLIRAAEIRASANLAATKMSECVLGQSKRVDFCGKGYHLMSFPQSAPHGVVFLHVTYVCAQEKNFTTAPAICHDGKAHFPREGVFVSNGTHWFVTQRNFYEPQIITTDNTFVSGNCDVVIGIVNNTVYDPLQPELDSFKEELDKYFKNHTSPDVDLGDISGINASVVNIQKEIDRLNEVAKNLNESLIDLQELGKYEQYIKGGGGSDIIKLLNEQVNKEMQSSNLYMSMSSWCYTHSLDGAGLFLFDHAAEEYEHAKKLIIFLNENNVPVQLTSISAPEHKFEGLTQIFQKAYEHEQHISESINNIVDHAIKSKDHATFNFLQWYVAEQHEEEVLFKDILDKIELIGNENHGLYLADQYVKGIAKSRKS

SEQ ID NO: 5160 - protein, 1378 aa, Artificial Sequence
  SARS-CoV-2/India/1-27/2020__EPI_ISL_413522 spike protein (1-1210)(P714C_P1068C) Ferritin construct
MFVFLVLLPLVSSQCVNLTTRTQLPPAYTNSFTRGVYYPDKVFRSSVLHSTQDLFLPFFSNVTWFHAIHVSGTNGTKRFDNPVLPFNDGVYFASTEKSNIIRGWIFGTTLDSKTQSLLIVNNATNVVIKVCEFQFCNDPFLGVYHKNNKSWMESEFRVYSSANNCTFEYVSQPFLMDLEGKQGNFKNLREFVFKNIDGYFKIYSKHTPINLVRDLPQGFSALEPLVDLPIGINITRFQTLLALHRSYLTPGDSSSGWTAGAAAYYVGYLQPRTFLLKYNENGTITDAVDCALDPLSETKCTLKSFTVEKGIYQTSNFRVQPTESIVRFPNITNLCPFGEVFNATRFASVYAWNRKRISNCVADYSVLYNSASFSTFKCYGVSPTKLNDLCFTNVYADSFVIRGDEVIQIAPGQTGKIADYNYKLPDDFTGCVIAWNSNNLDSKVGGNYNYLYRLFRKSNLKPFERDISTEIYQAGSTPCNGVEGFNCYFPLQSYGFQPTNGVGYQPYRVVVLSFELLHAPATVCGPKKSTNLVKNKCVNFNFNGLTGTGVLTESNKKFLPFQQFGRDIADTTDAVRDPQTLEILDITPCSFGGVSVITPGTNTSNQVAVLYQDVNCTEVPVAIHADQLTPTWRVYSTGSNVFQTRAGCLIGAEHVNNSYECDIPIGAGICASYQTQTNSPRRARSVASQSIIAYTMSLGAENSVAYSNNSIAICTNFTISVTTEILPVSMTKTSVDCTMYICGDSTECSNLLLQYGSFCTQLNRALTGIAVEQDKNTQEVFAQVKQIYKTPPIKDFGGFNFSQILPDPSKPSKRSFIEDLLFNKVTLADAGFIKQYGDCLGDIAARDLICAQKFNGLTVLPPLLTDEMIAQYTSALLAGTITSGWTFGAGAALQIPFAMQMAYRFNGIGVTQNVLYENQKLIANQFNSAIGKIQDSLSSTASALGKLQDVVNQNAQALNTLVKQLSSNFGAISSVLNDILSRLDKVEAEVQIDRLITGRLQSLQTYVTQQLIRAAEIRASANLAATKMSECVLGQSKRVDFCGKGYHLMSFPQSAPHGVVFLHVTYVCAQEKNFTTAPAICHDGKAHFPREGVFVSNGTHWFVTQRNFYEPQIITTDNTFVSGNCDVVIGIVNNTVYDPLQPELDSFKEELDKYFKNHTSPDVDLGDISGINASVVNIQKEIDRLNEVAKNLNESLIDLQELGKYEQYIKGGGGSDIIKLLNEQVNKEMQSSNLYMSMSSWCYTHSLDGAGLFLFDHAAEEYEHAKKLIIFLNENNVPVQLTSISAPEHKFEGLTQIFQKAYEHEQHISESINNIVDHAIKSKDHATFNFLQWYVAEQHEEEVLFKDILDKIELIGNENHGLYLADQYVKGIAKSRKS

SEQ ID NO: 5161 - protein, 1373 aa, Artificial Sequence
  SARS-CoV-2/pangolin/Guangxi/P4L/2017__EPI_ISL_410538 spike protein (1-1205)(P709C_P1063C) Ferritin construct
MFVFLFVLPLVSSQCVNLTTRTGIPPGYTNSSTRGVYYPDKVFRSSILHLTQDLFLPFFSNVTWFNTINYQGGFKKFDNPVLPFNDGVYFASTEKSNIIRGWIFGTTLDARTQSLLIVNNATNVVIKVCEFQFCTDPFLGVYYHNNNKTWVENEFRVYSSANNCTFEYISQPFLMDLEGKQGNFKNLREFVFKNVDGYFKIYSKHTPIDLVRDLPRGFAALEPLVDLPIGINITRFQTLLALHRSYLTPGNLESGWTTGAAAYYVGYLQQRTFLLSYNQNGTITDAVDCSLDPLSETKCTLKSLTVEKGIYQTSNFRVQPTISIVRFPNITNLCPFGEVFNASKFASVYAWNRKRISNCVADYSVLYNSTSFSTFKCYGVSPTKLNDLCFTNVYADSFVVKGDEVRQIAPGQTGVIADYNYKLPDDFTGCVIAWNSVKQDALTGGNYGYLYRLFRKSKLKPFERDISTEIYQAGSTPCNGQVGLNCYYPLERYGFHPTTGVNYQPFRVVVLSFELLNGPATVCGPKLSTTLVKDKCVNFNFNGLTGTGVLTTSKKQFLPFQQFGRDISDTTDAVRDPQTLEILDITPCSFGGVSVITPGTNTSNQVAVLYQDVNCTEVPMAIHAEQLTPAWRVYSAGANVFQTRAGCLVGAEHVNNSYECDIPVGAGICASYHSMSSLRSVNQRSIIAYTMSLGAENSVAYSNNSIAICTNFTISVTTEILPVSMTKTSVDCTMYICGDSIECSNLLLQYGSFCTQLNRALTGIAVEQDKNTQEVFAQVKQIYKTPPIKDFGGFNFSQILPDPSKPSKRSFIEDLLFNKVTLADAGFIKQYGDCLGDIAARDLICAQKFNGLTVLPPLLTDEMIAQYTSALLAGTITSGWTFGAGAALQIPFAMQMAYRFNGIGVTQNVLYENQKLIANQFNSAIGKIQDSLSSTASALGKLQDVVNQNAQALNTLVKQLSSNFGAISSVLNDILSRLDKVEAEVQIDRLITGRLQSLQTYVTQQLIRAAEIRASANLAATKMSECVLGQSKRVDFCGKGYHLMSFPQSAPHGVVFLHVTYVCAQEKNFTTAPAICHEGKAHFPREGVFVSNGTHWFITQRNFYEPQIITTDNTFVSGSCDVVIGIVNNTVYDPLQPELDSFKEELDKYFKNHTSPDVDLGDISGINASVVNIQKEIDRLNEVAKNLNESPIDLQELGKYEQYIKGGGGSDIIKLLNEQVNKEMQSSNLYMSMSSWCYTHSLDGAGLFLFDHAAEEYEHAKKLIIFLNENNVPVQLTSISAPEHKFEGLTQIFQKAYEHEQHISESINNIVDHAIKSKDHATFNFLQWYVAEQHEEEVLFKDILDKIELIGNENHGLYLADQYVKGIAKSRKS

SEQ ID NO: 5162 - protein, 1373 aa, Artificial Sequence
  SARS-CoV-2/pangolin/Guangxi/P5L/2017__EPI_ISL_410540 spike protein (1-1205)(P709C_P1063C) Ferritin construct
MFVFLFVLPLVSSQCVNLTTRTGIPPGYTNSSTRGVYYPDKVFRSSILHLTQDLFLPFFSNVTWFNTINYQGGFKKFDNPVLPFNDGVYFASTEKSNIIRGWIFGTTLDARTQSLLIVNNATNVVIKVCEFQFCTDPFLGVYYHNNNKTWVENEFRVYSSANNCTFEYISQPFLMDLEGKQGNFKNLREFVFKNVDGYFKIYSKHTPIDLVRDLPRGFAALEPLVDLPIGINITRFQTLLALHRSYLTPGKLESGWTTGAAAYYVGYLQQRTFLLSYNQNGTITDAVDCSLDPLSETKCTLKSLTVEKGIYQTSNFRVQPTISIVRFPNITNLCPFGEVFNASKFASVYAWNRKRISNCVADYSVLYNSTSFSTFKCYGVSPTKLNDLCFTNVYADSFVVKGDEVRQIAPGQTGVIADYNYKLPDDFTGCVIAWNSVKQDALTGGNYGYLYRLFRKSKLKPFERDISTEIYQAGSTPCNGQVGLNCYYPLERYGFHPTTGVNYQPFRVVVLSFELLNGPATVCGPKLSTTLVKDKCVNFNFNGLTGTGVLTTSKKQFLPFQQFGRDISDTTDAVRDPQTLEILDITPCSFGGVSVITPGTNTSNQVAVLYQDVNCTEVPMAIHAEQLTPAWRVYSAGANVFQTRAGCLVGAEHVNNSYECDIPVGAGICASYHSMSSFRSVNQRSIIAYTMSLGAENSVAYSNNSIAICTNFTISVTTEILPVSMTKTSVDCTMYICGDSIECSNLLLQYGSFCTQLNRALTGIAVEQDKNTQEVFAQVKQIYKTPPIKDFGGFNFSQILPDPSKPSKRSFIEDLLFNKVTLADAGFIKQYGDCLGDIAARDLICAQKFNGLTVLPPLLTDEMIAQYTSALLAGTITSGWTFGAGAALQIPFAMQMAYRFNGIGVTQNVLYENQKLIANQFNSAIGKIQDSLSSTASALGKLQDVVNQNAQALNTLVKQLSSNFGAISSVLNDILSRLDKVEAEVQIDRLITGRLQSLQTYVTQQLIRAAEIRASANLAATKMSECVLGQSKRVDFCGKGYHLMSFPQSAPHGVVFLHVTYVCAQEKNFTTAPAICHEGKAHFPREGVFVSNGTHWFITQRNFYEPQIITTDNTFVSGSCDVVIGIVNNTVYDPLQPELDSFKEELDKYFKNHTSPDVDLGDISGINASVVNIQKEIDRLNEVAKNLNESLIDLQELGKYEQYIKGGGGSDIIKLLNEQVNKEMQSSNLYMSMSSWCYTHSLDGAGLFLFDHAAEEYEHAKKLIIFLNENNVPVQLTSISAPEHKFEGLTQIFQKAYEHEQHISESINNIVDHAIKSKDHATFNFLQWYVAEQHEEEVLFKDILDKIELIGNENHGLYLADQYVKGIAKSRKS

SEQ ID NO: 5163 - protein, 1373 aa, Artificial Sequence
  SARS-CoV-2/pangolin/Guangxi/P5E/2017__EPI_ISL_410541 spike protein (1-1205)(P709C_P1063C) Ferritin construct
MFVFLFVLPLVSSQCVNLTTRTGIPPGYTNSSTRGVYYPDKVFRSSILHLTQDLFLPFFSNVTWFNTITYQGGSKKFDNPVLPFNDGVYFASTEKSNIIRGWIFGTTLDARTQSLLIVNNATNVVIKVCEFQFCTDPFLGVYYHNNNKTWVENEFRVYSSANNCTFEYISQPFLMDLEGKQGNFKNLREFVFKNVDGYFKIYSKHTPIDLVRDLPRGFAALEPLVDLPIGINITRFQTLLALHRSYLTPGKLESGWTTGAAAYYVGYLQQRTFLLSYNQNGTITDAVDCSLDPLSETKCTLKSLTVEKGIYQTSNFRVQPTISIVRFPNITNLCPFGEVFNASKFASVYAWNRKRISNCVADYSVLYNSTSFSTFKCYGVSPTKLNDLCFTNVYADSFVVKGDEVRQIAPGQTGVIADYNYKLPDDFTGCVIAWNSVKQDALTGDNYGYLYRLFRKSKLKPFERDISTEIYQAGSTPCNGQVGLNCYYPLERYGFHPTTGVNYQPFRVVVLSFELLNGPATVCGPKLSTTLVKDKCVNFNFNGLTGTGVLTTSKKQFLPFQQFGRDISDTTDAVRDPQTLEILDITPCSFGGVSVITPGTNTSNQVAVLYQDVNCTEVPMAIHAEQLTPAWRVYSAGANVFQTRAGCLVGAEHVNNSYECDIPVGAGICASYHSMSSFRSVNQRSIIAYTMSLGAENSVAYSNNSIAICTNFTISVTTEILPVSMTKTSVDCTMYICGDSIECSNLLLQYGSFCTQLNRALTGIAVEQDKNTQEVFAQVKQIYKTPPIKDFGGFNFSQILPDPSKPSKRSFIEDLLFNKVTLADAGFIKQYGDCLGDIAARDLICAQKFNGLTVLPPLLTDEMIAQYTSALLAGTITSGWTFGAGAALQIPFAMQMAYRFNGIGVTQNVLYENQKLIANQFNSAIGKIQDSLSSTASALGKLQDVVNQNAQALNTLVKQLSSNFGAISSVLNDILSRLDKVEAEVQIDRLITGRLQSLQTYVTQQLIRAAEIRASANLAATKMSECVLGQSKRVDFCGKGYHLMSFPQSAPHGVVFLHVTYVCAQEKNFTTAPAICHEGKAHFPREGVFVSNGTHWFITQRNFYEPQIITTDNTFVSGSCDVVIGIVNNTVYDPLQPELDSFKEELDKYFKNHTSPDVDLGDISGINASVVNIQKEIDRLNEVAKNLNESLIDLQELGKYEQYIKGGGGSDIIKLLNEQVNKEMQSSNLYMSMSSWCYTHSLDGAGLFLFDHAAEEYEHAKKLIIFLNENNVPVQLTSISAPEHKFEGLTQIFQKAYEHEQHISESINNIVDHAIKSKDHATFNFLQWYVAEQHEEEVLFKDILDKIELIGNENHGLYLADQYVKGIAKSRKS

SEQ ID NO: 5164 - protein, 1371 aa, Artificial Sequence
  SARS-CoV-2/pangolin/Guangxi/P1E/2017__EPI_ISL_410539 spike protein (1-1203)(P707C_P1061C) Ferritin construct
MFVFLFVLPLVSSQCVNLTTRTGIQPGYTNSSTRGVYYPDKVFRSSILHLTQDLFLPFFSNVTWFNTINYQGGFKKFDNPVLPFNDGVYFASTEKSNIIRGWIFGTTLDARTQSLLIVNNATNVVIKVCEFQFCTDPFLGVYYHNNNKTWVENEFRVYSSANNCTFEYISQPFLMDLEGKQGNFKNLREFVFKNVDGYFKIYSKHTPIDLVRDLPRGFAALEPLVDLPIGINITRFQTLLALHRSYLTPGKLESGWTTGAAAYYVGYLQQRTFLLSYNQNGTITDAVDCSLDPLSETKCTLKSLTVEKGIYQTSNFRVQPTISIVRFPNITNLCPFGEVFNASKFASVYAWNRKRISNCVADYSVLYNSTSFSTFKCYGVSPTKLNDLCFTNVYADSFVVKGDEVRQIAPGQTGVIADYNYKLPDDFTGCVIAWNSVKQDALTGGNYLYRLFRKSKLKPFERDISTEIYQAGSTPCNGQVGLNCYYPLERYGFHPTTGVNYQPFRVVVLSFELLNGPATVCGPKLSTTLVKDKCVNFNFNGLTGTGVLTTSKKQFLPFQQFGRDISDTTDAVRDPQTLEILDITPCSFGGVSVITPGTNTSNQVAVLYQDVNCTEVPMAIHAEQLTPAWRVYSAGANVFQTRAGCLVGAEHVNNSYECDIPVGAGICASYHSMSSLRSVNQRSIIAYTMSLGAENSVAYSNNSIAICTNFTISVTTEILPVSMTKTSVDCTMYICGDSIECSNLLLQYGSFCTQLNRALTGIAVEQDKNTQEVFAQVKQIYKTPPIKDFGGFNFSQILPDPSKPSKRSFIEDLLFNKVTLADAGFIKQYGDCLGDIAARDLICAQKFNGLTVLPPLLTDEMIAQYTSALLAGTITSGWTFGAGAALQIPFAMQMAYRFNGIGVTQNVLYENQKLIANQFNSAIGKIQDSLSSTASALGKLQDVVNQNAQALNTLVKQLSSNFGAISSVLNDILSRLDKVEAEVQIDRLITGRLQSLQTYVTQQLIRAAEIRASANLAATKMSECVLGQSKRVDFCGKGYHLMSFPQSAPHGVVFLHVTYVCAQEKNFTTAPAICHEGKAHFPREGVFVSNGTHWFITQRNFYEPQIITTDNTFVSGSCDVVIGIVNNTVYDPLQPELDSFKEELDKYFKNHTSPDVDLGDISGINASVVNIQKEIDRLNEVAKNLNESLIDLQELGKYEQYIKGGGGSDIIKLLNEQVNKEMQSSNLYMSMSSWCYTHSLDGAGLFLFDHAAEEYEHAKKLIIFLNENNVPVQLTSISAPEHKFEGLTQIFQKAYEHEQHISESINNIVDHAIKSKDHATFNFLQWYVAEQHEEEVLFKDILDKIELIGNENHGLYLADQYVKGIAKSRKS

SEQ ID NO: 5165 - protein, 1379 aa, Artificial Sequence
  SARS-CoV-2/Wuhan/WIV05/2019__EPI_ISL_402128 spike protein (1-1211)(G889C_L1034C) Ferritin construct
MFVFLVLLPLVSSQCVNLTTRTQLPPAYTNSFTRGVYYPDKVFRSSVLHSTQDLFLPFFSNVTWFHAIHVSGTNGTKRFDNPVLPFNDGVYFASTEKSNIIRGWIFGTTLDSKTQSLLIVNNATNVVIKVCEFQFCNDPFLGVYYHKNNKSWMESEFRVYSSANNCTFEYVSQPFLMDLEGKQGNFKNLREFVFKNIDGYFKIYSKHTPINLVRDLPQGFSALEPLVDLPIGINITRFQTLLALHRSYLTPGDSSSGWTAGAAAYYVGYLQPRTFLLKYNENGTITDAVDCALDPLSETKCTLKSFTVEKGIYQTSNFRVQPTESIVRFPNITNLCPFGEVFNATRFASVYAWNRKRISNCVADYSVLYNSASFSTFKCYGVSPTKLNDLCFTNVYADSFVIRGDEVRQIAPGQTGKIADYNYKLPDDFTGCVIAWNSNNLDSKVGGNYNYLYRLFRKSNLKPFERDISTEIYQAGSTPCNGVEGFNCYFPLQSYGFQPTNGVGYQPYRVVVLSFELLHAPATVCGPKKSTNLVKNKCVNFNFNGLTGTGVLTESNKKFLPFQQFGRDIADTTDAVRDPQTLEILDITPCSFGGVSVITPGTNTSNQVAVLYQDVNCTEVPVAIHADQLTPTWRVYSTGSNVFQTRAGCLIGAEHVNNSYECDIPIGAGICASYQTQTNSPRRARSVASQSIIAYTMSLGAENSVAYSNNSIAIPTNFTISVTTEILPVSMTKTSVDCTMYICGDSTECSNLLLQYGSFCTQLNRALTGIAVEQDKNTQEVFAQVKQIYKTPPIKDFGGFNFSQILPDPSKPSKRSFIEDLLFNKVTLADAGFIKQYGDCLGDIAARDLICAQKFNGLTVLPPLLTDEMIAQYTSALLAGTITSGWTFCAGAALQIPFAMQMAYRFNGIGVTQNVLYENQKLIANQFNSAIGKIQDSLSSTASALGKLQDVVNQNAQALNTLVKQLSSNFGAISSVLNDILSRLDKVEAEVQIDRLITGRLQSLQTYVTQQLIRAAEIRASANLAATKMSECVCGQSKRVDFCGKGYHLMSFPQSAPHGVVFLHVTYVPAQEKNFTTAPAICHDGKAHFPREGVFVSNGTHWFVTQRNFYEPQIITTDNTFVSGNCDVVIGIVNNTVYDPLQPELDSFKEELDKYFKNHTSPDVDLGDISGINASVVNIQKEIDRLNEVAKNLNESLIDLQELGKYEQYIKGGGGSDIIKLLNEQVNKEMQSSNLYMSMSSWCYTHSLDGAGLFLFDHAAEEYEHAKKLIIFLNENNVPVQLTSISAPEHKFEGLTQIFQKAYEHEQHISESINNIVDHAIKSKDHATFNFLQWYVAEQHEEEVLFKDILDKIELIGNENHGLYLADQYVKGIAKSRKS

SEQ ID NO: 5166 - protein, 1375 aa, Artificial Sequence
  SARS-CoV-2/bat/Yunnan/RaTG13/2013__EPI_ISL_402131 spike protein (1-1207)(G885C_L1030C) Ferritin construct
MFVFLVLLPLVSSQCVNLTTRTQLPPAYTNSSTRGVYYPDKVFRSSVLHLTQDLFLPFFSNVTWFHAIHVSGTNGIKRFDNPVLPFNDGVYFASTEKSNIIRGWIFGTTLDSKTQSLLIVNNATNVVIKVCEFQFCNDPFLGVYYHKNNKSWMESEFRVYSSANNCTFEYVSQPFLMDLEGKQGNFKNLREFVFKNIDGYFKIYSKHTPINLVRDLPPGFSALEPLVDLPIGINITRFQTLLALHRSYLTPGDSSSGWTAGAAAYYVGYLQPRTFLLKYNENGTITDAVDCALDPLSETKCTLKSFTVEKGIYQTSNFRVQPTDSIVRFPNITNLCPFGEVFNATTFASVYAWNRKRISNCVADYSVLYNSTSFSTFKCYGVSPTKLNDLCFTNVYADSFVITGDEVRQIAPGQTGKIADYNYKLPDDFTGCVIAWNSKHIDAKEGGNFNYLYRLFRKANLKPFERDISTEIYQAGSKPCNGQTGLNCYYPLYRYGFYPTDGVGHQPYRVVVLSFELLNAPATVCGPKKSTNLVKNKCVNFNFNGLTGTGVLTESNKKFLPFQQFGRDIADTTDAVRDPQTLEILDITPCSFGGVSVITPGTNASNQVAVLYQDVNCTEVPVAIHADQLTPTWRVYSTGSNVFQTRAGCLIGAEHVNNSYECDIPIGAGICASYQTQTNSRSVASQSIIAYTMSLGAENSVAYSNNSIAIPTNFTISVTTEILPVSMTKTSVDCTMYICGDSTECSNLLLQYGSFCTQLNRALTGIAVEQDKNTQEVFAQVKQIYKTPPIKDFGGFNFSQILPDPSKPSKRSFIEDLLFNKVTLADAGFIKQYGDCLGDIAARDLICAQKFNGLTVLPPLLTDEMIAQYTSALLAGTITSGWTFCAGAALQIPFAMQMAYRFNGIGVTQNVLYENQKLIANQFNSAIGKIQDSLSSTASALGKLQDVVNQNAQALNTLVKQLSSNFGAISSVLNDILSRLDKVEAEVQIDRLITGRLQSLQTYVTQQLIRAAEIRASANLAATKMSECVCGQSKRVDFCGKGYHLMSFPQSAPHGVVFLHVTYVPAQEKNFTTAPAICHDGKAHFPREGVFVSNGTHWFVTQRNFYEPQIITTDNTFVSGSCDVVIGIVNNTVYDPLQPELDSFKEELDKYFKNHTSPDVDLGDISGINASVVNIQKEIDRLNEVAKNLNESLIDLQELGKYEQYIKGGGGSDIIKLLNEQVNKEMQSSNLYMSMSSWCYTHSLDGAGLFLFDHAAEEYEHAKKLIIFLNENNVPVQLTSISAPEHKFEGLTQIFQKAYEHEQHISESINNIVDHAIKSKDHATFNFLQWYVAEQHEEEVLFKDILDKIELIGNENHGLYLADQYVKGIAKSRKS

SEQ ID NO: 5167 - protein, 1379 aa, Artificial Sequence
  SARS-CoV-2/Wuhan/HBCDC-HB-01/2019__EPI_ISL_402132 spike protein (1-1211)(G889C_L1034C) Ferritin construct
MFVFLVLLPLVSSQCVNLTTRTQLPPAYTNSITRGVYYPDKVFRSSVLHSTQDLFLPFFSNVTWFHAIHVSGTNGTKRFDNPVLPFNDGVYFASTEKSNIIRGWIFGTTLDSKTQSLLIVNNATNVVIKVCEFQFCNDPFLGVYYHKNNKSWMESEFRVYSSANNCTFEYVSQPFLMDLEGKQGNFKNLREFVFKNIDGYFKIYSKHTPINLVRDLPQGFSALEPLVDLPIGINITRFQTLLALHRSYLTPGDSSSGWTAGAAAYYVGYLQPRTFLLKYNENGTITDAVDCALDPLSETKCTLKSFTVEKGIYQTSNFRVQPTESIVRFPNITNLCPFGEVFNATRFASVYAWNRKRISNCVADYSVLYNSASFSTFKCYGVSPTKLNDLCFTNVYADSFVIRGDEVRQIAPGQTGKIADYNYKLPDDFTGCVIAWNSNNLDSKVGGNYNYLYRLFRKSNLKPFERDISTEIYQAGSTPCNGVEGFNCYFPLQSYGFQPTNGVGYQPYRVVVLSFELLHAPATVCGPKKSTNLVKNKCVNFNFNGLTGTGVLTESNKKFLPFQQFGRDIADTTDAVRDPQTLEILDITPCSFGGVSVITPGTNTSNQVAVLYQDVNCTEVPVAIHADQLTPTWRVYSTGSNVFQTRAGCLIGAEHVNNSYECDIPIGAGICASYQTQTNSPRRARSVASQSIIAYTMSLGAENSVAYSNNSIAIPTNFTISVTTEILPVSMTKTSVDCTMYICGDSTECSNLLLQYGSFCTQLNRALTGIAVEQDKNTQEVFAQVKQIYKTPPIKDFGGFNFSQILPDPSKPSKRSFIEDLLFNKVTLADAGFIKQYGDCLGDIAARDLICAQKFNGLTVLPPLLTDEMIAQYTSALLAGTITSGWTFCAGAALQIPFAMQMAYRFNGIGVTQNVLYENQKLIANQFNSAIGKIQDSLSSTASALGKLQDVVNQNAQALNTLVKQLSSNFGAISSVLNDILSRLDKVEAEVQIDRLITGRLQSLQTYVTQQLIRAAEIRASANLAATKMSECVCGQSKRVDFCGKGYHLMSFPQSAPHGVVFLHVTYVPAQEKNFTTAPAICHDGKAHFPREGVFVSNGTHWFVTQRNFYEPQIITTDNTFVSGNCDVVIGIVNNTVYDPLQPELDSFKEELDKYFKNHTSPDVDLGDISGINASVVNIQKEIDRLNEVAKNLNESLIDLQELGKYEQYIKGGGGSDIIKLLNEQVNKEMQSSNLYMSMSSWCYTHSLDGAGLFLFDHAAEEYEHAKKLIIFLNENNVPVQLTSISAPEHKFEGLTQIFQKAYEHEQHISESINNIVDHAIKSKDHATFNFLQWYVAEQHEEEVLFKDILDKIELIGNENHGLYLADQYVKGIAKSRKS

SEQ ID NO: 5168 - protein, 1379 aa, Artificial Sequence
  SARS-CoV-2/Guangdong/20SF028/2020__EPI_ISL_403936 spike protein (1-1211)(G889C_L1034C) Ferritin construct
MFVFLVLLPLVSSQCVNLTTRTQLPPAYTNSFTRGVYYPDKVFRSSVLYSTQDLFLPFFSNVTWFHAIHVSGTNGTKRFDNPVLPFNDGVYFASTEKSNIIRGWIFGTTLDSKTQSLLIVNNATNVVIKVCEFQFCNDPFLGVYYHKNNKSWMESEFRVYSSANNCTFEYVSQPFLMDLEGKQGNFKNLREFVFKNIDGYFKIYSKHTPINLVRDLPQGFSALEPLVDLPIGINITRFQTLLALHRSYLTPGDSSSGWTAGAAAYYVGYLQPRTFLLKYNENGTITDAVDCALDPLSETKCTLKSFTVEKGIYQTSNFRVQPTESIVRFPNITNLCPFGEVFNATRFASVYAWNRKRISNCVADYSVLYNSASFSTFKCYGVSPTKLNDLCFTNVYADSFVIRGDEVRQIAPGQTGKIADYNYKLPDDFTGCVIAWNSNNLDSKVGGNYNYLYRLFRKSNLKPFERDISTEIYQAGSTPCNGVEGFNCYFPLQSYGFQPTNGVGYQPYRVVVLSFELLHAPATVCGPKKSTNLVKNKCVNFNFNGLTGTGVLTESNKKFLPFQQFGRDIADTTDAVRDPQTLEILDITPCSFGGVSVITPGTNTSNQVAVLYQDVNCTEVPVAIHADQLTPTWRVYSTGSNVFQTRAGCLIGAEHVNNSYECDIPIGAGICASYQTQTNSPRRARSVASQSIIAYTMSLGAENSVAYSNNSIAIPTNFTISVTTEILPVSMTKTSVDCTMYICGDSTECSNLLLQYGSFCTQLNRALTGIAVEQDKNTQEVFAQVKQIYKTPPIKDFGGFNFSQILPDPSKPSKRSFIEDLLFNKVTLADAGFIKQYGDCLGDIAARDLICAQKFNGLTVLPPLLTDEMIAQYTSALLAGTITSGWTFCAGAALQIPFAMQMAYRFNGIGVTQNVLYENQKLIANQFNSAIGKIQDSLSSTASALGKLQDVVNQNAQALNTLVKQLSSNFGAISSVLNDILSRLDKVEAEVQIDRLITGRLQSLQTYVTQQLIRAAEIRASANLAATKMSECVCGQSKRVDFCGKGYHLMSFPQSAPHGVVFLHVTYVPAQEKNFTTAPAICHDGKAHFPREGVFVSNGTHWFVTQRNFYEPQIITTDNTFVSGNCDVVIGIVNNTVYDPLQPELDSFKEELDKYFKNHTSPDVDLGDISGINASVVNIQKEIDRLNEVAKNLNESLIDLQELGKYEQYIKGGGGSDIIKLLNEQVNKEMQSSNLYMSMSSWCYTHSLDGAGLFLFDHAAEEYEHAKKLIIFLNENNVPVQLTSISAPEHKFEGLTQIFQKAYEHEQHISESINNIVDHAIKSKDHATFNFLQWYVAEQHEEEVLFKDILDKIELIGNENHGLYLADQYVKGIAKSRKS

SEQ ID NO: 5169 - protein, 1379 aa, Artificial Sequence
  SARS-CoV-2/Shenzhen/SZTH-001/2020__EPI_ISL_406592 spike protein (1-1211)(G889C_L1034C) Ferritin construct
MFVFLVLLPLVSSQCVNLTTRTQLPPAYTNSFTRGVYYPDKVFRSSVLHSTQDLFLPFFSNVTWFHAIHVSGTNGTKRFDNPVLPFNDGVYFASTEKSNIIRGWIFGTTLDSKTQSLLIVNNATNVVIKVCEFQFCNDPFLGVYYHKNNKSWMESEFRVYSSANNCTFEYVSQPFLMDLEGKQGNFKNLREFVFKNIDGYFKIYSKHTPINLVRDLPQGFSALEPLVDLPIGINITRFQTLLALHRSYLTPGDSSSGWTAGAAAYYVGYLQPRTFLLKYNENGTITDAVDCALDPLSETKCTLKSFTVEKGIYQTSNFRVQPTESIVRFPNITNLCPFGEVFNATRFASVYAWNRKRISNCVADYSVLYNSASFSTFKCYGVSPTKLNDLCFTNVYADSFVIRGDEVRQIAPGQTGKIADYNYKLPDDFTGCVIAWNSNNLDSKVGGNYNYLYRLFRKSNLKPFERDISTEIYQAGSTPCNGVEGFNCYFPLQSYGFQPTNGVGYQPYRVVVLSFELLHAPATVCGPKKSTNLVKNKCVNFNFNGLTGTGVLTESNKKFLPFQQFGRDIADTTDAVRDPQTLEILDITPCSFGGVSVITPGTNTSNQVAVLYQDVNCTEVPVAIHADQLTPTWRVYSTGSNVFQTRAGCLIGAEHVNNSYECDIPIGAGICASYQTQTNSPRRARSVASQSIIAYTMSLGAENSVAYSNNSIAIPTNFTISVTTEILPVSMTKTSVDCTMYICGDSTECSNLLLQYGSFCTQLNRALTGIAVEQDKNTQEVFAQVKQIYKTPPIKDFGGFNFSQILPDPSKPSKRSFIEDLLFNKVTLADAGFIKQYGDCLGDIAARDLICAQKFNGLTVLPPLLTDEMIAQYTSALLAGTITSGWTFCAGAALQIPFAMQMAYRFNGIGVTQNVLYENQKLIANQFNSAIGKIQDSLSSTASALGKLQDVVNQNAQALNTLVKQLSSNFGAISSVLNDILSRLDKVEAEVQIDRLITGRLQSLQTYVTQQLIRAAEIRASANLAATKMSECVCGQSKRVDFCGKGYHLMSFPQSAPHGVVFLHVTYVPAQEKNFTTAPAICHDGKAHFPREGVFVSNGTHWFVTQRNFYEPQIITTDNTFVSGNCDVLIGIVNNTVYDPLQPELDSFKEELDKYFKNHTSPDVDLGDISGINASVVNIQKEIDRLNEVAKNLNESLIDLQELGKYEQYIKGGGGSDIIKLLNEQVNKEMQSSNLYMSMSSWCYTHSLDGAGLFLFDHAAEEYEHAKKLIIFLNENNVPVQLTSISAPEHKFEGLTQIFQKAYEHEQHISESINNIVDHAIKSKDHATFNFLQWYVAEQHEEEVLFKDILDKIELIGNENHGLYLADQYVKGIAKSRKS

SEQ ID NO: 5170 - protein, 1379 aa, Artificial Sequence
  SARS-CoV-2/Shenzhen/SZTH-004/2020__EPI_ISL_406595 spike protein (1-1211)(G889C_L1034C) Ferritin construct
MFVFLVLLPLVSSQCVNLTTRTQLPPAYTNSFTRGVYYPDKVFRSSVLHSTQDLFLPFFSNVTWFHAIHVSGTNGTKRFDNPVLPFNDGVYFASTEKSNIIRGWIFGTTLDSKTQSLLIVNNATNVVIKVCEFQFCNDPFLGVYYHKNNKSWMESEFRVYSSANNCTFEYVSQPFLMDLEGKQGNFKNLREFVFKNIDGYFKIYSKHTPINLVRDLPQGFSALEPLVDLPIGINITRFQTLLALHRSYLTPGDSSSGWTAGAAAYYVGYLQPRTFLLKYNENGTITDAVDCALDPLSETKCTLKSFTVEKGIYQTSNFRVQPTESIVRFPNITNLCPFGEVFNATRFASVYAWDRKRISNCVAYYSVLYNSASFSTFKCYGVSPTKLNDLCFTNVYADSFVIRGDEVRQIAPGQTGKIADYNYKLPDDFTGCVIAWNSNNLDSKVGGNYNYLYRLFRKSNLKPFERDISTEIYQAGSTPCNGVEGFNCYFPLQSYGFQPTNGVGYQPYRVVVLSFELLHAPATVCGPKKSTNLVKNKCVNFNFNGLTGTGVLTESNKKFLPFQQFGRDIADTTDAVRDPQTLEILDITPCSFGGVSVITPGTNTSNQVAVLYQDVNCTEVPVAIHADQLTPTWRVYSTGSNVFQTRAGCLIGAEHVNNSYECDIPIGAGICASYQTQTNSPRRARSVASQSIIAYTMSLGAENSVAYSNNSIAIPTNFTISVTTEILPVSMTKTSVDCTMYICGDSTECSNLLLQYGSFCTQLNRALTGIAVEQDKNTQEVFAQVKQIYKTPPIKDFGGFNFSQILPDPSKPSKRSFIEDLLFNKVTLADAGFIKQYGDCLGDIAARDLICAQKFNGLTVLPPLLTDEMIAQYTSALLAGTITSGWTFCAGAALQIPFAMQMAYRFNGIGVTQNVLYENQKLIANQFNSAIGKIQDSLSSTASALGKLQDVVNQNAQALNTLVKQLSSNFGAISSVLNDILSRLDKVEAEVQIDRLITGRLQSLQTYVTQQLIRAAEIRASANLAATKMSECVCGQSKRVDFCGKGYHLMSFPQSAPHGVVFLHVTYVPAQEKNFTTAPAICHDGKAHFPREGVFVSNGTHWFVTQRNFYEPQIITTDNTFVSGNCDVVIGIVNNTVYDPLQPELDSFKEELDKYFKNHTSPDVDLGDISGINASVVNIQKEIDRLNEVAKNLNESLIDLQELGKYEQYIKGGGGSDIIKLLNEQVNKEMQSSNLYMSMSSWCYTHSLDGAGLFLFDHAAEEYEHAKKLIIFLNENNVPVQLTSISAPEHKFEGLTQIFQKAYEHEQHISESINNIVDHAIKSKDHATFNFLQWYVAEQHEEEVLFKDILDKIELIGNENHGLYLADQYVKGIAKSRKS

SEQ ID NO: 5171 - protein, 1379 aa, Artificial Sequence
  SARS-CoV-2/France/IDF0372/2020__EPI_ISL_406596 spike protein (1-1211)(G889C_L1034C) Ferritin construct
MFVFLVLLPLVSSQCVNLTTRTQLPPAYTNSFTRGVYYPDKVFRSSVLHSTQDLFLPFFSNVTWFHAIHVSGTNGTKRFDNPVLPFNDGVYFASTEKSNIIRGWIFGTTLDSKTQSLLIVNNATNVVIKVCEFQFCNDPFLGVYYHKNNKSWMESEFRVYSSANNCTFEYVSQPFLMDLEGKQGNFKNLREFVFKNIDGYFKIYSKHTPINLVRDLPQGFSALEPLVDLPIGINITRFQTLLALHRSYLTPGDSSSGWTAGAAAYYVGYLQPRTFLLKYNENGTITDAVDCALDPLSETKCTLKSFTVEKGIYQTSNFRVQPTESIVRFPNITNLCPFGEVFNATRFASVYAWNRKRISNCVADYSFLYNSASFSTFKCYGVSPTKLNDLCFTNVYADSFVIRGDEVRQIAPGQTGKIADYNYKLPDDFTGCVIAWNSNNLDSKVGGNYNYLYRLFRKSNLKPFERDISTEIYQAGSTPCNGVEGFNCYFPLQSYGFQPTNGVGYQPYRVVVLSFELLHAPATVCGPKKSTNLVKNKCVNFNFNGLTGTGVLTESNKKFLPFQQFGRDIADTTDAVRDPQTLEILDITPCSFGGVSVITPGTNTSNQVAVLYQDVNCTEVPVAIHADQLTPTWRVYSTGSNVFQTRAGCLIGAEHVNNSYECDIPIGAGICASYQTQTNSPRRARSVASQSIIAYTMSLGAENSVAYSNNSIAIPTNFTISVTTEILPVSMTKTSVDCTMYICGDSTECSNLLLQYGSFCTQLNRALTGIAVEQDKNTQEVFAQVKQIYKTPPIKDFGGFNFSQILPDPSKPSKRSFIEDLLFNKVTLADAGFIKQYGDCLGDIAARDLICAQKFNGLTVLPPLLTDEMIAQYTSALLAGTITSGWTFCAGAALQIPFAMQMAYRFNGIGVTQNVLYENQKLIANQFNSAIGKIQDSLSSTASALGKLQDVVNQNAQALNTLVKQLSSNFGAISSVLNDILSRLDKVEAEVQIDRLITGRLQSLQTYVTQQLIRAAEIRASANLAATKMSECVCGQSKRVDFCGKGYHLMSFPQSAPHGVVFLHVTYVPAQEKNFTTAPAICHDGKAHFPREGVFVSNGTHWFVTQRNFYEPQIITTDNTFVSGNCDVVIGIVNNTVYDPLQPELDSFKEELDKYFKNHTSPDVDLGDISGINASVVNIQKEIDRLNEVAKNLNESLIDLQELGKYEQYIKGGGGSDIIKLLNEQVNKEMQSSNLYMSMSSWCYTHSLDGAGLFLFDHAAEEYEHAKKLIIFLNENNVPVQLTSISAPEHKFEGLTQIFQKAYEHEQHISESINNIVDHAIKSKDHATFNFLQWYVAEQHEEEVLFKDILDKIELIGNENHGLYLADQYVKGIAKSRKS

SEQ ID NO: 5172 - protein, 1379 aa, Artificial Sequence
  SARS-CoV-2/Australia/VIC01/2020__EPI_ISL_406844 spike protein (1-1211)(G889C_L1034C) Ferritin construct
MFVFLVLLPLVSSQCVNLTTRTQLPPAYTNSFTRGVYYPDKVFRSSVLHSTQDLFLPFFSNVTWFHAIHVSGTNGTKRFDNPVLPFNDGVYFASTEKSNIIRGWIFGTTLDSKTQSLLIVNNATNVVIKVCEFQFCNDPFLGVYYHKNNKSWMESEFRVYSSANNCTFEYVSQPFLMDLEGKQGNFKNLREFVFKNIDGYFKIYSKHTPINLVRDLPQGFSALEPLVDLPIGINITRFQTLLALHRRYLTPGDSSSGWTAGAAAYYVGYLQPRTFLLKYNENGTITDAVDCALDPLSETKCTLKSFTVEKGIYQTSNFRVQPTESIVRFPNITNLCPFGEVFNATRFASVYAWNRKRISNCVADYSVLYNSASFSTFKCYGVSPTKLNDLCFTNVYADSFVIRGDEVRQIAPGQTGKIADYNYKLPDDFTGCVIAWNSNNLDSKVGGNYNYLYRLFRKSNLKPFERDISTEIYQAGSTPCNGVEGFNCYFPLQSYGFQPTNGVGYQPYRVVVLSFELLHAPATVCGPKKSTNLVKNKCVNFNFNGLTGTGVLTESNKKFLPFQQFGRDIADTTDAVRDPQTLEILDITPCSFGGVSVITPGTNTSNQVAVLYQDVNCTEVPVAIHADQLTPTWRVYSTGSNVFQTRAGCLIGAEHVNNSYECDIPIGAGICASYQTQTNSPRRARSVASQSIIAYTMSLGAENSVAYSNNSIAIPTNFTISVTTEILPVSMTKTSVDCTMYICGDSTECSNLLLQYGSFCTQLNRALTGIAVEQDKNTQEVFAQVKQIYKTPPIKDFGGFNFSQILPDPSKPSKRSFIEDLLFNKVTLADAGFIKQYGDCLGDIAARDLICAQKFNGLTVLPPLLTDEMIAQYTSALLAGTITSGWTFCAGAALQIPFAMQMAYRFNGIGVTQNVLYENQKLIANQFNSAIGKIQDSLSSTASALGKLQDVVNQNAQALNTLVKQLSSNFGAISSVLNDILSRLDKVEAEVQIDRLITGRLQSLQTYVTQQLIRAAEIRASANLAATKMSECVCGQSKRVDFCGKGYHLMSFPQSAPHGVVFLHVTYVPAQEKNFTTAPAICHDGKAHFPREGVFVSNGTHWFVTQRNFYEPQIITTDNTFVSGNCDVVIGIVNNTVYDPLQPELDSFKEELDKYFKNHTSPDVDLGDISGINASVVNIQKEIDRLNEVAKNLNESLIDLQELGKYEQYIKGGGGSDIIKLLNEQVNKEMQSSNLYMSMSSWCYTHSLDGAGLFLFDHAAEEYEHAKKLIIFLNENNVPVQLTSISAPEHKFEGLTQIFQKAYEHEQHISESINNIVDHAIKSKDHATFNFLQWYVAEQHEEEVLFKDILDKIELIGNENHGLYLADQYVKGIAKSRKS

SEQ ID NO: 5173 - protein, 1379 aa, Artificial Sequence
  SARS-CoV-2/Germany/BavPat1/2020__EPI_ISL_406862 spike protein (1-1211)(G889C_L1034C) Ferritin construct
MFVFLVLLPLVSSQCVNLTTRTQLPPAYTNSFTRGVYYPDKVFRSSVLHSTQDLFLPFFSNVTWFHAIHVSGTNGTKRFDNPVLPFNDGVYFASTEKSNIIRGWIFGTTLDSKTQSLLIVNNATNVVIKVCEFQFCNDPFLGVYYHKNNKSWMESEFRVYSSANNCTFEYVSQPFLMDLEGKQGNFKNLREFVFKNIDGYFKIYSKHTPINLVRDLPQGFSALEPLVDLPIGINITRFQTLLALHRSYLTPGDSSSGWTAGAAAYYVGYLQPRTFLLKYNENGTITDAVDCALDPLSETKCTLKSFTVEKGIYQTSNFRVQPTESIVRFPNITNLCPFGEVFNATRFASVYAWNRKRISNCVADYSVLYNSASFSTFKCYGVSPTKLNDLCFTNVYADSFVIRGDEVRQIAPGQTGKIADYNYKLPDDFTGCVIAWNSNNLDSKVGGNYNYLYRLFRKSNLKPFERDISTEIYQAGSTPCNGVEGFNCYFPLQSYGFQPTNGVGYQPYRVVVLSFELLHAPATVCGPKKSTNLVKNKCVNFNFNGLTGTGVLTESNKKFLPFQQFGRDIADTTDAVRDPQTLEILDITPCSFGGVSVITPGTNTSNQVAVLYQGVNCTEVPVAIHADQLTPTWRVYSTGSNVFQTRAGCLIGAEHVNNSYECDIPIGAGICASYQTQTNSPRRARSVASQSIIAYTMSLGAENSVAYSNNSIAIPTNFTISVTTEILPVSMTKTSVDCTMYICGDSTECSNLLLQYGSFCTQLNRALTGIAVEQDKNTQEVFAQVKQIYKTPPIKDFGGFNFSQILPDPSKPSKRSFIEDLLFNKVTLADAGFIKQYGDCLGDIAARDLICAQKFNGLTVLPPLLTDEMIAQYTSALLAGTITSGWTFCAGAALQIPFAMQMAYRFNGIGVTQNVLYENQKLIANQFNSAIGKIQDSLSSTASALGKLQDVVNQNAQALNTLVKQLSSNFGAISSVLNDILSRLDKVEAEVQIDRLITGRLQSLQTYVTQQLIRAAEIRASANLAATKMSECVCGQSKRVDFCGKGYHLMSFPQSAPHGVVFLHVTYVPAQEKNFTTAPAICHDGKAHFPREGVFVSNGTHWFVTQRNFYEPQIITTDNTFVSGNCDVVIGIVNNTVYDPLQPELDSFKEELDKYFKNHTSPDVDLGDISGINASVVNIQKEIDRLNEVAKNLNESLIDLQELGKYEQYIKGGGGSDIIKLLNEQVNKEMQSSNLYMSMSSWCYTHSLDGAGLFLFDHAAEEYEHAKKLIIFLNENNVPVQLTSISAPEHKFEGLTQIFQKAYEHEQHISESINNIVDHAIKSKDHATFNFLQWYVAEQHEEEVLFKDILDKIELIGNENHGLYLADQYVKGIAKSRKS

SEQ ID NO: 5174 - protein, 1379 aa, Artificial Sequence
  SARS-CoV-2/Wuhan/HBCDC-HB-02/2020__EPI_ISL_412978 spike protein (1-1211)(G889C_L1034C) Ferritin construct
MFVFLVLLPLVSSQCVNLTTRTQLPPAYTNSFTRGVYYPDKVFRSSVLHSTQDLFLPFFSNVTWFHAIHVSGTNGTKRFDNPVLPFNDGVYFASTEKSNIIRGWIFGTTLDSKTQSLLIVNNATNVVIKVCEFQFCNDPFLGVYYHKNNKSWMESEFRVYSSANNCTFEYVSQPFLMDLEGKQGNFKNLREFVFKNIDGYFKIYSKHTPINLVRDLPQGFSALEPLVDLPIGINITRFQTLLALHRSYLTPGDSSSGWTAGAAAYYVGYLQPRTFLLKYNENGTITDAVDCALDPLSETKCTLKSFTVEKGIYQTSNFRVQPTESIVRFPNITNLCPFGEVFNATRFASVYAWNRKRISNCVADYSVLYNSASFSTFKCYGVSPTKLNDLCFTNVYADSFVIRGDEVRQIAPGQTGKIADYNYKLPDDFTGCVIAWNSNNLDSKVGGNYNYLYRLFRKSNLKPFERDISTEIYQAGSTPCNGVEGFNCYFPLQSYGFQPTNGVGYQPYRVVVLSFELLHAPATVCGPKKSTNLVKNKCVNFNFNGLTGTGVLTESNKKFLPFQQFGRDIADTTDAVRDPQTLEILDITPCSFGGVSVITPGTNTSNQVAVLYQDVNCTEVPVAIHADQLTPTWRVYSTGSNVFQTRAGCLIGAEHVNNSYECDIPIGAGICASYQTQTNSPRRARSVASQSIIAYTMSLGAENSVAYSNNSIAIPTNFTISVTTEILPVSMTKTSVDCTMYICGDSTECSNFLLQYGSFCTQLNRALTGIAVEQDKNTQEVFAQVKQIYKTPPIKDFGGFNFSQILPDPSKPSKRSFIEDLLFNKVTLADAGFIKQYGDCLGDIAARDLICAQKFNGLTVLPPLLTDEMIAQYTSALLAGTITSGWTFCAGAALQIPFAMQMAYRFNGIGVTQNVLYENQKLIANQFNSAIGKIQDSLSSTASALGKLQDVVNQNAQALNTLVKQLSSNFGAISSVLNDILSRLDKVEAEVQIDRLITGRLQSLQTYVTQQLIRAAEIRASANLAATKMSECVCGQSKRVDFCGKGYHLMSFPQSAPHGVVFLHVTYVPAQEKNFTTAPAICHDGKAHFPREGVFVSNGTHWFVTQRNFYEPQIITTDNTFVSGNCDVVIGIVNNTVYDPLQPELDSFKEELDKYFKNHTSPDVDLGDISGINASVVNIQKEIDRLNEVAKNLNESLIDLQELGKYEQYIKGGGGSDIIKLLNEQVNKEMQSSNLYMSMSSWCYTHSLDGAGLFLFDHAAEEYEHAKKLIIFLNENNVPVQLTSISAPEHKFEGLTQIFQKAYEHEQHISESINNIVDHAIKSKDHATFNFLQWYVAEQHEEEVLFKDILDKIELIGNENHGLYLADQYVKGIAKSRKS

SEQ ID NO: 5175 - protein, 1379 aa, Artificial Sequence
  SARS-CoV-2/Australia/QLD02/2020__EPI_ISL_407896 spike protein (1-1211)(G889C_L1034C) Ferritin construct
MFVFLVLLPLVSSQCVNLTTRTQLPPAYTNSFTRGVYYPDKVFRSSVLHSTQDLFLPFFSNVTWFHAIHVSGTNGTKRFDNPVLPFNDGVYFASTEKSNIIRGWIFGTTLDSKTQSLLIVNNATNVVIKVCEFQFCNDPFLGVYYHKNNKSWMESEFRVYSSANNCTFEYVSQPFLMDLEGKQGNFKNLREFVFKNIDGYFKIYSKHTPINLVRDLPQGFSALEPLVDLPIGINITRFQTLLALHRSYLTPGDSSSGWTAGAAAYYVGYLQPRTFLLKYNENGTITDAVDCALDPLSETKCTLKSFTVEKGIYQTSNFRVQPTESIVRFPNITNLCPFGEVFNATRFASVYAWNRKRISNCVADYSVLYNSASFSTFKCYGVSPTKLNDLCFTNVYADSFVIRGDEVRQIAPGQTGKIADYNYKLPDDFTGCVIAWNSNNLDSKVGGNYNYLYRLFRKSNLKPFERDISTEIYQAGSTPCNGVEGFNCYFPLQSYGFQPTNGVGYQPYRVVVLSFELLHAPATVCGPKKSTNLVKNKCVNFNFNGLTGTGVLTESNKKFLPFQQFGRDIADTTDAVRDPQTLEILDITPCSFGGVSVITPGTNTSNQVAVLYQDVNCTEVPVAIHADQLTPTWRVYSTGSNVFQTRAGCLIGAEHVNNSYECDIPIGAGICASYQTQTNSPRRARSVASQSIIAYTMSLGAENSVAYSNNSIAIPTNFTISVTTEILPVSMTKTSVDCTMYICGDSTECSNLLLQYGSFCTQLNRALTGIAVEQDKNTQEVFAQVKQIYKTPPIKDFGGFNFSQILPDPSKPSKRSFIEDLLFNKVTLADAGFIKQYGDCLGDIAARDLICAQKFNGLTVLPPLLTDEMIAQYTSALLAGTITSGWTFCAGAALQIPFAMQMAYRFNGIGVTQNVLYENQKLIANQFNSAIGKIQDSLSSTASALGKLQDVVNQNAQALNTLVKQLSSNFGAISSVLNDILSRLDKVEAEVQIDRLITGRLQSLQTYVTQQLIRAAEIRASANLAATKMSECVCGQSKRVDFCGKGYHLMSFPQSAPHGVVFLHVTYVPAQEKNFTTAPAICHDGKAHFPREGVFVSNGTHWFVTQRNFYEPQIITTDNTFVSGNCDVVIGIVNNTVYDPLQLELDSFKEELDKYFKNHTSPDVDLGDISGINASVVNIQKEIDRLNEVAKNLNESLIDLQELGKYEQYIKGGGGSDIIKLLNEQVNKEMQSSNLYMSMSSWCYTHSLDGAGLFLFDHAAEEYEHAKKLIIFLNENNVPVQLTSISAPEHKFEGLTQIFQKAYEHEQHISESINNIVDHAIKSKDHATFNFLQWYVAEQHEEEVLFKDILDKIELIGNENHGLYLADQYVKGIAKSRKS

SEQ ID NO: 5176 - protein, 1379 aa, Artificial Sequence
  SARS-CoV-2/India/1-31/2020__EPI_ISL_413523 spike protein (1-1211)(G889C_L1034C) Ferritin construct
MFVFLVLLPLVSSQCVNLTTRTQLPPAYTNSFTRGVYYPDKVFRSSVLHSTQDLFLPFFSNVTWFHAIHVSGTNGTKRFDNPVLPFNDGVYFASTEKSNIIRGWIFGTTLDSKTQSLLIVNNATNVVIKVCEFQFCNDPFLGVYYHKNNKSWMESEFRVYSSANNCTFEYVSQPFLMDLEGKQGNFKNLREFVFKNIDGYFKIYSKHTPINLVRDLPQGFSALEPLVDLPIGINITRFQTLLALHRSYLTPGDSSSGWTAGAAAYYVGYLQPRTFLLKYNENGTITDAVDCALDPLSETKCTLKSFTVEKGIYQTSNFRVQPTESIVRFPNITNLCPFGEVFNATRFASVYAWNRKRISNCVADYSVLYNSASFSTFKCYGVSPTKLNDLCFTNVYADSFVIRGDEVRQIAPGQTGKIADYNYKLPDDFTGCVIAWNSNNLDSKVGGNYNYLYRLFRKSNLKPFERDISTEIYQAGSTPCNGVEGFNCYFPLQSYGFQPTNGVGYQPYRVVVLSFELLHAPATVCGPKKSTNLVKNKCVNFNFNGLTGTGVLTESNKKFLPFQQFGRDIADTTDAVRDPQTLEILDITPCSFGGVSVITPGTNTSNQVAVLYQDVNCTEVPVAIHADQLTPTWRVYSTGSNVFQTRAGCLIGAEHVNNSYECDIPIGAGICASYQTQTNSPRRARSVASQSIIAYTMSLGAENSVAYSNNSIAIPTNFTISVTTEILPVSMTKTSVDCTMYICGDSTECSNLLLQYGSFCTQLNRALTGIAVEQDKNTQEVFAQVKQIYKTPPIKDFGGFNFSQILPDPSKPSKRSFIEDLLFNKVTLADAGFIKQYGDCLGDIAARDLICAQKFNGLTVLPPLLTDEMIAQYTSALLAGTITSGWTFCAGAALQIPFAMQMAYRFNGIGVTQNVLYENQKLIANQFNSVIGKIQDSLSSTASALGKLQDVVNQNAQALNTLVKQLSSNFGAISSVLNDILSRLDKVEAEVQIDRLITGRLQSLQTYVTQQLIRAAEIRASANLAATKMSECVCGQSKRVDFCGKGYHLMSFPQSAPHGVVFLHVTYVPAQEKNFTTAPAICHDGKAHFPREGVFVSNGTHWFVTQRNFYEPQIITTDNTFVSGNCDVVIGIVNNTVYDPLQPELDSFKEELDKYFKNHTSPDVDLGDISGINASVVNIQKEIDRLNEVAKNLNESLIDLQELGKYEQYIKGGGGSDIIKLLNEQVNKEMQSSNLYMSMSSWCYTHSLDGAGLFLFDHAAEEYEHAKKLIIFLNENNVPVQLTSISAPEHKFEGLTQIFQKAYEHEQHISESINNIVDHAIKSKDHATFNFLQWYVAEQHEEEVLFKDILDKIELIGNENHGLYLADQYVKGIAKSRKS

SEQ ID NO: 5177 - protein, 1379 aa, Artificial Sequence
  SARS-CoV-2/Guangdong/GD2020087-P0008/2020__EPI_ISL_413863 spike protein (1-1211)(G889C_L1034C) Ferritin construct
MFVFLVLLPLVSSQCVNLTTRTQLPPAYTNSFTRGVYYPDKVFRSSVLHSTQDLFLPFFSNVTWFHAIHVSGTNGTKRFDNPVLPFNDGVYFASTEKSNIIRGWIFGTTLDSKTQSLLIVNNATNVVIKVCEFQFCNDPFLGVYYHKNNKSWMESEFRVYSSANNCTFEYVSQPFLMDLEGKQGNFKNLREFVFKNIDGYFKIYSKHTPINLVRDLPQGFSALEPLVDLPIGINITRFQTLLALHRSYLTPGDSSSGWTAGAAAYYVGYLQPRTFLLKYNENGTITDAVDCALDPLSETKCTLKSFTVEKGIYQTSNFRVQPTESIVRFPNITNLCPFGEVFNATRFASVYAWNRKRISNCVADYSVLYNSASFSTFKCYGVSPTKLNDLCFTNVYADSFVIRGDEVREIAPGQTGKIADYNYKLPDDFTGCVIAWNSNNLDSKVGGNYNYLYRLFRKSNLKPFERDISTEIYQAGSTPCNGVEGFNCYFPLQSYGFQPTNGVGYQPYRVVVLSFELLHAPATVCGPKKSTNLVKNKCVNFNFNGLTGTGVLTESNKKFLPFQQFGRDIADTTDAVRDPQTLEILDITPCSFGGVSVITPGTNTSNQVAVLYQDVNCTEVPVAIHADQLTPTWRVYSTGSNVFQTRAGCLIGAEHVNNSYECDIPIGAGICASYQTQTNSPRRARSVASQSIIAYTMSLGAENSVAYSNNSIAIPTNFTISVTTEILPVSMTKTSVDCTMYICGDSTECSNLLLQYGSFCTQLNRALTGIAVEQDKNTQEVFAQVKQIYKTPPIKDFGGFNFSQILPDPSKPSKRSFIEDLLFNKVTLADAGFIKQYGDCLGDIAARDLICAQKFNGLTVLPPLLTDEMIAQYTSALLAGTITSGWTFCAGAALQIPFAMQMAYRFNGIGVTQNVLYENQKLIANQFNSAIGKIQDSLSSTASALGKLQDVVNQNAQALNTLVKQLSSNFGAISSVLNDILSRLDKVEAEVQIDRLITGRLQSLQTYVTQQLIRAAEIRASANLAATKMSECVCGQSKRVDFCGKGYHLMSFPQSAPHGVVFLHVTYVPAQEKNFTTAPAICHDGKAHFPREGVFVSNGTHWFVTQRNFYEPQIITTDNTFVSGNCDVVIGIVNNTVYDPLQPELDSFKEELDKYFKNHTSPDVDLGDISGINASVVNIQKEIDRLNEVAKNLNESLIDLQELGKYEQYIKGGGGSDIIKLLNEQVNKEMQSSNLYMSMSSWCYTHSLDGAGLFLFDHAAEEYEHAKKLIIFLNENNVPVQLTSISAPEHKFEGLTQIFQKAYEHEQHISESINNIVDHAIKSKDHATFNFLQWYVAEQHEEEVLFKDILDKIELIGNENHGLYLADQYVKGIAKSRKS

SEQ ID NO: 5178 - protein, 1379 aa, Artificial Sequence
  SARS-CoV-2/Sweden/01/2020__EPI_ISL_411951 spike protein (1-1211)(G889C_L1034C) Ferritin construct
MFVFLVLLPLVSSQCVNLTTRTQLPPAYTNSFTRGVYYPDKVFRSSVLHSTQDLFLPFFSNVTWFHAIHVSGTNGTKRFDNPVLPFNDGVYFASTEKSNIIRGWIFGTTLDSKTQSLLIVNNATNVVIKVCEFQFCNDPFLGVYYHKNNKSWMESEFRVYSSANNCTFEYVSQPFLMDLEGKQGNFKNLREFVFKNIDGYFKIYSKHTPINLVRDLPQGFSALEPLVDLPIGINITRFQTLLALHRSYLTPGDSSSGWTAGAAAYYVGYLQPRTFLLKYNENGTITDAVDCALDPLSETKCTLKSFTVEKGIYQTSNFRVQPTESIVRFPNITNLCPFGEVFNATRFASVYAWNRKRISNCVADYSVLYNSASFSTFKCYGVSPTKLNDLCFTNVYADSFVIRGDEVRQIAPGQTGKIADYNYKLPDDFTGCVIAWNSNNLDSKVGGNYNYLYRLFRKSNLKPFERDISTEIYQAGSTPCNGVEGFNCYFPLQSYGFQPTNGVGYQPYRVVVLSFELLHAPATVCGPKKSTNLVKNKCVNFNFNGLTGTGVLTESNKKFLPFQQFGRDIADTTDAVRDPQTLEILDITPCSFGGVSVITPGTNTSNQVAVLYQDVNCTEVPVAIHADQLTPTWRVYSTGSNVFQTRAGCLIGAEHVNNSYECDIPIGAGICASYQTQTNSPRRARSVASQSIIAYTMSLGAENSVAYSNNSIAIPTNFTISVTTEILPVSMTKTSVDCTMYICGDSTECSNLLLQYGSFCTQLNRALTGIAVEQDKNTQEVFAQVKQIYKTPPIKDCGGFNFSQILPDPSKPSKRSFIEDLLFNKVTLADAGFIKQYGDCLGDIAARDLICAQKFNGLTVLPPLLTDEMIAQYTSALLAGTITSGWTFCAGAALQIPFAMQMAYRFNGIGVTQNVLYENQKLIANQFNSAIGKIQDSLSSTASALGKLQDVVNQNAQALNTLVKQLSSNFGAISSVLNDILSRLDKVEAEVQIDRLITGRLQSLQTYVTQQLIRAAEIRASANLAATKMSECVCGQSKRVDFCGKGYHLMSFPQSAPHGVVFLHVTYVPAQEKNFTTAPAICHDGKAHFPREGVFVSNGTHWFVTQRNFYEPQIITTDNTFVSGNCDVVIGIVNNTVYDPLQPELDSFKEELDKYFKNHTSPDVDLGDISGINASVVNIQKEIDRLNEVAKNLNESLIDLQELGKYEQYIKGGGGSDIIKLLNEQVNKEMQSSNLYMSMSSWCYTHSLDGAGLFLFDHAAEEYEHAKKLIIFLNENNVPVQLTSISAPEHKFEGLTQIFQKAYEHEQHISESINNIVDHAIKSKDHATFNFLQWYVAEQHEEEVLFKDILDKIELIGNENHGLYLADQYVKGIAKSRKS

SEQ ID NO: 5179 - protein, 1379 aa, Artificial Sequence
  SARS-CoV-2/Tianmen/HBCDC-HB-07/2020__EPI_ISL_412983 spike protein (1-1211)(G889C_L1034C) Ferritin construct
MFVFLVLLPLVSSQCVNLTTRTQLPPAYTNSFTRGVYYPDKVFRSSVLHSTQDLFLPFFSNVTWFHAIHVSGTNGTKRFDNPVLPFNDGVYFASTEKSNIIRGWIFGTTLDSKTQSLLIVNNATNVVIKVCEFQFCNDPFLGVYYHKNNKSWMESEFRVYSSANNCTFEYVSQPFLMDLEGKQGNFKNLREFVFKNIDGYFKIYSKHTPINLVRDLPQGFSALEPLVDLPIGINITRFQTLLALHRSYLTPGDSSSGWTAGAAAYYVGYLQPRTFLLKYNENGTITDAVDCALDPLSETKCTLKSFTVEKGIYQTSNFRVQPTESIVRFPNITNLCPFGEVFNATRFASVYAWNRKRISNCVADYSVLYNSASFSTFKCYGVSPTKLNDLCFTNVYADSFVIRGDEVRQIAPGQTGKIADYNYKLPDDFTGCVIAWNSNNLDSKVGGNYNYLYRLFRKSNLKPFERDISTEIYQAGSTPCNGVEGFNCYFPLQSYGFQPTNGVGYQPYRVVVLSFELLHAPATVCGPKKSTNLVKNKCVNFNFNGLTGTGVLTESNKKFLPFQQFGRDIADTTDAVRDPQTLEILDITPCSFGGVSVITPGTNTSNQVAVLYQDLNCTEVPVAIHADQLTPTWRVYSTGSNVFQTRAGCLIGAEHVNNSYECDIPIGAGICASYQTQTNSPRRARSVASQSIIAYTMSLGAENSVAYSNNSIAIPTNFTISVTTEILPVSMTKTSVDCTMYICGDSTECSNLLLQYGSFCTQLNRALTGIAVEQDKNTQEVFAQVKQIYKTPPIKDFGGFNFSQILPDPSKPSKRSFIEDLLFNKVTLADAGFIKQYGDCLGDIAARDLICAQKFNGLTVLPPLLTDEMIAQYTSALLAGTITSGWTFCAGAALQIPFAMQMAYRFNGIGVTQNVLYENQKLIANQFNSAIGKIQDSLSSTASALGKLQDVVNQNAQALNTLVKQLSSNFGAISSVLNDILSRLDKVEAEVQIDRLITGRLQSLQTYVTQQLIRAAEIRASANLAATKMSECVCGQSKRVDFCGKGYHLMSFPQSAPHGVVFLHVTYVPAQEKNFTTAPAICHDGKAHFPREGVFVSNGTHWFVTQRNFYEPQIITTDNTFVSGNCDVVIGIVNNTVYDPLQPELDSFKEELDKYFKNHTSPDVDLGDISGINASVVNIQKEIDRLNEVAKNLNESLIDLQELGKYEQYIKGGGGSDIIKLLNEQVNKEMQSSNLYMSMSSWCYTHSLDGAGLFLFDHAAEEYEHAKKLIIFLNENNVPVQLTSISAPEHKFEGLTQIFQKAYEHEQHISESINNIVDHAIKSKDHATFNFLQWYVAEQHEEEVLFKDILDKIELIGNENHGLYLADQYVKGIAKSRKS

SEQ ID NO: 5180 - protein, 1379 aa, Artificial Sequence
  SARS-CoV-2/Hong Kong/case42_VM20002493/2020__EPI_ISL_414527 spike protein (1-1211)(G889C_L1034C) Ferritin construct
MFVFLVLLPLVSSQCVNLTTRTQLPPAYTNSFTRGVYYPDKVFRSSVLHSTQDLFLPFFSNVTWFHAIHVSGTNGTKRFDNPVLPFNDGVYFASTEKSNIIRGWIFGTTLDSKTQSLLIVNNATNVVIKVCEFQFCNDPFLGVYYHKNNKSWMESEFRVYSSANNCTFEYVSQPFLMDLEGKQGNFKNLREFVFKNIDGYFKIYSKHTPINLVRDLPQGFSALEPLVDLPIGINITRFQTLLALHRSYLTPGDSSSGWTAGAAAYYVGYLQPRTFLLKYNENGTITDAVDCALDPLSETKCTLKSFTVEKGIYQTSNFRVQPTESIVRFPNITNLCPFGEVFNATRFASVYAWNRKRISNCVADYSVLYNSASFSTFKCYGVSPTKLNDLCFTNVYADSFVIRGDEVRQIAPGQTGKIADYNYKLPDDFTGCVIAWNSNNLDSKVGGNYNYLYRLFRKSNLKPFERDISTEIYQAGSTPCNGVEGFNCYFPLQSYGFQPTNGVGYQPYRVVVLSFELLHAPATVCGPKKSTNLVKNKCVNFNFNGLTGTGVLTESNKKFLPFQQFGRDIADTTDAVRDPQTLEILDITPCSFGGVSVITPGTNTSNQVAVLYQDVNCTEVPVAIHADQLTPTWRVYSTGSNVFQTRAGCLIGAEHVNNSYECDIPIGAGICASYQTQTNSPRRARSVASQSIIAYTMSLGAENSVAYSNNSIAIPTNFAISVTTEILPVSMTKTSVDCTMYICGDSTECSNLLLQYGSFCTQLNRALTGIAVEQDKNTQEVFAQVKQIYKTPPIKDFGGFNFSQILPDPSKPSKRSFIEDLLFNKVTLADAGFIKQYGDCLGDIAARDLICAQKFNGLTVLPPLLTDEMIAQYTSALLAGTITSGWTFCAGAALQIPFAMQMAYRFNGIGVTQNVLYENQKLIANQFNSAIGKIQDSLSSTASALGKLQDVVNQNAQALNTLVKQLSSNFGAISSVLNDILSRLDKVEAEVQIDRLITGRLQSLQTYVTQQLIRAAEIRASANLAATKMSECVCGQSKRVDFCGKGYHLMSFPQSAPHGVVFLHVTYVPAQEKNFTTAPAICHDGKAHFPREGVFVSNGTHWFVTQRNFYEPQIITTDNTFVSGNCDVVIGIVNNTVYDPLQPELDSFKEELDKYFKNHTSPDVDLGDISGINASVVNIQKEIDRLNEVAKNLNESLIDLQELGKYEQYIKGGGGSDIIKLLNEQVNKEMQSSNLYMSMSSWCYTHSLDGAGLFLFDHAAEEYEHAKKLIIFLNENNVPVQLTSISAPEHKFEGLTQIFQKAYEHEQHISESINNIVDHAIKSKDHATFNFLQWYVAEQHEEEVLFKDILDKIELIGNENHGLYLADQYVKGIAKSRKS

SEQ ID NO: 5181 - protein, 1379 aa, Artificial Sequence
  SARS-CoV-2/USA/CruiseA-23/2020__EPI_ISL_414482 spike protein (1-1211)(G889C_L1034C) Ferritin construct
MFVFLVLLPLVSSQCVNLTTRTQLPPAYTNSFTRGVYYPDKVFRSSVLHSTQDLFLPFFSNVTWFHAIHVSGTNGTKRFDNPVLPFNDGVYFASTEKSNIIRGWIFGTTLDSKTQSLLIVNNATNVVIKVCEFQFCNDPFLGVYYHKNNKSWMESEFRVYSSANNCTFEYVSQPFLMDLEVKQGNFKNLREFVFKNIDGYFKIYSKHTPINLVRDLPQGFSALEPLVDLPIGINITRFQTLLALHRSYLTPGDSSSGWTAGAAAYYVGYLQPRTFLLKYNENGTITDAVDCALDPLSETKCTLKSFTVEKGIYQTSNFRVQPTESIVRFPNITNLCPFGEVFNATRFASVYAWNRKRISNCVADYSVLYNSASFSTFKCYGVSPTKLNDLCFTNVYADSFVIRGDEVRQIAPGQTGKIADYNYKLPDDFTGCVIAWNSNNLDSKVGGNYNYLYRLFRKSNLKPFERDISTEIYQAGSTPCNGVEGFNCYFPLQSYGFQPTNGVGYQPYRVVVLSFELLHAPATVCGPKKSTNLVKNKCVNFNFNGLTGTGVLTESNKKFLPFQQFGRDIADTTDAVRDPQTLEILDITPCSFGGVSVITPGTNTSNQVAVLYQDVNCTEVPVAIHADQLTPTWRVYSTGSNVFQTRAGCLIGAEHVNNSYECDIPIGAGICASYQTQTNSPRRARSVASQSIIAYTMSLGAENSVAYSNNSIAIPTNFTISVTTEILPVSMTKTSVDCTMYICGDSTECSNLLLQYGSFCTQLNRALTGIAVEQDKNTQEVFAQVKQIYKTPPIKDFGGFNFSQILPDPSKPSKRSFIEDLLFNKVTLADAGFIKQYGDCLGDIAARDLICAQKFNGLTVLPPLLTDEMIAQYTSALLAGTITSGWTFCAGAALQIPFAMQMAYRFNGIGVTQNVLYENQKLIANQFNSAIGKIQDSLSSTASALGKLQDVVNQNAQALNTLVKQLSSNFGAISSVLNDILSRLDKVEAEVQIDRLITGRLQSLQTYVTQQLIRAAEIRASANLAATKMSECVCGQSKRVDFCGKGYHLMSFPQSAPHGVVFLHVTYVPAQEKNFTTAPAICHDGKAHFPREGVFVSNGTHWFVTQRNFYEPQIITTDNTFVSGNCDVVIGIVNNTVYDPLQPELDSFKEELDKYFKNHTSPDVDLGDISGINASVVNIQKEIDRLNEVAKNLNESLIDLQELGKYEQYIKGGGGSDIIKLLNEQVNKEMQSSNLYMSMSSWCYTHSLDGAGLFLFDHAAEEYEHAKKLIIFLNENNVPVQLTSISAPEHKFEGLTQIFQKAYEHEQHISESINNIVDHAIKSKDHATFNFLQWYVAEQHEEEVLFKDILDKIELIGNENHGLYLADQYVKGIAKSRKS

SEQ ID NO: 5182 - protein, 1379 aa, Artificial Sequence
  SARS-CoV-2/Hong Kong/case85_VM20002868/2020__EPI_ISL_414519 spike protein (1-1211)(G889C_L1034C) Ferritin construct
MFVFLVLVPLVSSQCVNLTTRTQLPPAYTNSFTRGVYYPDKVFRSSVLHSTQDLFLPFFSNVTWFHAIHVSGTNGTKRFDNPVLPFNDGVYFASTEKSNIIRGWIFGTTLDSKTQSLLIVNNATNVVIKVCEFQFCNDPFLGVYYHKNNKSWMESEFRVYSSANNCTFEYVSQPFLMDLEGKQGNFKNLREFVFKNIDGYFKIYSKHTPINLVRDLPQGFSALEPLVDLPIGINITRFQTLLALHRSYLTPGDSSSGWTAGAAAYYVGYLQPRTFLLKYNENGTITDAVDCALDPLSETKCTLKSFTVEKGIYQTSNFRVQPTESIVRFPNITNLCPFGEVFNATRFASVYAWNRKRISNCVADYSVLYNSASFSTFKCYGVSPTKLNDLCFTNVYADSFVIRGDEVRQIAPGQTGKIADYNYKLPDDFTGCVIAWNSNNLDSKVGGNYNYLYRLFRKSNLKPFERDISTEIYQAGSTPCNGVEGFNCYFPLQSYGFQPTNGVGYQPYRVVVLSFELLHAPATVCGPKKSTNLVKNKCVNFNFNGLTGTGVLTESNKKFLPFQQFGRDIADTTDAVRDPQTLEILDITPCSFGGVSVITPGTNTSNQVAVLYQDVNCTEVPVAIHADQLTPTWRVYSTGSNVFQTRAGCLIGAEHVNNSYECDIPIGAGICASYQTQTNSPRRARSVASQSIIAYTMSLGAENSVAYSNNSIAIPTNFTISVTTEILPVSMTKTSVDCTMYICGDSTECSNLLLQYGSFCTQLNRALTGIAVEQDKNTQEVFAQVKQIYKTPPIKDFGGFNFSQILPDPSKPSKRSFIEDLLFNKVTLADAGFIKQYGDCLGDIAARDLICAQKFNGLTVLPPLLTDEMIAQYTSALLAGTITSGWTFCAGAALQIPFAMQMAYRFNGIGVTQNVLYENQKLIANQFNSAIGKIQDSLSSTASALGKLQDVVNQNAQALNTLVKQLSSNFGAISSVLNDILSRLDKVEAEVQIDRLITGRLQSLQTYVTQQLIRAAEIRASANLAATKMSECVCGQSKRVDFCGKGYHLMSFPQSAPHGVVFLHVTYVPAQEKNFTTAPAICHDGKAHFPREGVFVSNGTHWFVTQRNFYEPQIITTDNTFVSGNCDVVIGIVNNTVYDPLQPELDSFKEELDKYFKNHTSPDVDLGDISGINASVVNIQKEIDRLNEVAKNLNESLIDLQELGKYEQYIKGGGGSDIIKLLNEQVNKEMQSSNLYMSMSSWCYTHSLDGAGLFLFDHAAEEYEHAKKLIIFLNENNVPVQLTSISAPEHKFEGLTQIFQKAYEHEQHISESINNIVDHAIKSKDHATFNFLQWYVAEQHEEEVLFKDILDKIELIGNENHGLYLADQYVKGIAKSRKS

SEQ ID NO: 5183 - protein, 1379 aa, Artificial Sequence; identical to SEQ ID NO: 5173
  SARS-CoV-2/England/200990660/2020__EPI_ISL_414523 spike protein (1-1211)(G889C_L1034C) Ferritin construct

SEQ ID NO: 5184 - protein, 1379 aa, Artificial Sequence
  SARS-CoV-2/Australia/NSW09/2020__EPI_ISL_413595 spike protein (1-1211)(G889C_L1034C) Ferritin construct
MFVFLVLLPLVSSQCVNLTTRTQLPPAYTNSFTRGVYYPDKVFRSSVLHSTQDLFLPFFSNVTWFHAIHVSGTNGTKRFDNPVLPFNDGVYFASTEKSNIIRGWIFGTTLDSKTQSLLIVNNATNVVIKVCEFQFCNDPFLGVYYHKNNKSWMESEFRVYSSANNCTFEYVSQPFLMDLEGKQGNFKNLREFVFKNIDGYFKIYSKHTPINLVRDLPQGFSALEPLVDLPIGINITRFQTLLALHRSYLTPGDSSSGWTAGAAAYYVGYLQPRTFLLKYNENGTITDAVDCALDPLSETKCTLKSFTVEKGIYQTSNFRVQPTESIVRFPNITNLCPFGEVFNATRFASVYAWNRKRISNCVADYSVLYNSASFSTFKCYGVSPTKLNDLCFTNVYADSFVIRGDEVRQIAPGQTGKIADYNYKLPDDFTGCVIAWNSNNLDSKVGGNYNYLYRLFRKSNLKPFERDISTEIYQAGSTPCNGVEGFNCYFPLQSYGFQPTNGVGYQPYRVVVLSFELLHAPATVCGPKKSTNLVKNKCVNFNFNGLTGTGVLTESNKKFLPFQQFGRDIADTTDAVRDPQTLEILDITPCSFGGVSVITPGTNTSNQVAVLYQDVNCTEVPVAIHADQLTPTWRVYSTGSNVFQTRAGCLIGAEHVNNSYECDIPIGAGICASYQTQTNSPRRARSVASQSIIAYTMSLGAENSVAYSNNSIAIPTNFTISVTTEILPVSMTKTSVDCTMYICGDSTECSNLLLQYGSFCTQLNRALTGIAVEQDKNTQEVFAQVKQIYKTPPIKDFGGFNFSQILPDPSKPSKRSFIEDLLFNKVTLADAGFIKQYGDCLGDIAARDLICAQKFNGLTVLPPLLTDEMIAQYTSALLAGTITSGWTFCAGAALQIPFAMQMAYRFNGIGVTQNVLYENQKLIANQFNSAIGKIQDSLSFTASALGKLQDVVNQNAQALNTLVKQLSSNFGAISSVLNDILSRLDKVEAEVQIDRLITGRLQSLQTYVTQQLIRAAEIRASANLAATKMSECVCGQSKRVDFCGKGYHLMSFPQSAPHGVVFLHVTYVPAQEKNFTTAPAICHDGKAHFPREGVFVSNGTHWFVTQRNFYEPQIITTDNTFVSGNCDVVIGIVNNTVYDPLQPELDSFKEELDKYFKNHTSPDVDLGDISGINASVVNIQKEIDRLNEVAKNLNESLIDLQELGKYEQYIKGGGGSDIIKLLNEQVNKEMQSSNLYMSMSSWCYTHSLDGAGLFLFDHAAEEYEHAKKLIIFLNENNVPVQLTSISAPEHKFEGLTQIFQKAYEHEQHISESINNIVDHAIKSKDHATFNFLQWYVAEQHEEEVLFKDILDKIELIGNENHGLYLADQYVKGIAKSRKS

SEQ ID NO: 5185 - protein, 1379 aa, Artificial Sequence; identical to SEQ ID NO: 5165
  SARS-CoV-2/Australia/NSW10/2020__EPI_ISL_413596 spike protein (1-1211)(G889C_L1034C) Ferritin construct

SEQ ID NO: 5186 - protein, 1379 aa, Artificial Sequence
  SARS-CoV-2/Switzerland/1000477797/2020__EPI_ISL_413023 spike protein (1-1211)(G889C_L1034C) Ferritin construct
MFVFLVLLPLVSSQCVNLTTRTQLPPAYTNSFTRGVYYPDKVFRSSVLHSTQDLFLPFFSNVTWFHAIHVSGTNGTKRFDNPVLPFNDGVYFASTEKSNIIRGWIFGTTLDSKTQSLLIVNNATNVVIKVCEFQFCNDPFLGVYYHKNNKSWMESEFRVYSSANNCTFEYVSQPFLMDLEGKQGNFKNLREFVFKNIDGYFNIYSKHTPINLVRDLPQGFSALEPLVDLPIGINITRFQTLLALHRSYLTPGDSSSGWTAGAAAYYVGYLQPRTFLLKYNENGTITDAVDCALDPLSETKCTLKSFTVEKGIYQTSNFRVQPTESIVRFPNITNLCPFGEVFNATRFASVYAWNRKRISNCVADYSVLYNSASFSTFKCYGVSPTKLNDLCFTNVYADSFVIRGDEVRQIAPGQTGKIADYNYKLPDDFTGCVIAWNSNNLDSKVGGNYNYLYRLFRKSNLKPFERDISTEIYQAGSTPCNGVEGFNCYFPLQSYGFQPTNGVGYQPYRVVVLSFELLHAPATVCGPKKSTNLVKNKCVNFNFNGLTGTGVLTESNKKFLPFQQFGRDIADTTDAVRDPQTLEILDITPCSFGGVSVITPGTNTSNQVAVLYQGVNCTEVPVAIHADQLTPTWRVYSTGSNVFQTRAGCLIGAEHVNNSYECDIPIGAGICASYQTQTNSPRRARSVASQSIIAYTMSLGAENSVAYSNNSIAIPTNFTISVTTEILPVSMTKTSVDCTMYICGDSTECSNLLLQYGSFCTQLNRALTGIAVEQDKNTQEVFAQVKQIYKTPPIKDFGGFNFSQILPDPSKPSKRSFIEDLLFNKVTLADAGFIKQYGDCLGDIAARDLICAQKFNGLTVLPPLLTDEMIAQYTSALLAGTITSGWTFCAGAALQIPFAMQMAYRFNGIGVTQNVLYENQKLIANQFNSAIGKIQDSLSSTASALGKLQDVVNQNAQALNTLVKQLSSNFGAISSVLNDILSRLDKVEAEVQIDRLITGRLQSLQTYVTQQLIRAAEIRASANLAATKMSECVCGQSKRVDFCGKGYHLMSFPQSAPHGVVFLHVTYVPAQEKNFTTAPAICHDGKAHFPREGVFVSNGTHWFVTQRNFYEPQIITTDNTFVSGNCDVVIGIVNNTVYDPLQPELDSFKEELDKYFKNHTSPDVDLGDISGINASVVNIQKEIDRLNEVAKNLNESLIDLQELGKYEQYIKGGGGSDIIKLLNEQVNKEMQSSNLYMSMSSWCYTHSLDGAGLFLFDHAAEEYEHAKKLIIFLNENNVPVQLTSISAPEHKFEGLTQIFQKAYEHEQHISESINNIVDHAIKSKDHATFNFLQWYVAEQHEEEVLFKDILDKIELIGNENHGLYLADQYVKGIAKSRKS

SEQ ID NO: 5187 - protein, 1379 aa, Artificial Sequence
  SARS-CoV-2/Belgium/BA-02291/2020__EPI_ISL_415159 spike protein (1-1211)(G889C_L1034C) Ferritin construct
MFVFLVLLPLVSSQCVNLTTRTQLPPAYTNSFTRGVYYPDKVFRSSVLHSTQDLFLPFFSNVTWFHAIHVSGTNGTKRFDNPVLPFNDGVYFASTEKSNIIRGWIFGTTLDSKTQSLLIVNNATNVVIKVCEFQFCNDPFLGVYYHKNNKSWMESEFRVYSSANNCTFEYVSQPFLMDLEGKQGNFKNLREFVFKNIDGYFKIYSKHTPINLVRDLPQGFSALEPLVDLPIGINITRFQTLLALHRSYLTPGDSSSGWTAGAAAYYVGYLQPRTFLLKYNENGTITDAVDCALDPLSETKCTLKSFTVEKGIYQTSNFRVQPTESIVRFPNITNLCPFGEVFNATRFASVYAWNRKRISNCVADYSVLYNSASFSTFKCYGVSPTKLNDLCFTNVYADSFVIRGDEVRQIAPGQTGKIADYNYKLPDDFTGCVIAWNSNNLDSKVGGNYNYLYRLFRRSNLKPFERDISTEIYQAGSTPCNGVEGFNCYFPLQSYGFQPTNGVGYQPYRVVVLSFELLPAPATVCGPKKSTNLVKNKCVNFNFNGLTGTGVLTESNKKFLPFQQFGRDIADTTDAVRDPQTLEILDITPCSFGGVSVITPGTNTSNQVAVLYQGVNCTEVPVAIHADQLTPTWRVYSTGSNVFQTRAGCLIGAEHVNNSYECDIPIGAGICASYQTQTNSPRRARSVASQSIIAYTMSLGAENSVAYSNNSIAIPTNFTISVTTEILPVSMTKTSVDCTMYICGDSTECSNLLLQYGSFCTQLNRALTGIAVEQDKNTQEVFAQVKQIYKTPPIKDFGGFNFSQILPDPSKPSKRSFIEDLLFNKVTLADAGFIKQYGDCLGDIAARDLICAQKFNGLTVLPPLLTDEMIAQYTSALLAGTITSGWTFCAGAALQIPFAMQMAYRFNGIGVTQNVLYENQKLIANQFNSAIGKIQDSLSSAAPALGKLQDVVNQNAQALNTLVKQLSSNFGAISSVLNDILSRLDKVEAEVQIDRLITGRLQSLQTYVTQQLIRAAEIRASANLAATKMSECVCGQSKRVDFCGKGYHLMSFPQSAPHGVVFLHVTYVPAQEKNFTTAPAICHDGKAHFPREGVFVSNGTHWFVTQRNFYEPQIITTDNTFVSGNCDVVIGIVNNTVYDPLQPELDSFKEELDKYFKNHTSPDVDLGDISGINASVVNIQKEIDRLNEVAKNLNESLIDLQELGKYEQYIKGGGGSDIIKLLNEQVNKEMQSSNLYMSMSSWCYTHSLDGAGLFLFDHAAEEYEHAKKLIIFLNENNVPVQLTSISAPEHKFEGLTQIFQKAYEHEQHISESINNIVDHAIKSKDHATFNFLQWYVAEQHEEEVLFKDILDKIELIGNENHGLYLADQYVKGIAKSRKS

SEQ ID NO: 5188 - protein, 1379 aa, Artificial Sequence
  SARS-CoV-2/USA/WA8-UW5/2020__EPI_ISL_413486 spike protein (1-1211)(G889C_L1034C) Ferritin construct
MFVFLVLLPLVSSQCVNLTTRTQLPPAYTNSFTRGVYYPDKVFRSSVLHSTQDLFLPFFSNVTWFHAIHVSGTNGTKRFDNPVLPFNDGVYFASTEKSNIIRGWIFGTTLDSKTQSLLIVNNATNVVIKVCEFQFCNDPFLGVYYHKNNKSWMESEFRVYSSANNCTFEYVSQPFLMDLEGKQGNFKNLREFVFKNIDGYFKIYSKHTPINLVRDLPQGFSALEPLVDLPIGINITRFQTLLALHRSYLTPGDSSSGWTAGAAAYYVGYLQPRTFLLKYNENGTITDAVDCALDPLSETKCTLKSFTVEKGIYQTSNFRVQPTESIVRFPNITNLCPFGEVFNATRFASVYAWNRKRISNCVADYSVLYNSASFSTFKCYGVSPTKLNDLCFTNVYADSFVIRGDEVRQIAPGQTGKIADYNYKLPDDFTGCVIAWNSNNLDSKVGGNYNYLYRLFRKSNLKPFERDISTEIYQAGSTPCNGVEGFNCYFPLQSYGFQPTNGVGYQPYRVVVLSFELLHAPATVCGPKKSTNLVKNKCVNFNFNGLTGTGVLTESNKKFLPFQQFGRDIADTTDAVRDPQTLEILDITPCSFGGVSVITPGTNTSNQVAVLYQDVNCTEVPVAIHADQLTPTWRVYSTGSNVFQTRAGCLIGAEYVNNSYECDIPIGAGICASYQTQTNSPRRARSVASQSIIAYTMSLGAENSVAYSNNSIAIPTNFTISVTTEILPVSMTKTSVDCTMYICGDSTECSNLLLQYGSFCTQLNRALTGIAVEQDKNTQEVFAQVKQIYKTPPIKDFGGFNFSQILPDPSKPSKRSFIEDLLFNKVTLADAGFIKQYGDCLGDIAARDLICAQKFNGLTVLPPLLTDEMIAQYTSALLAGTITSGWTFCAGAALQIPFAMQMAYRFNGIGVTQNVLYENQKLIANQFNSAIGKIQDSLSSTASALGKLQDVVNQNAQALNTLVKQLSSNFGAISSVLNDILSRLDKVEAEVQIDRLITGRLQSLQTYVTQQLIRAAEIRASANLAATKMSECVCGQSKRVDFCGKGYHLMSFPQSAPHGVVFLHVTYVPAQEKNFTTAPAICHDGKAHFPREGVFVSNGTHWFVTQRNFYEPQIITTDNTFVSGNCDVVIGIVNNTVYDPLQPELDSFKEELDKYFKNHTSPDVDLGDISGINASVVNIQKEIDRLNEVAKNLNESLIDLQELGKYEQYIKGGGGSDIIKLLNEQVNKEMQSSNLYMSMSSWCYTHSLDGAGLFLFDHAAEEYEHAKKLIIFLNENNVPVQLTSISAPEHKFEGLTQIFQKAYEHEQHISESINNIVDHAIKSKDHATFNFLQWYVAEQHEEEVLFKDILDKIELIGNENHGLYLADQYVKGIAKSRKS

SEQ ID NO: 5189 - protein, 1379 aa, Artificial Sequence
  SARS-CoV-2/England/20102000506/2020__EPI_ISL_415147 spike protein (1-1211)(G889C_L1034C) Ferritin construct
MFVFLVLLPLVSSQCVNLTTRTQLPPAYTNSFTRGVYYPDKVFRSSVLHSTQDLFLPFFSNVTWFHAIHVSGTNGTKRFDNPVLPFNDGVYFASTEKSNIIRGWIFGTTLDSKTQSLLIVNNATNVVIKVCEFQFCNDPFLGVYYHKNNKSWMESEFRVYSSANNCTFEYVSQPFLMDLEGKQGNFKNLREFVFKNIDGYFKIYSKHTPINLVRDLPQGFSALEPLVDLPIGINITRFQTLLALHRSYLTPGDSSSGWTAGAAAYYVGYLQPRTFLLKYNENGTITDAVDCALDPLSETKCTLKSFTVEKGIYQTSNFRVQPTESIVRFPNITNLCPFGEVFNATRFASVYAWNRKRISNCVADYSVLYNSASFSTFKCYGVSPTKLNDLCFTNVYADSFVIRGDEVRQIAPGQTGKIADYNYKLPDDFTGCVIAWNSNNLDSKVGGNYNYLYRLFRKSNLKPFERDISTEIYQAGSTPCNGVEGFNCYFPLQSYGFQPTNGVGYQPYRVVVLSFELLHAPATVCGPKKSTNLVKNKCVNFNFNGLTGTGVLTESNKKFLPFQQFGRDIADTTDAVRDPQTLEILDITPCSFGGVSVITPGTNTSNQVAVLYQGVNCTEVPVAIHADQLTPTWRVYSTGSNVFQTRAGCLIGAEHVNNSYECDIPIGAGICASYQTQTNSPRRARSVASQSIIAYTMSLGAENSVAYSNNSIAIPTNFTISVTTEILPVSMTKTSVDCTMYICGDSTECSNLLLQYGSFCTQLNRALTGIAVEQDKNTQEVFAQVKQIYKTPPIKDFGGFNFSQILPDPSKPSKRSFIEDLLFNKVTLADAGFIKQYGYCLGDIAARDLICAQKFNGLTVLPPLLTDEMIAQYTSALLAGTITSGWTFCAGAALQIPFAMQMAYRFNGIGVTQNVLYENQKLIANQFNSAIGKIQDSLSSTASALGKLQDVVNQNAQALNTLVKQLSSNFGAISSVLNDILSRLDKVEAEVQIDRLITGRLQSLQTYVTQQLIRAAEIRASANLAATKMSECVCGQSKRVDFCGKGYHLMSFPQSAPHGVVFLHVTYVPAQEKNFTTAPAICHDGKAHFPREGVFVSNGTHWFVTQRNFYEPQIITTDNTFVSGNCDVVIGIVNNTVYDPLQPELDSFKEELDKYFKNHTSPDVDLGDISGINASVVNIQKEIDRLNEVAKNLNESLIDLQELGKYEQYIKGGGGSDIIKLLNEQVNKEMQSSNLYMSMSSWCYTHSLDGAGLFLFDHAAEEYEHAKKLIIFLNENNVPVQLTSISAPEHKFEGLTQIFQKAYEHEQHISESINNIVDHAIKSKDHATFNFLQWYVAEQHEEEVLFKDILDKIELIGNENHGLYLADQYVKGIAKSRKS

SEQ ID NO: 5190 - protein, 1379 aa, Artificial Sequence
  SARS-CoV-2/Belgium/VAG-03013/2020__EPI_ISL_415155 spike protein (1-1211)(G889C_L1034C) Ferritin construct
MFVFLVLLPLVSSQCVNLTTRTQLPPAYTNSFTRGVYYPDKVFRSSVLHSTQDLFLPFFSNVTWFHAIHVSGTNGTKRFDNPVLPFNDGVYFASTEKSNIIRGWIFGTTLDSKTQSLLIVNNATNVVIKVCEFQFCNDPFLGVYYHKNNKSWMESEFRVYSSANNCTFEYVSQPFLMDLEGKQGNFKNLREFVFKNIDGYFKIYSKHTPINLVRDLPQGFSALEPLVDLPIGINITRFQTLLALHRSYLTPGDSSSGWTAGAAAYYVGYLQPRTFLLKYNENGTITDAVDCALDPLSETKCTLKSFTVEKGIYQTSNFRVQPTESIVRFPNITNLCPFGEVFNATRFASVYAWNRKRISNCVADYSVLYNSASFSTFKCYGVSPTKLNDLCFTNVYADSFVIRGDEVRQIAPGQTGKIADYNYKLPDDFTGCVIAWNSNNLDSKVGGNYNYLYRLFRKSNLKPFERDISTEIYQAGSTPCNGVEGFNCYFPLQSYGFQPTNGVGYQPYRVVVLSFELLHAPATVCGPKKSTNLVKNKCVNFNFNGLTGTGVLTESNKKFLPFQQFGRDIADTTDAVRDPQTLEILDITPCSFGGVSVITPGTNTSNQVAVLYQGVNCTEVPVAIHADQLTPTWRVYSTGSNVFQTRAGCLIGAEHVNNSYECDIPIGAGICASYQTQTNSPRRARSVASQSIIAYTMSLGAENSVAYSNNSIAIPTNFTISVTTEILPVSMTKTSVDCTMYICGDSTECSNLLLQYGSFCTQLNRALTGIAVEQDKNTQEVFAQVKQIYKTPPIKDFGGFNFSQILPDPSKPSKRSFIEDLLFNKVTLADAGFIKQYGDCLGDIAARDLICAQKFNGLTVLPPLLTDEMIAQYTSALLAGTITSGWTFCAGAALQIPFAMQMAYRFNGIGVTQNVLYENQKLIANQFNSAIGKIQDSLSSTATALGKLQDVVNQNAQALNTLVKQLSSNFGAISSVLNDILSRLDKVEAEVQIDRLITGRLQSLQTYVTQQLIRAAEIRASANLAATKMSECVCGQSKRVDFCGKGYHLMSFPQSAPHGVVFLHVTYVPAQEKNFTTAPAICHDGKAHFPREGVFVSNGTHWFVTQRNFYEPQIITTDNTFVSGNCDVVIGIVNNTVYDPLQPELDSFKEELDKYFKNHTSPDVDLGDISGINASVVNIQKEIDRLNEVAKNLNESLIDLQELGKYEQYIKGGGGSDIIKLLNEQVNKEMQSSNLYMSMSSWCYTHSLDGAGLFLFDHAAEEYEHAKKLIIFLNENNVPVQLTSISAPEHKFEGLTQIFQKAYEHEQHISESINNIVDHAIKSKDHATFNFLQWYVAEQHEEEVLFKDILDKIELIGNENHGLYLADQYVKGIAKSRKS

SEQ ID NO: 5191 - protein, 1379 aa, Artificial Sequence
  SARS-CoV-2/Belgium/BC-03016/2020__EPI_ISL_415157 spike protein (1-1211)(G889C_L1034C) Ferritin construct
MFVFLVLLPLVSSQCVNLTTRTQLPPAYTNSFTRGVYYPDKVFRSSVLHSTQDLFLPFFSNVTWFHAIHVSGTNGTKRFDNPVLPFNDGVYFASTEKSNIIRGWIFGTTLDSKTQSLLIVNNATNVVIKVCEFQFCNDPFLGVYYHKNNKSWMESEFRVYSSANNCTFEYVSQPFLMDLEGKQGNFKNLREFVFKNIDGYFKIYSKHTPINLVRDLPQGFSALEPLVDLPIGINITRFQTLLALHRSYLTPGDSSSGWTAGAAAYYVGYLQPRTFLLKYNENGTITDAVDCALDPLSETKCTLKSFTVEKGIYQTSNFRVQPTESIVRFPNITNLCPFGEVFNATRFASVYAWNRKRISNCVADYSVLYNSASFSTFKCYGVSPTKLNDLCFTNVYADSFVIRGDEVRQIAPGQTGKIADYNYKLPDDFTGCVIAWNSNNLDSKVGGNYNYLYRLFRKSNLKPFERDISTEIYQAGSTPCNGVEGFNCYFPLQSYGFQPTNGVGYQPYRVVVLSFELLHAPATVCGPKKSTNLVKNKCVNFNFNGLTGTGVLTESNKKFLPFQQFGRDIADTTDAVRDPQTLEILDITPCSFGGVSVITPGTNTSNQVAVLYQGVNCTEVPVAIHADQLTPTWRVYSTGSNVFQTRAGCLIGAEHVNNSYECDIPIGAGICASYQTQTNSPRRARSVASQSIIAYTMSLGAENSVAYSNNSIAIPTNFTISVTTEILPVSMTKTSVDCTMYICGDSTECSNLLLQYGSFCTQLNRALTGIAVEQDKNTQEVFAQVKQIYKTPPIKDFGGFNFSQILPDPSKPSKRSFIEDLLFNKVTLADAGFIKQYGDCLGDIAARDLICAQKFNGLTVLPPLLTDEMIAQYTSALLAGTITSGWTFCAGAALQIPFAMQMAYRFNGIGVTQNVLYENQKLIANQFNSAIGKIQDSLSSTAPALGKLQDVVNQNAQALNTLVKQLSSNFGAISSVLNDILSRLDKVEAEVQIDRLITGRLQSLQTYVTQQLIRAAEIRASANLAATKMSECVCGQSKRVDFCGKGYHLMSFPQSAPHGVVFLHVTYVPAQEKNFTTAPAICHDGKAHFPREGVFVSNGTHWFVTQRNFYEPQIITTDNTFVSGNCDVVIGIVNNTVYDPLQPELDSFKEELDKYFKNHTSPDVDLGDISGINASVVNIQKEIDRLNEVAKNLNESLIDLQELGKYEQYIKGGGGSDIIKLLNEQVNKEMQSSNLYMSMSSWCYTHSLDGAGLFLFDHAAEEYEHAKKLIIFLNENNVPVQLTSISAPEHKFEGLTQIFQKAYEHEQHISESINNIVDHAIKSKDHATFNFLQWYVAEQHEEEVLFKDILDKIELIGNENHGLYLADQYVKGIAKSRKS

SEQ ID NO: 5192 - protein, 1379 aa, Artificial Sequence
  SARS-CoV-2/Germany/BavPat3/2020__EPI_ISL_414521 spike protein (1-1211)(G889C_L1034C) Ferritin construct
MFVFLVLLPLVSSQCVNLTTRTQLPPAYTNSFTRGVYYPDKVFRSSVLHSTQDLFLPFFSNVTWFHAIHVSGTNGTKRFDNPVLPFNDGVYFASTEKSNIIRGWIFGTTLDSKTQSLLIVNNATNVVIKVCEFQFCNDPFLGVYYHKNNKSWMESEFRVYSSANNCTFEYVSQPFLMDLEGKQGNFKNLREFVFKNIDGYFKIYSKHTPINLVRDLPQGFSALEPLVDLPIGINITRFQTLLALHRSYLTPGDSSSGWTAGAAAYYVGYLQPRTFLLKYNENGTITDAVDCALDPLSETKCTLKSFTVEKGIYQTSNFRVQPTESIVRFPNITNLCPFGEVFNATRFASVYAWNRKRISNCVADYSVLYNSASFSTFKCYGVSPTKLNDLCFTNVYADSFVIRGDEVRQIAPGQTGKIADYNYKLPDDFTGCVIAWNSNNLDSKVGGNYNYLYRLFRKSNLKPFERDISTEIYQAGSTPCNGVEGFNCYFPLQSYGFQPTNGVGYQPYRVVVLSFELLHAPATVCGPKKSTNLVKNKCVNFNFNGLTGTGVLTESNKKFLPFQQFGRDIADTTDAVRDPQTLEILDITPCSFGGVSVITPGTNTSNQVAVLYQDVNCTEVPVAIHADQLTPTWRVYSTGSNVFQTRAGCLIGAEHVNNSYECDIPIGAGICASYQTQTNSPRRARSVASQSIIAYTMSLGAENSVAYSNNSIAIPTNFTISVTTEILPVSMTKTSVDCTMYICGDSTECSNLLLQYGSFCTQLNRALTGIAVEQDKNTQQVFAQVKQIYKTPPIKDFGGFNFSQILPDPSKPSKRSFIEDLLFNKVTLADAGFIKQYGDCLGDIAARDLICAQKFNGLTVLPPLLTDEMIAQYTSALLAGTITSGWTFCAGAALQIPFAMQMAYRFNGIGVTQNVLYENQKLIANQFNSAIGKIQDSLSSTASALGKLQDVVNQNAQALNTLVKQLSSNFGAISSVLNDILSRLDKVEAEVQIDRLITGRLQSLQTYVTQQLIRAAEIRASANLAATKMSECVCGQSKRVDFCGKGYHLMSFPQSAPHGVVFLHVTYVPAQEKNFTTAPAICHDGKAHFPREGVFVSNGTHWFVTQRNFYEPQIITTDNTFVSGNCDVVIGIVNNTVYDPLQPELDSFKEELDKYFKNHTSPDVDLGDISGINASVVNIQKEIDRLNEVAKNLNESLIDLQELGKYEQYIKGGGGSDIIKLLNEQVNKEMQSSNLYMSMSSWCYTHSLDGAGLFLFDHAAEEYEHAKKLIIFLNENNVPVQLTSISAPEHKFEGLTQIFQKAYEHEQHISESINNIVDHAIKSKDHATFNFLQWYVAEQHEEEVLFKDILDKIELIGNENHGLYLADQYVKGIAKSRKS

SEQ ID NO: 5193 - protein, 1379 aa, Artificial Sequence
  SARS-CoV-2/France/HF1805/2020__EPI_ISL_414628 spike protein (1-1211)(G889C_L1034C) Ferritin construct
MFVFLVLLPLVSSQCVNLTTRTQLPPAYTNSFTRGVYYPDKVFRSSVLHSTQDLFLPFFSNVTWFHAIHVSGTNGTKRFDNPVLPFNDGVYFASTEKSNIIRGWIFGTTLDSKTQSLLIVNNATNVVIKVCEFQFCNDPFLGVYYHKNNKSWMESEFRVYSSANNCTFEYVSQPFLMDLEGKQGNFKNLREFVFKNIDGYFKIYSKHTPINLVRDLPQGFSALEPLVDLPIGINITRFQTLLALHRSYLTPGDSSSGWTAGAAAYYVGYLQPRTFLLKYNENGTITDAVDCALDPLSETKCTLKSFTVEKGIYQTSNFRVQPTESIVRFPNITNLCPFGEVFNATRFASVYAWNRKRISNCVADYSVLYNSASFSTFKCYGVSPTKLNDLCFTNVYADSFVIRGDEVRQIAPGQTGKIADYNYKLPDDFTGCVIAWNSNNLDSKVGGNYNYLYRLFRKSNLKPFERDISTEIYQAGSTPCNGVEGFNCYFPLQSYGFQPTNGVGYQPYRVVVLSFELLHAPATVCGPKKSTNLVKNKCVNFNFNGLTGTGVLTESNKKFLPFQQFGRDIADTTDAVRDPQTLEILDITPCSFGGVSVITPGTNTSNQVAVLYQGVNCTEVPVAIHADQLTPTWRVYSTGSNVFQTRAGCLIGAEHVNNSYECDIPIGAGICASYQTQTNSPRRARSVASQSIIAYTMSLGAENSVAYSNNSIAIPTNFTISVTTEILPVSMTKTSVDCTMYICGDSTECSNLLLQYGSFCTQLNRALTGIAVEQDKNTQEVFAQVKQIYKTPPIKDFGGFNFSQILPDPSKPSKRSFIEDLLFNKVTLADAGFIKQYGDCLGDIAARDLICAQKFNGLTVLPPLLTDEMIAQYTSALLAGTITSGWTFCAGAALQIPFAMQMAYRFNGIGVTQNVLYENQKLIANQFNSAIGKIQDSLSSTASALGKLQDVVNQNAQALNTLVKQLSSNFGAISSVLNDILSRLDKVEAEVQIDRLITGRLQSLQTYVTQQLIRAAEIRASANLAATKMSECVCGQSKRVDFCGKGYHLMSFPQSAPHGVVFLHVTYVPAQEKNFTTAPAICHDGKAHFPREGVFVSNGTHWFVTQRNFYEPQIITTDNTFVSGNCDVVIGVVNNTVYDPLQPELDSFKEELDKYFKNHTSPDVDLGDISGINASVVNIQKEIDRLNEVAKNLNESLIDLQELGKYEQYIKGGGGSDIIKLLNEQVNKEMQSSNLYMSMSSWCYTHSLDGAGLFLFDHAAEEYEHAKKLIIFLNENNVPVQLTSISAPEHKFEGLTQIFQKAYEHEQHISESINNIVDHAIKSKDHATFNFLQWYVAEQHEEEVLFKDILDKIELIGNENHGLYLADQYVKGIAKSRKS

SEQ ID NO: 5194 - protein, 1379 aa, Artificial Sequence
  SARS-CoV-2/Netherlands/ZuidHolland_9/2020__EPI_ISL_414445 spike protein (1-1211)(G889C_L1034C) Ferritin construct
MFVFLVLLPLVSSQCVNLTTRTQLPPAYTNSFTRGVYYPDKVFRSSVLHSTQDLFLPFFSNVTWFHAIHVSGTNGTKRFDNPVLPFNDGVYFASTEKSNIIRGWIFGTTLDSKTQSLLIVNNATNVVIKVCEFQFCNDPFLGVYYHKNNKSWMESEFRVYSSANNCTFEYVSQPFLMDLEGKQGNFKNLREFVFKNIDGYFKIYSKHTPINLVRDLPQGFSALEPLVDLPIGINITRFQTLLALHRSYLTPGDSSSGWTAGAAAYYVGYLQPRTFLLKYNENGTITDAVDCALDPLSETKCTLKSFTVEKGIYQTSNFRVQPTESIVRFPNITNLCPFGEVFNATRFASVYAWNRKRISNCVADYSVLYNSASFSTFKCYGVSPTKLNDLCFTNVYADSFVIRGDEVRQIAPGQTGKIADYNYKLPDDFTGCVIAWNSNNLDSKVGGNYNYLYRLFRKSNLKPFERDISTEIYQAGSTPCNGVEGFNCYFPLQSYGFQPTNGVGYQPYRVVVLSFELLHAPATVCGPKKSTNLVKNKCVNFNFNGLTGTGVLTESNKKFLPFQQFGRDIADTTDAVRDPQTLEILDITPCSFGGVSVITPGTNTSNQVAVLYQGVNCTEVPVAIHADQLTPTWRVYSTGSNVFQTRAGCLIGAEHVNNSYECDIPIGAGICASYQTQTNSPRRARSVASQSIIAYTMSLGAENSVAYSNNSIAIPTNFTISVTTEILPVSMTKTSVDCTMYICGDSTECSNLLLQYGSFCTQLNRALTGIAVEQDKNTQEVFAQVKQIYKTPPIKDFGGFNFSQILPDPSKPSKRSFIEDLLFNKVTLADAGFIKQYGDCLGDIAARDLICVQKFNGLTVLPPLLTDEMIAQYTSALLAGTITSGWTFCAGAALQIPFAMQMAYRFNGIGVTQNVLYENQKLIANQFNSAIGKIQDSLSSTASALGKLQDVVNQNAQALNTLVKQLSSNFGAISSVLNDILSRLDKVEAEVQIDRLITGRLQSLQTYVTQQLIRAAEIRASANLAATKMSECVCGQSKRVDFCGKGYHLMSFPQSAPHGVVFLHVTYVPAQEKNFTTAPAICHDGKAHFPREGVFVSNGTHWFVTQRNFYEPQIITTDNTFVSGNCDVVIGIVNNTVYDPLQPELDSFKEELDKYFKNHTSPDVDLGDISGINASVVNIQKEIDRLNEVAKNLNESLIDLQELGKYEQYIKGGGGSDIIKLLNEQVNKEMQSSNLYMSMSSWCYTHSLDGAGLFLFDHAAEEYEHAKKLIIFLNENNVPVQLTSISAPEHKFEGLTQIFQKAYEHEQHISESINNIVDHAIKSKDHATFNFLQWYVAEQHEEEVLFKDILDKIELIGNENHGLYLADQYVKGIAKSRKS

SEQ ID NO: 5195 - protein, 1379 aa, Artificial Sequence
  SARS-CoV-2/Finland/FIN03032020A/2020__EPI_ISL_413602 spike protein (1-1211)(G889C_L1034C) Ferritin construct
MFVFLVLLPLVSSQCVNLTTRTQLPPAYTNSFTRGVYYPDKVFRSSVLHSTQDLFLPFFSNVTWFHAIHVSGTNGTKRFDNPVLPFNDGVYFASTEKSNIIRGWIFGTTLDSKTQSLLIVNNATNVVIKVCEFQFCNDPFLGVYYHKNNKSWMESEFRVYSSANNCTFEYVSQPFLMDLEGKQGNFKNLREFVFKNIDGYFKIYSKHTPINLVRDLPQGFSALEPLVDLPIGINITRFQTLLALHRSYLTPGDSSSGWTAGAAAYYVGYLQPRTFLLKYNENGTITDAVDCALDPLSETKCTLKSFTVEKGIYQTSNFRVQPTESIVRFPNITNLCPFGEVFNATRFASVYAWNRKRISNCVADYSVLYNSASFSTFKCYGVSPTKLNDLCFTNVYADSFVIRGDEVRQIAPGQTGKIADYNYKLPDDFTGCVISWNSNNLDSKVGGNYNYLYRLFRKSNLKPFERDISTEIYQAGSTPCNGVEGFNCYFPLQSYGFQPTNGVGYQPYRVVVLSFELLHAPATVCGPKKSTNLVKNKCVNFNFNGLTGTGVLTESNKKFLPFQQFGRDIADTTDAVRDPQTLEILDITPCSFGGVSVITPGTNTSNQVAVLYQGVNCTEVPVAIHADQLTPTWRVYSTGSNVFQTRAGCLIGAEHVNNSYECDIPIGAGICASYQTQTNSPRRARSVASQSIIAYTMSLGAENSVAYSNNSIAIPTNFTISVTTEILPVSMTKTSVDCTMYICGDSTECSNLLLQYGSFCTQLNRALTGIAVEQDKNTQEVFAQVKQIYKTPPIKDFGGFNFSQILPDPSKPSKRSFIEDLLFNKVTLADAGFIKQYGDCLGDIAARDLICAQKFNGLTVLPPLLTDEMIAQYTSALLAGTITSGWTFCAGAALQIPFAMQMAYRFNGIGVTQNVLYENQKLIANQFNSAIGKIQDSLSSTASALGKLQDVVNQNAQALNTLVKQLSSNFGAISSVLNDILSRLDKVEAEVQIDRLITGRLQSLQTYVTQQLIRAAEIRASANLAATKMSECVCGQSKRVDFCGKGYHLMSFPQSAPHGVVFLHVTYVPAQEKNFTTAPAICHDGKAHFPREGVFVSNGTHWFVTQRNFYEPQIITTDNTFVSGNCDVVIGIVNNTVYDPLQPELDSFKEELDKYFKNHTSPDVDLGDISGINASVVNIQKEIDRLNEVAKNLNESLIDLQELGKYEQYIKGGGGSDIIKLLNEQVNKEMQSSNLYMSMSSWCYTHSLDGAGLFLFDHAAEEYEHAKKLIIFLNENNVPVQLTSISAPEHKFEGLTQIFQKAYEHEQHISESINNIVDHAIKSKDHATFNFLQWYVAEQHEEEVLFKDILDKIELIGNENHGLYLADQYVKGIAKSRKS

SEQ ID NO: 5196 - protein, 1379 aa, Artificial Sequence
  SARS-CoV-2/France/GE1977/2020__EPI_ISL_414632 spike protein (1-1211)(G889C_L1034C) Ferritin construct
MFVFLVLLPLVSSQCVNLTTRTQLPPAYTNSFTRGVYYPDKVFRSSVLHSTQDLFLPFFSNVTWFHAIHVSGTNGTKRFDNPVLPFNDGVYFASTEKSNIIRGWIFGTTLDSKTQSLLIVNNATNVVIKVCEFQFCNDPFLGVYYHKNNKSWMESEFRVYSSANNCTFEYVSQPFLMDLEGKQGNFKNLREFVFKNIDGYFKIYSKHTPINLVRDLPQGFSALEPLVDLPIGINITRFQTLLALHRSYLTPGDSSSGWTAGAAAYYVGYLQPRTFLLKYNENGTITDAVDCALDPLSETKCTLKSFTVEKGIYQTSNFRVQPTESIVRFPNITNLCPFGEVFNATRFASVYAWNRKRISNCVADYSVLYNSASFSTFKCYGVSPTKLNDLCFTNVYADSFVIRGDEVRQIAPGQTGKIADYNYKLPDDFTGCVIAWNSNNLDSKVGGNYNYLYRLFRKSNLKPFERDISTEIYQAGSTPCNGVEGFNCYFPLQSYGFQPTNGVGYQPYRVVVLSFELLHAPATVCGPKKSTNLVKNKCVNFNFNGLTGTGVLTESNKKFLPFQQFGRDIADTTDAVRDPQTLEILDITPCSFGGVSVITPGTNTSNQVAVLYQGVNCTEVPVAIHADQLTPTWRVYSTGSNVFQTRAGCLIGAEHVNNSYECDIPIGAGICASYQTQTNSPRRARSVASQSIIAYTMSLGAENSVAYSNNSIAIPTNFTISVTTEILPVSMTKTSVDCTMYICGDSTECSNLLLQYGSFCTQLNRALTGIAVEQDKNTQEVFAQVKQIYKTPPIKDFGGFNFSQILPDPSKPSKRSFIEDLLFNKVTLADAGFIKQYGDCLGDIAARDLICAQKFNGLTVLPPLLTDEMIAQYTSALLAGTITSGWTFCAGAALQIPFAMQMAYRFNGIGVTQNVLYENQKLIANQFNSAIGKIQDSLFSTASALGKLQDVVNQNAQALNTLVKQLSSNFGAISSVLNDILSRLDKVEAEVQIDRLITGRLQSLQTYVTQQLIRAAEIRASANLAATKMSECVCGQSKRVDFCGKGYHLMSFPQSAPHGVVFLHVTYVPAQEKNFTTAPAICHDGKAHFPREGVFVSNGTHWFVTQRNFYEPQIITTDNTFVSGNCDVVIGIVNNTVYDPLQPELDSFKEELDKYFKNHTSPDVDLGDISGINASVVNIQKEIDRLNEVAKNLNESLIDLQELGKYEQYIKGGGGSDIIKLLNEQVNKEMQSSNLYMSMSSWCYTHSLDGAGLFLFDHAAEEYEHAKKLIIFLNENNVPVQLTSISAPEHKFEGLTQIFQKAYEHEQHISESINNIVDHAIKSKDHATFNFLQWYVAEQHEEEVLFKDILDKIELIGNENHGLYLADQYVKGIAKSRKS

SEQ ID NO: 5197 - protein, 1379 aa, Artificial Sequence
  SARS-CoV-2/Finland/FIN-313/2020__EPI_ISL_414641 spike protein (1-1211)(G889C_L1034C) Ferritin construct
MFVFLVLLPLVSSQCVNLTTRTQLPPAYTNSFTRGVYYPDKVFRSSVLHSTQDLFLPFFSNVTWFHAIHVSGTNGTKRFDNPVLPFNDGVYFASTEKSNIIRGWIFGTTLDSKTQSLLIVNNATNVVIKVCEFQFCNDPFLGVYYHKNNKSWMESEFRVYSSANNCTFEYVSQPFLMDLEGKQGNFKNLREFVFKNIDGYFKIYSKHTPINLVRDLPQGFSALEPLVDLPIGINITRFKTLLALHRSYLTPGDSSSGWTAGAAAYYVGYLQPRTFLLKYNENGTITDAVDCALDPLSETKCTLKSFTVEKGIYQTSNFRVQPTESIVRFPNITNLCPFGEVFNATRFASVYAWNRKRISNCVADYSVLYNSASFSTFKCYGVSPTKLNDLCFTNVYADSFVIRGDEVRQIAPGQTGKIADYNYKLPDDFTGCVIAWNSNNLDSKVGGNYNYLYRLFRKSNLKPFERDISTEIYQAGSTPCNGVEGFNCYFPLQSYGFQPTNGVGYQPYRVVVLSFELLHAPATVCGPKKSTNLVKNKCVNFNFNGLTGTGVLTESNKKFLPFQQFGRDIADTTDAVRDPQTLEILDITPCSFGGVSVITPGTNTSNQVAVLYQGVNCTEVPVAIHADQLTPTWRVYSTGSNVFQTRAGCLIGAEHVNNSYECDIPIGAGICASYQTQTNSPRRARSVASQSIIAYTMSLGAENSVAYSNNSIAIPTNFTISVTTEILPVSMTKTSVDCTMYICGDSTECSNLLLQYGSFCTQLNRALTGIAVEQDKNTQEVFAQVKQIYKTPPIKDFGGFNFSQILPDPSKPSKRSFIEDLLFNKVTLADAGFIKQYGDCLGDIAARDLICAQKFNGLTVLPPLLTDEMIAQYTSALLAGTITSGWTFCAGAALQIPFAMQMAYRFNGIGVTQNVLYENQKLIANQFNSAIGKIQDSLSSTASALGKLQDVVNQNAQALNTLVKQLSSNFGAISSVLNDILSRLDKVEAEVQIDRLITGRLQSLQTYVTQQLIRAAEIRASANLAATKMSECVCGQSKRVDFCGKGYHLMSFPQSAPHGVVFLHVTYVPAQEKNFTTAPAICHDGKAHFPREGVFVSNGTHWFVTQRNFYEPQIITTDNTFVSGNCDVVIGIVNNTVYDPLQPELDSFKEELDKYFKNHTSPDVDLGDISGINASVVNIQKEIDRLNEVAKNLNESLIDLQELGKYEQYIKGGGGSDIIKLLNEQVNKEMQSSNLYMSMSSWCYTHSLDGAGLFLFDHAAEEYEHAKKLIIFLNENNVPVQLTSISAPEHKFEGLTQIFQKAYEHEQHISESINNIVDHAIKSKDHATFNFLQWYVAEQHEEEVLFKDILDKIELIGNENHGLYLADQYVKGIAKSRKS

SEQ ID NO: 5198 - protein, 1379 aa, Artificial Sequence
  SARS-CoV-2/Netherlands/ZuidHolland_2/2020__EPI_ISL_414556 spike protein (1-1211)(G889C_L1034C) Ferritin construct
MFVFLVLLPLVSSQCVNLTTRTQLPPAYTNSFTRGVYYPDKVFRSSVLHSTQDLFLPFFSNVTWFHAIHVSGTNGTKRFDNPVLPFNDGVYFASTEKSNIIRGWIFGTTLDSKTQSLLIVNNATNVVIKVCEFQFCNDPFLGVYYHKNNKSWMESEFRVYSSANNCTFEYVSQPFLMDLEGKQGNFKNLREFVFKNIDGYFKIYSKHTPINLVRDLPQGFSALEPLVDLPIGINITRFQTLLALHRSYLTPGDSSSGWTAGAAAYYVGYLQPRTFLLKYNENGTITDAVDCALDPLSETKCTLKSFTVEKGIYQTSNFRVQPTESIVRFPNITNLCPFGEVFNATRFASVYAWNRKRISNCVADYSVLYNSASFSTFKCYGVSPTKLNDLCFTNVYADSFVIRGDEVRQIAPGQTGKIADYNYKLPDDFTGCVIAWNSNNLDSKVGGNYNYLYRLFRKSNLKPFERDISTEIYQAGSTPCNGVEGFNCYFPLQSYGFQPTNGVGYQPYRVVVLSFELLHAPATVCGPKKSTNLVKNKCVNFNFNGLTGTGVLTESNKKFLPFQQFGRDIADTTDAVRDPQTLEILDITPCSFGGVSVITPGTNTSNQVAVLYQGVNCTEVPVAIHADQLTPTWRVYSTGSNVFQTRAGCLIGAEHVNNSYECDIPIGAGICASYQTQTNSPRRARSVASQSIIAYTMSLGAENSVAYSNNSIAIPTNFTISVTTEILPVSMTKTSVDCTMYICGDSTECSNLLLQYGSFCTQLNRALTGIALEQDKNTQEVFAQVKQIYKTPPIKDFGGFNFSQILPDPSKPSKRSFIEDLLFNKVTLADAGFIKQYGDCLGDIAARDLICAQKFNGLTVLPPLLTDEMIAQYTSALLAGTITSGWTFCAGAALQIPFAMQMAYRFNGIGVTQNVLYENQKLIANQFNSAIGKIQDSLSSTASALGKLQDVVNQNAQALNTLVKQLSSNFGAISSVLNDILSRLDKVEAEVQIDRLITGRLQSLQTYVTQQLIRAAEIRASANLAATKMSECVCGQSKRVDFCGKGYHLMSFPQSAPHGVVFLHVTYVPAQEKNFTTAPAICHDGKAHFPREGVFVSNGTHWFVTQRNFYEPQIITTDNTFVSGNCDVVIGIVNNTVYDPLQPELDSFKEELDKYFKNHTSPDVDLGDISGINASVVNIQKEIDRLNEVAKNLNESLIDLQELGKYEQYIKGGGGSDIIKLLNEQVNKEMQSSNLYMSMSSWCYTHSLDGAGLFLFDHAAEEYEHAKKLIIFLNENNVPVQLTSISAPEHKFEGLTQIFQKAYEHEQHISESINNIVDHAIKSKDHATFNFLQWYVAEQHEEEVLFKDILDKIELIGNENHGLYLADQYVKGIAKSRKS

SEQ ID NO: 5199 - protein, 1379 aa, Artificial Sequence
  SARS-CoV-2/USA/WA-UW31/2020__EPI_ISL_414618 spike protein (1-1211)(G889C_L1034C) Ferritin construct
MFVFLVLLPLVSSQCVNLTTRTQLPPAYTNSFTRGVYYPDKVFRSSVLHSTQDLFLPFFSNVTWFHAIHVSGTNGTKRFDNPVLPFNDGVYFASTEKSNIIRGWIFGTTLDSKTQSLLIVNNATNVVIKVCEFQFCNDPFLGVYYHKNNKSWMESEFRVYSSANNCTFEYVSQPFLMDLEGKQGNFKNLREFVFKNIDGYFKIYSKHTPINLVRDLPQGFSALEPLVDLPIGINITRFQTLLALHRSYLTPGDSSSGWTAGAAAYYVGYLQPRTFLLKYNENGTITDAVDCALDPLSETKCTLKSFTVEKGIYQTSNFRVQPTESIVRFPNITNLCPFGEVFNATRFASVYAWNRKRISNCVADYSVLYNSASFSTFKCYGVSPTKLNDLCFTNVYADSFVIRGDEVRQIAPGQTGKIADYNYKLPDDFTGCVIAWNSNNLDSKVGGNYNYLYRLFRKSNLKPFERDISTEIYQAGSTPCNGAEGFNCYFPLQSYGFQPTNGVGYQPYRVVVLSFELLHAPATVCGPKKSTNLVKNKCVNFNFNGLTGTGVLTESNKKFLPFQQFGRDIADTTDAVRDPQTLEILDITPCSFGGVSVITPGTNTSNQVAVLYQDVNCTEVPVAIHADQLTPTWRVYSTGSNVFQTRAGCLIGAEHVNNSYECDIPIGAGICASYQTQTNSPRRARSVASQSIIAYTMSLGAENSVAYSNNSIAIPTNFTISVTTEILPVSMTKTSVDCTMYICGDSTECSNLLLQYGSFCTQLNRALTGIAVEQDKNTQEVFAQVKQIYKTPPIKDFGGFNFSQILPDPSKPSKRSFIEDLLFNKVTLADAGFIKQYGDCLGDIAARDLICAQKFNGLTVLPPLLTDEMIAQYTSALLAGTITSGWTFCAGAALQIPFAMQMAYRFNGIGVTQNVLYENQKLIANQFNSAIGKIQDSLSSTASALGKLQDVVNQNAQALNTLVKQLSSNFGAISSVLNDILSRLDKVEAEVQIDRLITGRLQSLQTYVTQQLIRAAEIRASANLAATKMSECVCGQSKRVDFCGKGYHLMSFPQSAPHGVVFLHVTYVPAQEKNFTTAPAICHDGKAHFPREGVFVSNGTHWFVTQRNFYEPQIITTDNTFVSGNCDVVIGIVNNTVYDPLQPELDSFKEELDKYFKNHTSPDVDLGDISGINASVVNIQKEIDRLNEVAKNLNESLIDLQELGKYEQYIKGGGGSDIIKLLNEQVNKEMQSSNLYMSMSSWCYTHSLDGAGLFLFDHAAEEYEHAKKLIIFLNENNVPVQLTSISAPEHKFEGLTQIFQKAYEHEQHISESINNIVDHAIKSKDHATFNFLQWYVAEQHEEEVLFKDILDKIELIGNENHGLYLADQYVKGIAKSRKS

SEQ ID NO: 5200 - protein, 1379 aa, Artificial Sequence
  SARS-CoV-2/South Korea/SNU01/2020__EPI_ISL_411929 spike protein (1-1211)(G889C_L1034C) Ferritin construct
MFVFLVLLPLVSSQCVNLTTRTQLPPAYTNSFTRGVYYPDKVFRSSVLHSTQDLFLPFFSNVTWFHAIHVSGTNGTKRFDNPVLPFNDGVYFASTEKSNIIRGWIFGTTLDSKTQSLLIVNNATNVVIKVCEFQFCNDPFLGVYYHKNNKSWMESEFRVYSSANNCTFEYVSQPFLMDLEGKQGNFKNLREFVFKNIDGYFKIYSKHTPINLVRDLPQGFWALEPLVDLPIGINITRFQTLLALHRSYLTPGDSSSGWTAGAAAYYVGYLQPRTFLLKYNENGTITDAVDCALDPLSETKCTLKSFTVEKGIYQTSNFRVQPTESIVRFPNITNLCPFGEVFNATRFASVYAWNRKRISNCVADYSVLYNSASFSTFKCYGVSPTKLNDLCFTNVYADSFVIRGDEVRQIAPGQTGKIADYNYKLPDDFTGCVIAWNSNNLDSKVGGNYNYLYRLFRKSNLKPFERDISTEIYQAGSTPCNGVEGFNCYFPLQSYGFQPTNGVGYQPYRVVVLSFELLHAPATVCGPKKSTNLVKNKCVNFNFNGLTGTGVLTESNKKFLPFQQFGRDIADTTDAVRDPQTLEILDITPCSFGGVSVITPGTNTSNQVAVLYQDVNCTEVPVAIHADQLTPTWRVYSTGSNVFQTRAGCLIGAEHVNNSYECDIPIGAGICASYQTQTNSPRRARSVASQSIIAYTMSLGAENSVAYSNNSIAIPTNFTISVTTEILPVSMTKTSVDCTMYICGDSTECSNLLLQYGSFCTQLNRALTGIAVEQDKNTQEVFAQVKQIYKTPPIKDFGGFNFSQILPDPSKPSKRSFIEDLLFNKVTLADAGFIKQYGDCLGDIAARDLICAQKFNGLTVLPPLLTDEMIAQYTSALLAGTITSGWTFCAGAALQIPFAMQMAYRFNGIGVTQNVLYENQKLIANQFNSAIGKIQDSLSSTASALGKLQDVVNQNAQALNTLVKQLSSNFGAISSVLNDILSRLDKVEAEVQIDRLITGRLQSLQTYVTQQLIRAAEIRASANLAATKMSECVCGQSKRVDFCGKGYHLMSFPQSAPHGVVFLHVTYVPAQEKNFTTAPAICHDGKAHFPREGVFVSNGTHWFVTQRNFYEPQIITTDNTFVSGNCDVVIGIVNNTVYDPLQPELDSFKEELDKYFKNHTSPDVDLGDISGINASVVNIQKEIDRLNEVAKNLNESLIDLQELGKYEQYIKGGGGSDIIKLLNEQVNKEMQSSNLYMSMSSWCYTHSLDGAGLFLFDHAAEEYEHAKKLIIFLNENNVPVQLTSISAPEHKFEGLTQIFQKAYEHEQHISESINNIVDHAIKSKDHATFNFLQWYVAEQHEEEVLFKDILDKIELIGNENHGLYLADQYVKGIAKSRKS

SEQ ID NO: 5201 - protein, 1379 aa, Artificial Sequence
  SARS-CoV-2/China/WF0004/2020__EPI_ISL_413694 spike protein (1-1211)(G889C_L1034C) Ferritin construct
MFVFLVLLPLVSSQCVNLTTRTQLPPAYTNSFTRGVYYPDKVFRSSVLHSTQDLFLPFFSNVTWFHAIHVSGTNGTKRFDNPVLPFNDGVYFASTEKSNIIRGWIFGTTLDSKTQSLLIVNNATNVVIKVCEFQFCNDPFLGVYYHKNNKSWTESEFRVYSSANNCTFEYVSQPFLMDLEGKQGNFKNLREFVFKNIDGYFKIYSKHTPINLVRDLPQGFSALEPLVDLPIGINITRFQTLLALHRSYLTPGDSSSGWTAGAAAYYVGYLQPRTFLLKYNENGTITDAVDCALDPLSETKCTLKSFTVEKGIYQTSNFRVQPTESIVRFPNITNLCPFGEVFNATRFASVYAWNRKRISNCVADYSVLYNSASFSTFKCYGVSPTKLNDLCFTNVYADSFVIRGDEVRQIAPGQTGKIADYNYKLPDDFTGCVIAWNSNNLDSKVGGNYNYLYRLFRKSNLKPFERDISTEIYQAGSTPCNGVEGFNCYFPLQSYGFQPTNGVGYQPYRVVVLSFELLHAPATVCGPKKSTNLVKNKCVNFNFNGLTGTGVLTESNKKFLPFQQFGRDIADTTDAVRDPQTLEILDITPCSFGGVSVITPGTNTSNQVAVLYQDVNCTEVPVAIHADQLTPTWRVYSTGSNVFQTRAGCLIGAEHVNNSYECDIPIGAGICASYQTQTNSPRRARSVASQSIIAYTMSLGAENSVAYSNNSIAIPTNFTISVTTEILPVSMTKTSVDCTMYICGDSTECSNLLLQYGSFCTQLNRALTGIAVEQDKNTQEVFAQVKQIYKTPPIKDFGGFNFSQILPDPSKPSKRSFIEDLLFNKVTLADAGFIKQYGDCLGDIAARDLICAQKFNGLTVLPPLLTDEMIAQYTSALLAGTITSGWTFCAGAALQIPFAMQMAYRFNGIGVTQNVLYENQKLIANQFNSAIGKIQDSLSSTASALGKLQDVVNQNAQALNTLVKQLSSNFGAISSVLNDILSRLDKVEAEVQIDRLITGRLQSLQTYVTQQLIRAAEIRASANLAATKMSECVCGQSKRFDFCGKGYHLMSFPQSAPHGVVFLHVTYVPAQEKNFTTAPAICHDGKAHFPREGVFVSNGTHWFVTQRNFYEPQIITTDNTFVSGNCDVVIGIVNNTVYDPLQPELDSFKEELDKYFKNHTSPDVDLGDISGINASVVNIQKEIDRLNEVAKNLNESLIDLQELGKYEQYIKGGGGSDIIKLLNEQVNKEMQSSNLYMSMSSWCYTHSLDGAGLFLFDHAAEEYEHAKKLIIFLNENNVPVQLTSISAPEHKFEGLTQIFQKAYEHEQHISESINNIVDHAIKSKDHATFNFLQWYVAEQHEEEVLFKDILDKIELIGNENHGLYLADQYVKGIAKSRKS

SEQ ID NO: 5202 - protein, 1379 aa, Artificial Sequence
  SARS-CoV-2/China/WF0028/2020__EPI_ISL_413791 spike protein (1-1211)(G889C_L1034C) Ferritin construct
MFVFLVLLPLVSSQCVNLTTRTQLPPAYTNSFTRGVYYPDKVFRSSVLHSTQDLFLPFFSNVTWFHAIHVSGTNGTKRFDNPVLPFNDGVYFASTEKSNIIRGWIFGTTLDSKTQSLLIVNNATNVVIKVCEFQFCNDPFLGVYYHKNNKSWMESEFRVYSSANNCTFEYVSQPFLMDLEGKQGNFKNLREFVFKNIDGYFKIYSKHTPINLVRDLPQGFSALEPLVDLPIGINITRFQTLLALHRSYLTPGDSSSGWTAGAAAYYVGYLQPRTFLLKYNENGTITDAVDCALDPLSETKCTLKSFTVEKGIYQTSNFRVQPTESIVRFPNITNLCPFGEVFNATRFASVYAWNRKRISNCVADYSVLYNSASFSTFKCYGVSPTKLNDLCFTNVYADSFVIRGDEVRQIAPGQTGKIADYNYKLPDDFTGCVIAWNSNNLDSKVGGNYNYLYRLFRKSNLKPFERDISTEIYQAGSTPCNGVEGFNCYFPLQSYGFQPTNGVGYQPYRVVVLSFELLHAPATVCGPKKSTNLVKNKCVNFNFNGLTGTGVLTESNKKFLPFQQFGRDIADTTDAVRDPQTLEILDITPCSFGGVSVITPGTNTSNQVAVLYQDVNCTEVPVAIHADQLTPTWRVYSTGSNVFQTRAGCLIGAEHVNNSYECDIPIGAGICASYQTQTNSPRRARSVASQSIIAYTMSLGAENSVAYSNNSIAIPTNFTISVTTEILPVSMTKTSVDCTMYICGDSTECSNLLLQYGSFCTQLNRALTGIAVEQDKNTQEVFAQVKQIYKTPPIKDFGGFNFSQILPDPSKPSKRSFIEDLLFNKVTLADAGFIKQYGDCLGDIAARDLICAQKFNGLTVLPPLLTDEMIAQYTSALLAGTITSGWTFCAGAALQIPFAMQMAYRFNGIGVTQNVLYENQKLIANQFNSAIGKIQDSLSSTASALGKLQDVVNQNAQALNTLVKQLSSNFGAISSVLNDILSRLDKVEAEVQIDRLITGRLQSLQTYVTQQLIRAAEIRASANLAATKMSECVCGQSKRVDFCGKGYHLMSFPQSAPHGVVFLHVTYVPAQEKNFTTAPAICHDGKAHFPREGVFVSNGTHWFVTQRNFYEPQIITTDNTFVSGNCDVVIGIVNNTVYDPLQPELESFKEELDKYFKNHTSPDVDLGDISGINASVVNIQKEIDRLNEVAKNLNESLIDLQELGKYEQYIKGGGGSDIIKLLNEQVNKEMQSSNLYMSMSSWCYTHSLDGAGLFLFDHAAEEYEHAKKLIIFLNENNVPVQLTSISAPEHKFEGLTQIFQKAYEHEQHISESINNIVDHAIKSKDHATFNFLQWYVAEQHEEEVLFKDILDKIELIGNENHGLYLADQYVKGIAKSRKS

SEQ ID NO: 5203 - protein, 1379 aa, Artificial Sequence
  SARS-CoV-2/2019-nCoV/USA-CruiseA-18/2020__MT159716.1 spike protein (1-1211)(G889C_L1034C) Ferritin construct
MFVFLVLLPLVSSQCVNLTTRTQLPPAYTNSFTRGVYYPDKVFRSSVLHSTQDLFLPFFSNVTWFHAIHVSGTNGTKRFDNPVLPFNDGVYFASTEKSNIIRGWIFGTTLDSKTQSLLIVNNATNVVIKVCEFQFCNDPFLGVYYHKNNKSWMESELRVYSSANNCTFEYVSQPFLMDLEGKQGNFKNLREFVFKNIDGYFKIYSKHTPINLVRDLPQGFSALEPLVDLPIGINITRFQTLLALHRSYLTPGDSSSGWTAGAAAYYVGYLQPRTFLLKYNENGTITDAVDCALDPLSETKCTLKSFTVEKGIYQTSNFRVQPTESIVRFPNITNLCPFGEVFNATRFASVYAWNRKRISNCVADYSVLYNSASFSTFKCYGVSPTKLNDLCFTNVYADSFVIRGDEVRQIAPGQTGKIADYNYKLPDDFTGCVIAWNSNNLDSKVGGNYNYLYRLFRKSNLKPFERDISTEIYQAGSTPCNGVEGFNCYFPLQSYGFQPTNGVGYQPYRVVVLSFELLHAPATVCGPKKSTNLVKNKCVNFNFNGLTGTGVLTESNKKFLPFQQFGRDIADTTDAVRDPQTLEILDITPCSFGGVSVITPGTNTSNQVAVLYQDVNCTEVPVAIHADQLTPTWRVYSTGSNVFQTRAGCLIGAEHVNNSYECDIPIGAGICASYQTQTNSPRRARSVASQSIIAYTMSLGAENSVAYSNNSIAIPTNFTISVTTEILPVSMTKTSVDCTMYICGDSTECSNLLLQYGSFCTQLNRALTGIAVEQDKNTQEVFAQVKQIYKTPPIKDFGGFNFSQILPDPSKPSKRSFIEDLLFNKVTLADAGFIKQYGDCLGDIAARDLICAQKFNGLTVLPPLLTDEMIAQYTSALLAGTITSGWTFCAGAALQIPFAMQMAYRFNGIGVTQNVLYENQKLIANQFNSAIGKIQDSLSSTASALGKLQDVVNQNAQALNTLVKQLSSNFGAISSVLNDILSRLDKVEAEVQIDRLITGRLQSLQTYVTQQLIRAAEIRASANLAATKMSECVCGQSKRVDFCGKGYHLMSFPQSAPHGVVFLHVTYVPAQEKNFTTAPAICHDGKAHFPREGVFVSNGTHWFVTQRNFYEPQIITTDNTFVSGNCDVVIGIVNNTVYDPLQPELDSFKEELDKYFKNHTSPDVDLGDISGINASVVNIQKEIDRLNEVAKNLNESLIDLQELGKYEQYIKGGGGSDIIKLLNEQVNKEMQSSNLYMSMSSWCYTHSLDGAGLFLFDHAAEEYEHAKKLIIFLNENNVPVQLTSISAPEHKFEGLTQIFQKAYEHEQHISESINNIVDHAIKSKDHATFNFLQWYVAEQHEEEVLFKDILDKIELIGNENHGLYLADQYVKGIAKSRKS

SEQ ID NO: 5204 - protein, 1379 aa, Artificial Sequence
  SARS-CoV-2/SARS-CoV-2/Yunnan-01/human/2020/CHN__MT049951.1 spike protein (1-1211)(G889C_L1034C) Ferritin construct
MFVFLVLLPLVSSQCVNLTTRTQLPPANTNSFTRGVYYPDKVFRSSVLHSTQDLFLPFFSNVTWFHAIHVSGTNGTKRFDNPVLPFNDGVYFASTEKSNIIRGWIFGTTLDSKTQSLLIVNNATNVVIKVCEFQFCNDPFLGVYYHKNNKSWMESEFRVYSSANNCTFEYVSQPFLMDLEGKQGNFKNLREFVFKNIDGYFKIYSKHTPINLVRDLPQGFSALEPLVDLPIGINITRFQTLLALHRSYLTPGDSSSGWTAGAAAYYVGYLQPRTFLLKYNENGTITDAVDCALDPLSETKCTLKSFTVEKGIYQTSNFRVQPTESIVRFPNITNLCPFGEVFNATRFASVYAWNRKRISNCVADYSVLYNSASFSTFKCYGVSPTKLNDLCFTNVYADSFVIRGDEVRQIAPGQTGKIADYNYKLPDDFTGCVIAWNSNNLDSKVGGNYNYLYRLFRKSNLKPFERDISTEIYQAGSTPCNGVEGFNCYFPLQSYGFQPTNGVGYQPYRVVVLSFELLHAPATVCGPKKSTNLVKNKCVNFNFNGLTGTGVLTESNKKFLPFQQFGRDIADTTDAVRDPQTLEILDITPCSFGGVSVITPGTNTSNQVAVLYQDVNCTEVPVAIHADQLTPTWRVYSTGSNVFQTRAGCLIGAEHVNNSYECDIPIGAGICASYQTQTNSPRRARSVASQSIIAYTMSLGAENSVAYSNNSIAIPTNFTISVTTEILPVSMTKTSVDCTMYICGDSTECSNLLLQYGSFCTQLNRALTGIAVEQDKNTQEVFAQVKQIYKTPPIKDFGGFNFSQILPDPSKPSKRSFIEDLLFNKVTLADAGFIKQYGDCLGDIAARDLICAQKFNGLTVLPPLLTDEMIAQYTSALLAGTITSGWTFCAGAALQIPFAMQMAYRFNGIGVTQNVLYENQKLIANQFNSAIGKIQDSLSSTASALGKLQDVVNQNAQALNTLVKQLSSNFGAISSVLNDILSRLDKVEAEVQIDRLITGRLQSLQTYVTQQLIRAAEIRASANLAATKMSECVCGQSKRVDFCGKGYHLMSFPQSAPHGVVFLHVTYVPAQEKNFTTAPAICHDGKAHFPREGVFVSNGTHWFVTQRNFYEPQIITTDNTFVSGNCDVVIGIVNNTVYDPLQPELDSFKEELDKYFKNHTSPDVDLGDISGINASVVNIQKEIDRLNEVAKNLNESLIDLQELGKYEQYIKGGGGSDIIKLLNEQVNKEMQSSNLYMSMSSWCYTHSLDGAGLFLFDHAAEEYEHAKKLIIFLNENNVPVQLTSISAPEHKFEGLTQIFQKAYEHEQHISESINNIVDHAIKSKDHATFNFLQWYVAEQHEEEVLFKDILDKIELIGNENHGLYLADQYVKGIAKSRKS

SEQ ID NO: 5205 - protein, 1379 aa, Artificial Sequence
  SARS-CoV-2/USA/WA-UW292/2020__EPI_ISL_418077 spike protein (1-1211)(G889C_L1034C) Ferritin construct
MFVFLVLLPLVSSQCVNLTTRTQLPPAYTNSFTRGVYYPDKVFRSSVLHSTQDLFLPFFSNVTWFHAIHVSGTNGTKRFDNPVLPFNDGVYFASTEKSNIIRGWIFGTTLDSKTQSLLIVNNATNVVIKVCEFQFCNDPFLGVYYHKNNKSWMESEFRVYSSANNCTFEYVSQPFLMDLEGKQGNFKNLREFVFKNIDGYFKIYSKHTPINLVRDLPQGFSALEPLVDLPIGINITRFQTLLALHRSYLTPGDSSSGWTAGAAAYYVGYLQPRTFLLKYNENGTITDAVDCALDPLSETKCTLKSFTVEKGIYQTSNFRVQPTESIVRFPNITNLCPFGEVFNATRFASVYAWNRKRISNCVADYSVLYNSASFSTFKCYGVSPTKLNDLCFTNVYADSFVIRGDEVRQIAPGQTGKIADYNYKLPDDFTGCVIAWNSNNLDSKVGGNYNYLYRLFRKSNLKPFERDISTEIYQASSTPCNGVEGFNCYFPLQSYGFQPTNGVGYQPYRVVVLSFELLHAPATVCGPKKSTNLVKNKCVNFNFNGLTGTGVLTESNKKFLPFQQFGRDIADTTDAVRDPQTLEILDITPCSFGGVSVITPGTNTSNQVAVLYQDVNCTEVPVAIHADQLTPTWRVYSTGSNVFQTRAGCLIGAEHVNNSYECDIPIGAGICASYQTQTNSPRRARSVASQSIIAYTMSLGAENSVAYSNNSIAIPTNFTISVTTEILPVSMTKTSVDCTMYICGDSTECSNLLLQYGSFCTQLNRALTGIAVEQDKNTQEVFAQVKQIYKTPPIKDFGGFNFSQILPDPSKPSKRSFIEDLLFNKVTLADAGFIKQYGDCLGDIAARDLICAQKFNGLTVLPPLLTDEMIAQYTSALLAGTITSGWTFCAGAALQIPFAMQMAYRFNGIGVTQNVLYENQKLIANQFNSAIGKIQDSLSSTASALGKLQDVVNQNAQALNTLVKQLSSNFGAISSVLNDILSRLDKVEAEVQIDRLITGRLQSLQTYVTQQLIRAAEIRASANLAATKMSECVCGQSKRVDFCGKGYHLMSFPQSAPHGVVFLHVTYVPAQEKNFTTAPAICHDGKAHFPREGVFVSNGTHWFVTQRNFYEPQIITTDNTFVSGNCDVVIGIVNNTVYDPLQPELDSFKEELDKYFKNHTSPDVDLGDISGINASVVNIQKEIDRLNEVAKNLNESLIDLQELGKYEQYIKGGGGSDIIKLLNEQVNKEMQSSNLYMSMSSWCYTHSLDGAGLFLFDHAAEEYEHAKKLIIFLNENNVPVQLTSISAPEHKFEGLTQIFQKAYEHEQHISESINNIVDHAIKSKDHATFNFLQWYVAEQHEEEVLFKDILDKIELIGNENHGLYLADQYVKGIAKSRKS

SEQ ID NO: 5206 - protein, 1379 aa, Artificial Sequence
  SARS-CoV-2/Iceland/192/2020__EPI_ISL_417819 spike protein (1-1211)(G889C_L1034C) Ferritin construct
MFVFFVLLPLVSSQCVNLTTRTQLPPAYTNSFTRGVYYPDKVFRSSVLHSTQDLFLPFFSNVTWFHAIHVSGTNGTKRFDNPVLPFNDGVYFASTEKSNIIRGWIFGTTLDSKTQSLLIVNNATNVVIKVCEFQFCNDPFLGVYYHKNNKSWMESEFRVYSSANNCTFEYVSQPFLMDLEGKQGNFKNLREFVFKNIDGYFKIYSKHTPINLVRDLPQGFSALEPLVDLPIGINITRFQTLLALHRSYLTPGDSSSGWTAGAAAYYVGYLQPRTFLLKYNENGTITDAVDCALDPLSETKCTLKSFTVEKGIYQTSNFRVQPTESIVRFPNITNLCPFGEVFNATRFASVYAWNRKRISNCVADYSVLYNSASFSTFKCYGVSPTKLNDLCFTNVYADSFVIRGDEVRQIAPGQTGKIADYNYKLPDDFTGCVIAWNSNNLDSKVGGNYNYLYRLFRKSNLKPFERDISTEIYQAGSTPCNGVEGFNCYFPLQSYGFQPTNGVGYQPYRVVVLSFELLHAPATVCGPKKSTNLVKNKCVNFNFNGLTGTGVLTESNKKFLPFQQFGRDIADTTDAVRDPQTLEILDITPCSFGGVSVITPGTNTSNQVAVLYQGVNCTEVPVAIHADQLTPTWRVYSTGSNVFQTRAGCLIGAEHVNNSYECDIPIGAGICASYQTQTNSPRRARSVASQSIIAYTMSLGAENSVAYSNNSIAIPTNFTISVTTEILPVSMTKTSVDCTMYICGDSTECSNLLLQYGSFCTQLNRALTGIAVEQDKNTQEVFAQVKQIYKTPPIKDFGGFNFSQILPDPSKPSKRSFIEDLLFNKVTLADAGFIKQYGDCLGDIAARDLICAQKFNGLTVLPPLLTDEMIAQYTSALLAGTITSGWTFCAGAALQIPFAMQMAYRFNGIGVTQNVLYENQKLIANQFNSAIGKIQDSLSSTASALGKLQDVVNQNAQALNTLVKQLSSNFGAISSVLNDILSRLDKVEAEVQIDRLITGRLQSLQTYVTQQLIRAAEIRASANLAATKMSECVCGQSKRVDFCGKGYHLMSFPQSAPHGVVFLHVTYVPAQEKNFTTAPAICHDGKAHFPREGVFVSNGTHWFVTQRNFYEPQIITTDNTFVSGNCDVVIGIVNNTVYDPLQPELDSFKEELDKYFKNHTSPDVDLGDISGINASVVNIQKEIDRLNEVAKNLNESLIDLQELGKYEQYIKGGGGSDIIKLLNEQVNKEMQSSNLYMSMSSWCYTHSLDGAGLFLFDHAAEEYEHAKKLIIFLNENNVPVQLTSISAPEHKFEGLTQIFQKAYEHEQHISESINNIVDHAIKSKDHATFNFLQWYVAEQHEEEVLFKDILDKIELIGNENHGLYLADQYVKGIAKSRKS

SEQ ID NO: 5207 - protein, 1379 aa, Artificial Sequence
  SARS-CoV-2/Belgium/ULG-6939/2020__EPI_ISL_417020 spike protein (1-1211)(G889C_L1034C) Ferritin construct
MFVFLVLLPLVSSQCVNLTTRTQLPPAYTNSFTRGVYYPDKVFRSSVLHSTQDLFLPFFSNVTWFHAIHVSGTNGTKRFDNPVLPFNDGVYFASTEKSNIIRGWIFGTTLDSKTQSLLIVNNATNVVIKVCEFQFCNDPFLGVYYHKNNKSWMESEFRVYSSANNCTFEYVSQPFLMDLEGKQGNFKNLREFVFKNIDGYFKIYSKHTPINLVRDLPQGFSALEPLVDLPIGINITRFQTLLALHRSYLTPGDSSSGWTAGAAAYYVGYLQPRTFLLKYNENGTITDAVDCALDPLSETKCTLKSFTVEKGIYQTSNFRVQPTESIVRFPNITNLCPFGEVFNATRFASVYAWNRKRISNCVADYSVLYNSASFSTFKCYGVSPTKLNDLCFTNVYADSFVIRGDEVRQIAPGQTGKIADYNYKLPDDFTGCVIAWNSNNLDSKVGGNYNYLYRLFRKSNLKPFERDISTEIYQAGSTPCNGVEGFNCYFPLQSYGFQPTNGVGYQPYRVVVLSFELLHAPATVCGPKKSTNLVKNKCVNFNFNGLTGTGVLTESNKKFLPFQQFGRDIADTTDAVRDPQTLEILDITPCSFGGVSVITPGTNTSNQVAVLYQGVNCTEVPVAIHADQLTPTWRVYSTGSNVFQTRAGCLIGAEHVNNSYECDIPIGAGICASYQTQTNSPRRARSVASQSIIAYTMSLGAENSVVYSNNSIAIPTNFTISVTTEILPVSMTKTSVDCTMYICGDSTECSNLLLQYGSFCTQLNRALTGIAVEQDKNTQEVFAQVKQIYKTPPIKDFGGFNFSQILPDPSKPSKRSFIEDLLFNKVTLADAGFIKQYGDCLGDIAARDLICAQKFNGLTVLPPLLTDEMIAQYTSALLAGTITSGWTFCAGAALQIPFAMQMAYRFNGIGVTQNVLYENQKLIANQFNSAIGKIQDSLSSTASALGKLQDVVNQNAQALNTLVKQLSSNFGAISSVLNDILSRLDKVEAEVQIDRLITGRLQSLQTYVTQQLIRAAEIRASANLAATKMSECVCGQSKRVDFCGKGYHLMSFPQSAPHGVVFLHVTYVPAQEKNFTTAPAICHDGKAHFPREGVFVSNGTHWFVTQRNFYEPQIITTDNTFVSGNCDVVIGIVNNTVYDPLQPELDSFKEELDKYFKNHTSPDVDLGDISGINASVVNIQKEIDRLNEVAKNLNESLIDLQELGKYEQYIKGGGGSDIIKLLNEQVNKEMQSSNLYMSMSSWCYTHSLDGAGLFLFDHAAEEYEHAKKLIIFLNENNVPVQLTSISAPEHKFEGLTQIFQKAYEHEQHISESINNIVDHAIKSKDHATFNFLQWYVAEQHEEEVLFKDILDKIELIGNENHGLYLADQYVKGIAKSRKS

SEQ ID NO: 5208 - protein, 1379 aa, Artificial Sequence
  SARS-CoV-2/France/HF2496/2020__EPI_ISL_418231 spike protein (1-1211)(G889C_L1034C) Ferritin construct
MFVFLVLLPLVSSQCVNLTTRTQLPPAYTNSFTRGVYYPDKVFRSSVLHSTQDLFLPFFSNVTWFHAIHVSGTNGTKRFDNPVLPFNDGVYFASTEKSNIIRGWIFGTTLDSKTQSLLIVNNATNVVIKVCEFQFCNDPFLGVYYHKNNKSWMESEFRVYSSANNCTFEYVSQPFLMDLEGKQGNFKNLREFVFKNIDGYFKIYSKHTPINLVRDLPQGFSALEPLVDLPIGINITRFQTLLALHRSYLTPGDSSSGWTAGAAAYYVGYLQPRTFLLKYNENGTITDAVDCALDPLSETKCTLKSFTVEKGIYQTSNFRVQPTESIVRFPNITNLCPFGEVFNATRFASVYAWNRKRISNCVADYSVLYNSASFSTFKCYGVSPTKLNDLCFTNVYADSFVIRGDEVRQIAPGQTGKIADYNYKLPDDFTGCVIAWNSNNLDSKVGGNYNYLYRLFRKSNLKPFERDISTEIYQAGSTPCNGVEGFNCYFPLQSYGFQPTNGVGYQPYRVVVLSFELLHAPATVCGPKKSTNLVKNKCVNFNFNGLTGTGVLTESNKKFLPFQQFGRDIADTTDAVRDPQTLEILDITPCSFGGVSVITPGTNTSNQVAVLYQGVNCTEVPVAIHADQLTPTWRVYSTGSNVFQTRAGCLIGAEHVNNSYECDIPIGAGICASYQTQTNSPRRARSVASQSIIAYTMSLGAENSVAYSNNSIAIPTNFTISVTTEILPVSMTKTSVDCTMYICGDSTECSNLLLQYGSFCTQLNRALTGIAVEQDKNTQEVFAQVKQIYKTPPIKDFGGFNFSQILPDPSKPSKRSFIEDLLFNKVTLADAGFIKQYGDCLGDIVARDLICAQKFNGLTVLPPLLTDEMIAQYTSALLAGTITSGWTFCAGAALQIPFAMQMAYRFNGIGVTQNVLYENQKLIANQFNSAIGKIQDSLSSTASALGKLQDVVNQNAQALNTLVKQLSSNFGAISSVLNDILSRLDKVEAEVQIDRLITGRLQSLQTYVTQQLIRAAEIRASANLAATKMSECVCGQSKRVDFCGKGYHLMSFPQSAPHGVVFLHVTYVPAQEKNFTTAPAICHDGKAHFPREGVFVSNGTHWFVTQRNFYEPQIITTDNTFVSGNCDVVIGIVNNTVYDPLQPELDSFKEELDKYFKNHTSPDVDLGDISGINASVVNIQKEIDRLNEVAKNLNESLIDLQELGKYEQYIKGGGGSDIIKLLNEQVNKEMQSSNLYMSMSSWCYTHSLDGAGLFLFDHAAEEYEHAKKLIIFLNENNVPVQLTSISAPEHKFEGLTQIFQKAYEHEQHISESINNIVDHAIKSKDHATFNFLQWYVAEQHEEEVLFKDILDKIELIGNENHGLYLADQYVKGIAKSRKS

SEQ ID NO: 5209 - protein, 1379 aa, Artificial Sequence
  SARS-CoV-2/USA/WA-UW291/2020__EPI_ISL_418076 spike protein (1-1211)(G889C_L1034C) Ferritin construct
MFVFLVLLPLVSSQCVNLTTRTQLPPAYTNSFTRGVYYPDKVFRSSVLHSTQDLFLPFFSNVTWFHAIHVSGTNGTKRFDNPVLPFNDGVYFASTEKSNIIRGWIFGTTLDSKTQSLLIVNNATNVVIKVCEFQFCNDPFLGVYYHKNNKSWMESEFRVYSSANNCTFEYVSQPFLMDLEGKQGNFKNLREFVFKNIDGYFKIYSKHTPINLVRDLPQGFSALEPLVDLPIGINITRFQTLLALHRSYLTPGDSSSGWTAGAAAYYVGYLQPRTFLLKYNENGTITDAVDCALDPLSETKCTLKSFTVEKGIYQTSNFRVQPTESIVRFPNITNLCPFGEVFNATRFASVYAWNRKRISNCVADYSVLYNSASFSTFKCYGVSPTKLNDLCFTNVYADSFVIRGDEVRQIAPGQTGKIADYNYKLPDDFTGCVIAWNSNNLDSKVGGNYNYLYRLFRKSNLKPFERDISTEIYQAGSTPCNGVEGFNCYFPLQSYGFQPTNGVGYQPYRVVVLSFELLHAPATVCGPKKSTNLVKNKCVNFNFNGLTGTGVLTESNKKFLPFQQFGRDIADTTDAVRDPQTLEILDITPCSFGGVSVITPGTNTSNQVAVLYQGVNCTEVPVAIHADQLTPTWRVYSTGSNVFQTRAGCLIGAEHVNNSYECDIPIGAGICASYQTQTNSPRRARSVASQSIIAYTMSLGAENSVAYSNNSIAIPTNFTISVTTEILPVSMTKTSVDCTMYICGDSTECSNLLLQYGSFCTQLNRALTGIAVEQDKNTQEVFAQVKQIYKTPPIKDFGGFNFSQILPDPSKPSKRSFIEDLLFNKVTLADAGFIKQYGDCLGDIAARDLICAQKFNGLTVLPPLLTDEMIAQYTSALLAGTITSGWTFCAGAALQIPFAMQMAYRFNGIGVTQNVLYENQKLIANQFNSAIGKIQYSLSSTASALGKLQDVVNQNAQALNTLVKQLSSNFGAISSVLNDILSRLDKVEAEVQIDRLITGRLQSLQTYVTQQLIRAAEIRASANLAATKMSECVCGQSKRVDFCGKGYHLMSFPQSAPHGVVFLHVTYVPAQEKNFTTAPAICHDGKAHFPREGVFVSNGTHWFVTQRNFYEPQIITTDNTFVSGNCDVVIGIVNNTVYDPLQPELDSFKEELDKYFKNHTSPDVDLGDISGINASVVNIQKEIDRLNEVAKNLNESLIDLQELGKYEQYIKGGGGSDIIKLLNEQVNKEMQSSNLYMSMSSWCYTHSLDGAGLFLFDHAAEEYEHAKKLIIFLNENNVPVQLTSISAPEHKFEGLTQIFQKAYEHEQHISESINNIVDHAIKSKDHATFNFLQWYVAEQHEEEVLFKDILDKIELIGNENHGLYLADQYVKGIAKSRKS

SEQ ID NO: 5210 - protein, 1379 aa, Artificial Sequence; identical to SEQ ID NO: 5173
  SARS-CoV-2/Portugal/PT0034/2020__EPI_ISL_418019 spike protein (1-1211)(G889C_L1034C) Ferritin construct

SEQ ID NO: 5211 - protein, 1379 aa, Artificial Sequence
  SARS-CoV-2/Iceland/202/2020__EPI_ISL_417750 spike protein (1-1211)(G889C_L1034C) Ferritin construct
MFVFLVLLPLVSSQCVNLTTRTQLPPAYTNSFTRGVYYPDKVFRSSVLHSTQDLFLPFFSNVTWFHAIHVSGTNGTKRFDNPVLPFNDGVYFASTEKSNIIRGWIFGTTLDSKTQSLLIVNNATNVVIKVCEFQFCNDPFLGVYYHKNNKSWMESEFRVYSSANNCTFEYVSQPFLMDLEGKQGNFKNLREFVFKNIDGYFKIYSKHTPINLVRDLPQGFSALEPLVDLPIGINITRFQTLLALHRSYLTPGDSSSGWTAGAAAYYVGYLQPRTFLLKYNENGTITDAVDCALDPLSETKCTLKSFTVEKGIYQTSNFRVQPTESIVRFPNITNLCPFGEVFNATRFASVYAWNRKRISNCVADYSVLYNSASFSTFKCYGVSPTKLNDLCFTNVYADSFVIRGDEVRQIAPGQTGKIADYNYKLPDDFTGCVIAWNSNNLDSKVGGNYNYLYRLFRKSNLKPFERDISTEIYQAGSTPCNGVEGFNCYFPLQSYGFQPTNGVGYQPYRVVVLSFELLHAPATVCGPKKSTNLVKNKCVNFNFNGLTGTGVLTESNKKFLPFQQFGRDIADTTDAVRDPQTLEILDITPCSFGGVSVITPGTNTSNQVAVLYQDVNCTEVPVAIHADQLTPTWRVYSTGSNVFQTRAGCLIGAEHVNNSYECDIPIGAGICASYQTQTNSPRRARSVASQSIIAYTMSLGAENSVAYSNNSIAIPTNFTISVTTEILPVSMTKTSVDCTMYICGDSTECSNLLLQYGSFCTQLNRALTGIAVEQDKNTQEVFAQVKQIYKTPPIKDFGGFNFSQILPDPSKPSKRSFIEDLLFNKVTLADAGFIKQYGDCLGDIAARDLICAQKFNGLTVLPPLLTDEMIAQYTSALLAGTITSGWTFCAGAALQIPFAMQMAYRFNGIGVTQNVLYENQKLIANQFNSAIGKIQDSLSSTASALGKLQDVVNQNAQALNTLVKQLSSNFGAISSVLNDILSRLDKVEAEVQIDRLITGRLQSLQTYVTQQLIRAAEIRASANLAATKMSECVCGQSKRVDFCGKGYHLMSFPQSAPHGVVFLHVTYVPAQEKNFTTAPAICHDGKAHFPREGVFVSNGTHWFVTQRNFYEPQIITTDNTFVSGNCDVVIGIVNNTVYDPLQPELDSFKEELDKYFKNHTSPDVDLGDIPGINASVVNIQKEIDRLNEVAKNLNESLIDLQELGKYEQYIKGGGGSDIIKLLNEQVNKEMQSSNLYMSMSSWCYTHSLDGAGLFLFDHAAEEYEHAKKLIIFLNENNVPVQLTSISAPEHKFEGLTQIFQKAYEHEQHISESINNIVDHAIKSKDHATFNFLQWYVAEQHEEEVLFKDILDKIELIGNENHGLYLADQYVKGIAKSRKS

SEQ ID NO: 5212 - protein, 1379 aa, Artificial Sequence
  SARS-CoV-2/USA/WA-UW261/2020__EPI_ISL_418046 spike protein (1-1211)(G889C_L1034C) Ferritin construct
MFVFLVLLPLVSSQCVNLTTRTQLPPAYTNSFTRGVYYPDKVFRSSVLHSTQDLFLPFFSNVTWFHAIHVSGTNGTKRFDNPVLPFNDGVYFASTEKSNIIRGWIFGTTLDSKTQSLLIVNNATNVVIKVCEFQFCNDPFLGVYYHKNNKSWMESEFRVYSSANNCTFEYVSQPFLMDLEGKQGNFKNLREFVFKNIDGYFKIYSKHTPINLVRDLPQGFSALEPLVDLPIGINITRFQTLLALHRSYLTPGDSSSGWTAGAAAYYVGYLQPRTFLLKYNENGTITDAVDCALDPLSETKCTLKSFTVEKGIYQTSNFRVQPTESIVRFPNITNLCPFGEVFNATRFTSVYAWNRKRISNCVADYSVLYNSASFSTFKCYGVSPTKLNDLCFTNVYADSFVIRGDEVRQIAPGQTGKIADYNYKLPDDFTGCVIAWNSNNLDSKVGGNYNYLYRLFRKSNLKPFERDISTEIYQAGSTPCNGVEGFNCYFPLQSYGFQPTNGVGYQPYRVVVLSFELLHAPATVCGPKKSTNLVKNKCVNFNFNGLTGTGVLTESNKKFLPFQQFGRDIADTTDAVRDPQTLEILDITPCSFGGVSVITPGTNTSNQVAVLYQDVNCTEVPVAIHADQLTPTWRVYSTGSNVFQTRAGCLIGAEHVNNSYECDIPIGAGICASYQTQTNSPRRARSVASQSIIAYTMSLGAENSVAYSNNSIAIPTNFTISVTTEILPVSMTKTSVDCTMYICGDSTECSNLLLQYGSFCTQLNRALTGIAVEQDKNTQEVFAQVKQIYKTPPIKDFGGFNFSQILPDPSKPSKRSFIEDLLFNKVTLADAGFIKQYGDCLGDIAARDLICAQKFNGLTVLPPLLTDEMIAQYTSALLAGTITSGWTFCAGAALQIPFAMQMAYRFNGIGVTQNVLYENQKLIANQFNSAIGKIQDSLSSTASALGKLQDVVNQNAQALNTLVKQLSSNFGAISSVLNDILSRLDKVEAEVQIDRLITGRLQSLQTYVTQQLIRAAEIRASANLAATKMSECVCGQSKRVDFCGKGYHLMSFPQSAPHGVVFLHVTYVPAQEKNFTTAPAICHDGKAHFPREGVFVSNGTHWFVTQRNFYEPQIITTDNTFVSGNCDVVIGIVNNTVYDPLQPELDSFKEELDKYFKNHTSPDVDLGDISGINASVVNIQKEIDRLNEVAKNLNESLIDLQELGKYEQYIKGGGGSDIIKLLNEQVNKEMQSSNLYMSMSSWCYTHSLDGAGLFLFDHAAEEYEHAKKLIIFLNENNVPVQLTSISAPEHKFEGLTQIFQKAYEHEQHISESINNIVDHAIKSKDHATFNFLQWYVAEQHEEEVLFKDILDKIELIGNENHGLYLADQYVKGIAKSRKS

SEQ ID NO: 5213 - protein, 1379 aa, Artificial Sequence
  SARS-CoV-2/Portugal/PT0035/2020__EPI_ISL_418020 spike protein (1-1211)(G889C_L1034C) Ferritin construct
MFVFLVLLPLVSSQCVNLTTRTQLPPAYTNSFTRGVYYPDKVFRSSVLHSTQDLFLPFFSNVTWFHAIHVSGTNGTKRFDNPVLPFNDGVYFASTEKSNIIRGWIFGTTLDSKTQSLLIVNNATNVVIKVCEFQFCNDPFLGVYYHKNNKSWMESEFRVYSSANNCTFEYVSQPFLMDLEGKQGNFKNLREFVFKNIDGYFKIYSKHTPINLVRDLPQGFSALEPLVDLPIGINITRFQTLLALHRSYLTPGDSSSGWTAGAAAYYVGYLQPRTFLLKYNENGTITDAVDCALDPLSETKCTLKSFTVEKGIYQTSNFRVQPTESIVRFPNITNLCPFGEVFNATRFASVYAWNRKRISNCVADYSVLYNSASFSTFKCYGVSPTKLNDLCFTNVYADSFVIRGDEVRQIAPGQTGKIADYNYKLPDDFTGCVIAWNSNNLDSKVGGNYNYLYRLFRKSNLKPFERDISTEIYQAGSTPCNGVEGFNCYFPLQSYGFQPTNGVGYQPYRVVVLSFELLHAPATVCGPKKSTNLVKNKCVNFNFNGLTGTGVLTESNKKFLPFQQFGRDIADTTDAVRDPQTLEILDITPCSFGGVSVITPGTNTSNQVAVLYQDVNCTEVPVAIHADQLTPTWRVYSTGSNVFQTRAGCLIGAEHVNNSYECDIPIGAGICASYQTQTNSPRRARSVASQSIIAYTMSLGAENSVAYSNNSIAIPTNFTISVTTEILPVSMTKTSVDCTMYICGDSTECSNLLLQYGSFCTQLNRALTGIAVEQDKNTQEVFAQVKQIYKTPPIKDFGGFNFSQILPDPSKPSKRSFIEDLLFNKVTLADAGFIKQYGDCLGDISARDLICAQKFNGLTVLPPLLTDEMIAQYTSALLAGTITSGWTFCAGAALQIPFAMQMAYRFNGIGVTQNVLYENQKLIANQFNSAIGKIQDSLSSTASALGKLQDVVNQNAQALNTLVKQLSSNFGAISSVLNDILSRLDKVEAEVQIDRLITGRLQSLQTYVTQQLIRAAEIRASANLAATKMSECVCGQSKRVDFCGKGYHLMSFPQSAPHGVVFLHVTYVPAQEKNFTTAPAICHDGKAHFPREGVFVSNGTHWFVTQRNFYEPQIITTDNTFVSGNCDVVIGIVNNTVYDPLQPELDSFKEELDKYFKNHTSPDVDLGDISGINASVVNIQKEIDRLNEVAKNLNESLIDLQELGKYEQYIKGGGGSDIIKLLNEQVNKEMQSSNLYMSMSSWCYTHSLDGAGLFLFDHAAEEYEHAKKLIIFLNENNVPVQLTSISAPEHKFEGLTQIFQKAYEHEQHISESINNIVDHAIKSKDHATFNFLQWYVAEQHEEEVLFKDILDKIELIGNENHGLYLADQYVKGIAKSRKS

SEQ ID NO: 5214 - protein, 1379 aa, Artificial Sequence
  SARS-CoV-2/USA/NY-NYUMC7/2020__EPI_ISL_418192 spike protein (1-1211)(G889C_L1034C) Ferritin construct
MFVFLVLLPLVSSQCVNLTTRTQLPPAYTNSFTRGVYYPDKVFRSSVLHSTQDLFLPFFSNVTWFHAIHVSGTNGTKRFDNPVLPFNDGVYFASTEKSNIIRGWIFGTTLDSKTQSLLIVNNATNVVIKVCEFQFCNDPFLGVYHHKNNKSWMESEFRVYSSANNCTFEYVSQPFLMDLEGKQGNFKNLREFVFKNIDGYFKIYSKHTPINLVRDLPQGFSALEPLVDLPIGINITRFQTLLALHRSYLTPGDSSSGWTAGAAAYYVGYLQPRTFLLKYNENGTITDAVDCALDPLSETKCTLKSFTVEKGIYQTSNFRVQPTESIVRFPNITNLCPFGEVFNATRFASVYAWNRKRISNCVADYSVLYNSASFSTFKCYGVSPTKLNDLCFTNVYADSFVIRGDEVRQIAPGQTGKIADYNYKLPDDFTGCVIAWNSNNLDSKVGGNYNYLYRLFRKSNLKPFERDISTEIYQAGSTPCNGVEGFNCYFPLQSYGFQPTNGVGYQPYRVVVLSFELLHAPATVCGPKKSTNLVKNKCVNFNFNGLTGTGVLTESNKKFLPFQQFGRDIADTTDAVRDPQTLEILDITPCSFGGVSVITPGTNTSNQVAVLYQGVNCTEVPVAIHADQLTPTWRVYSTGSNVFQTRAGCLIGAEHVNNSYECDIPIGAGICASYQTQTNSPRRARSVASQSIIAYTMSLGAENSVAYSNNSIAIPTNFTISVTTEILPVSMTKTSVDCTMYICGDSTECSNLLLQYGSFCTQLNRALTGIAVEQDKNTQEVFAQVKQIYKTPPIKDFGGFNFSQILPDPSKPSKRSFIEDLLFNKVTLADAGFIKQYGDCLGDIAARDLICAQKFNGLTVLPPLLTDEMIAQYTSALLAGTITSGWTFCAGAALQIPFAMQMAYRFNGIGVTQNVLYENQKLIANQFNSAIGKIQDSLSSTASALGKLQDVVNQNAQALNTLVKQLSSNFGAISSVLNDILSRLDKVEAEVQIDRLITGRLQSLQTYVTQQLIRAAEIRASANLAATKMSECVCGQSKRVDFCGKGYHLMSFPQSAPHGVVFLHVTYVPAQEKNFTTAPAICHDGKAHFPREGVFVSNGTHWFVTQRNFYEPQIITTDNTFVSGNCDVVIGIVNNTVYDPLQPELDSFKEELDKYFKNHTSPDVDLGDISGINASVVNIQKEIDRLNEVAKNLNESLIDLQELGKYEQYIKGGGGSDIIKLLNEQVNKEMQSSNLYMSMSSWCYTHSLDGAGLFLFDHAAEEYEHAKKLIIFLNENNVPVQLTSISAPEHKFEGLTQIFQKAYEHEQHISESINNIVDHAIKSKDHATFNFLQWYVAEQHEEEVLFKDILDKIELIGNENHGLYLADQYVKGIAKSRKS

SEQ ID NO: 5215 - protein, 1379 aa, Artificial Sequence
  SARS-CoV-2/Iceland/189/2020__EPI_ISL_417709 spike protein (1-1211)(G889C_L1034C) Ferritin construct
MFVFLVLLPLVSSQCVNLTTRTQLPPAYTNSFTRGVYYPDKVFRSSVLHSTQDLFLPFFSNVTWFHAIHVSGTNGTKRFDNPVLPFNDGVYFASTEKSNIIRGWIFGTTLDSKTQSLLIVNNATNVVIKVCEFQFCNDPFLGVYYHKNNKSWMESEFRVYSSANNCTFEYVSQPFLMDLEGKQGNFKNLREFVFKNIDGYFKIYSKHTPINLVRDLPQGFSALEPLVDLPIGINITRFQTLLALHRSYLTPGDSSSGWTAGAAAYYVGYLQPRTFLLKYNENGTITDAVDCALDPLSETKCTLKSFTVEKGIYQTSNFRVQPTESIVRFPNITNLCPFGEVFNATRFASVYAWNRKRISNCVADYSVLYNSASFSTFKCYGVSPTKLNDLCFTNVYADSFVIRGDEVRQIAPGQTGKIADYNYKLPDDFTGCVIAWNSNNLDSKVGGNYNYLYRLFRKSNLKPFERDISTEIYQAGSTPCNGVEGFNCYFPLQSYGFQPTNGVGYQPYRVVVLSFELLHAPATVCGPKKSTNLVKNKCVNFNFNGLTGTGVLTESNKKFLPFQQFGRDIADTTDAVRDPQTLEILDITPCSFGGVSVITPGTNTSNQVAVLYQGVNCTEVPVAIHADQLTPTWRVYSTGSNVFQTRAGCLIGAEHVNNSYECDIPIGAGICASYQTQTNSPRRARSVASQSIIAYTMSLGAENSVAYSNNSIAIPTNFTISVTTEILPVSMTKTSVDCTMYICGDSTECSNLLLQYGSFCTQLNRALTGIAVEQDKNTQEVFAQVKQIYKTPPIKDFGGFNFSQILPDPSKPSKRSFIEDLLFNKVTLADAGFTKQYGDCLGDIAARDLICAQKFNGLTVLPPLLTDEMIAQYTSALLAGTITSGWTFCAGAALQIPFAMQMAYRFNGIGVTQNVLYENQKLIANQFNSAIGKIQDSLSSTASALGKLQDVVNQNAQALNTLVKQLSSNFGAISSVLNDILSRLDKVEAEVQIDRLITGRLQSLQTYVTQQLIRAAEIRASANLAATKMSECVCGQSKRVDFCGKGYHLMSFPQSAPHGVVFLHVTYVPAQEKNFTTAPAICHDGKAHFPREGVFVSNGTHWFVTQRNFYEPQIITTDNTFVSGNCDVVIGIVNNTVYDPLQPELDSFKEELDKYFKNHTSPDVDLGDISGINASVVNIQKEIDRLNEVAKNLNESLIDLQELGKYEQYIKGGGGSDIIKLLNEQVNKEMQSSNLYMSMSSWCYTHSLDGAGLFLFDHAAEEYEHAKKLIIFLNENNVPVQLTSISAPEHKFEGLTQIFQKAYEHEQHISESINNIVDHAIKSKDHATFNFLQWYVAEQHEEEVLFKDILDKIELIGNENHGLYLADQYVKGIAKSRKS

SEQ ID NO: 5216 - protein, 1379 aa, Artificial Sequence
  SARS-CoV-2/Australia/NSW56/2020__EPI_ISL_417408 spike protein (1-1211)(G889C_L1034C) Ferritin construct
MFVFLVLLPLVSSQCVNLTTRTQLPPAYTNSFTRGVYYPDKVFRSSVLHSTQDLFLPFFSNVTWFHAIHVSGTNGTKRFDNPVLPFNDGVYFASTEKSNIIRGWIFGTTLDSKTQSLLIVNNATNVVIKVCEFQFCNDPFLGVYYHKNNKSWMESEFRVYSSANNCTFEYVSQPFLMDLEGKQGNFKNLREFVFKNIDGYFKIYSKHTPINLVRDLPQGFSALEPLVDLPIGINITRFQTLLALHRSYLTPGDSSSGWTAGAAAYYVGYLQPRTFLLKYNENGTITDAVDCALDPLSETKCTLKSFTVEKGIYQTSNFRVQPTESIVRFPNITNLCPFGEVFNATRFASVYAWNRKRISNCVADYSVLYNSASFSTFKCYGVSPTKLNDLCFTNVYADSFVIRGDEVRQIAPGQTGKIADYNYKLPDDFTGCVIAWNSNNLDSKVGGNYNYLYRLFRKSNLKPFERDISTEIYQAGSTPCNGVEGFNCYFPLQSYGFQPTNGVGYQPYRVVVLSFELLHAPATVCGPKKSTNLVKNKCVNFNFNGLTGTGVLTESNKKFLPFQQFGRDIADTTDAVRDPQTLEILDITPCSFGGVSVITPGTNTSNQVAVLYQDVNCTEVPVAIHADQLTPTWRVYSTGSNVFQTRAGCLIGAEHVNNSYECDIPIGAGICASYQTQTNSPRRARSVASQSIIAYTMSLGAENSVAYSNNSIAIPTNFTISVTTEILPVSMTKTSVDCTMYICGDSTECSNLLLQYGSFCTQLNRALTGIAVEQDKNTQEVFAQVKQIYKTPPIKDFGGFNFSQILPDSSKPSKRSFIEDLLFNKVTLADAGFIKQYGDCLGDIAARDLICAQKFNGLTVLPPLLTDEMIAQYTSALLAGTITSGWTFCAGAALQIPFAMQMAYRFNGIGVTQNVLYENQKLIANQFNSAIGKIQDSLSSTASALGKLQDVVNQNAQALNTLVKQLSSNFGAISSVLNDILSRLDKVEAEVQIDRLITGRLQSLQTYVTQQLIRAAEIRASANLAATKMSECVCGQSKRVDFCGKGYHLMSFPQSAPHGVVFLHVTYVPAQEKNFTTAPAICHDGKAHFPREGVFVSNGTHWFVTQRNFYEPQIITTDNTFVSGNCDVVIGIVNNTVYDPLQPELDSFKEELDKYFKNHTSPDVDLGDISGINASVVNIQKEIDRLNEVAKNLNESLIDLQELGKYEQYIKGGGGSDIIKLLNEQVNKEMQSSNLYMSMSSWCYTHSLDGAGLFLFDHAAEEYEHAKKLIIFLNENNVPVQLTSISAPEHKFEGLTQIFQKAYEHEQHISESINNIVDHAIKSKDHATFNFLQWYVAEQHEEEVLFKDILDKIELIGNENHGLYLADQYVKGIAKSRKS

SEQ ID NO: 5217 - protein, 1379 aa, Artificial Sequence
  SARS-CoV-2/Iceland/280/2020__EPI_ISL_417608 spike protein (1-1211)(G889C_L1034C) Ferritin construct
MFVFLVLLPLVSSQCVNLTTRTQLPPAYTNSFTRGVYYPDKVFRSSVLHSTQDLFLPFFSNVTWFHAIHVSGTNGTKRFDNPVLPFNDGVYFASTEKSNIIRGWIFGTTLDSKTQSLLIVNNATNVVIKVCEFQFCNDPFLGVYYHKNNKSWMESEFRVYSSANNCTFEYVSQPFLMDLEGKQGNFKNLREFVFKNIDGYFKIYSKHTPINLVRDLPQGFSALEPLVDLPIGINITRFQTLLALHRSYLTPGDSSSGWTAGAAAYYVGYLQPRTFLLKYNENGTITDAVDCALDPLSETKCTLKSFTVEKGIYQTSNFRVQPTESIVRFPNITNLCPFGEVFNATRFASVYAWNRKRISNCVADYSVLYNSASFSTFKCYGVSPTKLNDLCFTNVYADSFVIRGDEVRQIAPGQTGKIADYNYKLPDDFTGCVIAWNSNNLDSKVGGNYNYLYRLFRKSNLKPFERDISTEIYQAGSTPCNGVEGFNCYFPLQSYGFQPTNGVGYQPYRVVVLSFELLHAPATVCGPKKSTNLVKNKCVNFNFNGLTGTGVLTESNKKFLPFQQFGRDIADTTDAVRDPQTLEILDITPCSFGGVSVITPGTNTSNQVAVLYQGVNCTEVPVAIHADQLTPTWRVYSTGSNVFQTRAGCLIGAEHVNNSYECDIPIGAGICASYHTQTNSPRRARSVASQSIIAYTMSLGAENSVAYSNNSIAIPTNFTISVTTEILPVSMTKTSVDCTMYICGDSTECSNLLLQYGSFCTQLNRALTGIAVEQDKNTQEVFAQVKQIYKTPPIKDFGGFNFSQILPDPSKPSKRSFIEDLLFNKVTLADAGFIKQYGDCLGDIAARDLICAQKFNGLTVLPPLLTDEMIAQYTSALLAGTITSGWTFCAGAALQIPFAMQMAYRFNGIGVTQNVLYENQKLIANQFNSAIGKIQDSLSSTASALGKLQDVVNQNAQALNTLVKQLSSNFGAISSVLNDILSRLDKVEAEVQIDRLITGRLQSLQTYVTQQLIRAAEIRASANLAATKMSECVCGQSKRVDFCGKGYHLMSFPQSAPHGVVFLHVTYVPAQEKNFTTAPAICHDGKAHFPREGVFVSNGTHWFVTQRNFYEPQIITTDNTFVSGNCDVVIGIVNNTVYDPLQPELDSFKEELDKYFKNHTSPDVDLGDISGINASVVNIQKEIDRLNEVAKNLNESLIDLQELGKYEQYIKGGGGSDIIKLLNEQVNKEMQSSNLYMSMSSWCYTHSLDGAGLFLFDHAAEEYEHAKKLIIFLNENNVPVQLTSISAPEHKFEGLTQIFQKAYEHEQHISESINNIVDHAIKSKDHATFNFLQWYVAEQHEEEVLFKDILDKIELIGNENHGLYLADQYVKGIAKSRKS

SEQ ID NO: 5218 - protein, 1379 aa, Artificial Sequence; identical to SEQ ID NO: 5173
  SARS-CoV-2/Iceland/247/2020__EPI_ISL_417575 spike protein (1-1211)(G889C_L1034C) Ferritin construct

SEQ ID NO: 5219 - protein, 1379 aa, Artificial Sequence
  SARS-CoV-2/Iceland/238/2020__EPI_ISL_417566 spike protein (1-1211)(G889C_L1034C) Ferritin construct
MFVFLVLLPLVSSQCVNLTTRTQLPPAYTNSFTRGVYYPDKVFRSSVLHSTQDLFLPFFSNVTWFHAIHVSGTNGTKRFDNPVLPFNDGVYFASTEKSNIIRGWIFGTTLDSKTQSLLIVNNATNVVIKVCEFQFCNDPFLGVYYHKNNKSWMESEFRVYSSANNCTFEYVSQPFLMDLEGKQGNFKNLREFVFKNIDGYFKIYSKHTPINLVRDLPQGFSALEPLVDLPIGINITRFQTLLALHRSYLTPGDSSSGWTAGAAAYYVGYLQPRTFLLKYNENGTITDAVDCALDPLSETKCTLKSFTVEKGIYQTSNFRVQPTESIVRFPNITNLCPFGEVFNATRFASVYAWNRKRISNCVADYSVLYNSASFSTFKCYGVSPTKLNDLCFTNVYADSFVIRGDEVRQIAPGQTGKIADYNYKLPDDFTGCVIAWNSNNLDSKVGGNYNYLYRLFRKSNLKPFERDISTEIYQAGSTPCNGVEGFNCYFPLQSYGFQPTNGVGYQPYRVVVLSFELLHAPATVCGPKKSTNLVKNKCVNFNFNGLTGTGVLTESNKKFLPFQQFGRDIADTTDAVRDPQTLEILDITPCSFGGVSVITPGTNTSNQVAVLYQGVNCTEVPVAIHADQLTPTWRVYSTGSNVFQTRAGCLIGAEHVNNSYECDIPIGAGICASYQTQTNSPRRARSVASQSIIAYTMSLGAENSVAYSNNSIAIPTNFTISVTTEILPVSMTKTSVDCTMYICGDSTECSNLLLQYGSFCTQLNRALTGIAVEQDKNTQEVFAQVKQIYKTPPIKDFGGFNFSQILPDPSKPSKRSFIEDLLFNKVTLADVGFIKQYGDCLGDIAARDLICAQKFNGLTVLPPLLTDEMIAQYTSALLAGTITSGWTFCAGAALQIPFAMQMAYRFNGIGVTQNVLYENQKLIANQFNSAIGKIQDSLSSTASALGKLQDVVNQNAQALNTLVKQLSSNFGAISSVLNDILSRLDKVEAEVQIDRLITGRLQSLQTYVTQQLIRAAEIRASANLAATKMSECVCGQSKRVDFCGKGYHLMSFPQSAPHGVVFLHVTYVPAQEKNFTTAPAICHDGKAHFPREGVFVSNGTHWFVTQRNFYEPQIITTDNTFVSGNCDVVIGIVNNTVYDPLQPELDSFKEELDKYFKNHTSPDVDLGDISGINASVVNIQKEIDRLNEVAKNLNESLIDLQELGKYEQYIKGGGGSDIIKLLNEQVNKEMQSSNLYMSMSSWCYTHSLDGAGLFLFDHAAEEYEHAKKLIIFLNENNVPVQLTSISAPEHKFEGLTQIFQKAYEHEQHISESINNIVDHAIKSKDHATFNFLQWYVAEQHEEEVLFKDILDKIELIGNENHGLYLADQYVKGIAKSRKS

SEQ ID NO: 5220 - protein, 1379 aa, Artificial Sequence
  SARS-CoV-2/Greece/16/2020__EPI_ISL_418265 spike protein (1-1211)(G889C_L1034C) Ferritin construct
MFVFLVLLPLVSSQCVNLTTRTQLPPAYTNSFTRGVYYPDKVFRSSVLHSTQDLFLPFFSNVTWFHAIHVSGTNGTKRFDNPVLPFNDGVYFASTEKSNIIRGWIFGTTLDSKTQSLLIVNNATNVVIKVCEFQFCNDPFLGVYYHKNNKSWMESEFRVYSSANNCTFEYVSQPFLMDLEGKQGNFKNLREFVFKNVDGYFKIYSKHTPINLVRDLPQGFSALEPLVDLPIGINITRFQTLLALHRSYLTPGDSSSGWTAGAAAYYVGYLQPRTFLLKYNENGTITDAVDCALDPLSETKCTLKSFTVEKGIYQTSNFRVQPTESIVRFPNITNLCPFGEVFNATRFASVYAWNRKRISNCVADYSVLYNSASFSTFKCYGVSPTKLNDLCFTNVYADSFVIRGDEVRQIAPGQTGKIADYNYKLPDDFTGCVIAWNSNNLDSKVGGNYNYLYRLFRKSNLKPFERDISTEIYQAGSTPCNGVEGFNCYFPLQSYGFQPTNGVGYQPYRVVVLSFELLHAPATVCGPKKSTNLVKNKCVNFNFNGLTGTGVLTESNKKFLPFQQFGRDIADTTDAVRDPQTLEILDITPCSFGGVSVITPGTNTSNQVAVLYQDVNCTEVPVAIHADQLTPTWRVYSTGSNVFQTRAGCLIGAEHVNNSYECDIPIGAGICASYQTQTNSPRRARSVASQSIIAYTMSLGAENSVAYSNNSIAIPTNFTISVTTEILPVSMTKTSVDCTMYICGDSTECSNLLLQYGSFCTQLNRALTGIAVEQDKNTQEVFAQVKQIYKTPPIKDFGGFNFSQILPDPSKPSKRSFIEDLLFNKVTLADAGFIKQYGDCLGDIAARDLICAQKFNGLTVLPPLLTDEMIAQYTSALLAGTITSGWTFCAGAALQIPFAMQMAYRFNGIGVTQNVLYENQKLIANQFNSAIGKIQDSLSSTASALGKLQDVVNQNAQALNTLVKQLSSNFGAISSVLNDILSRLDKVEAEVQIDRLITGRLQSLQTYVTQQLIRAAEIRASANLAATKMSECVCGQSKRVDFCGKGYHLMSFPQSAPHGVVFLHVTYVPAQEKNFTTAPAICHDGKAHFPREGVFVSNGTHWFVTQRNFYEPQIITTDNTFVSGNCDVVIGIVNNTVYDPLQPELDSFKEELDKYFKNHTSPDVDLGDISGINASVVNIQKEIDRLNEVAKNLNESLIDLQELGKYEQYIKGGGGSDIIKLLNEQVNKEMQSSNLYMSMSSWCYTHSLDGAGLFLFDHAAEEYEHAKKLIIFLNENNVPVQLTSISAPEHKFEGLTQIFQKAYEHEQHISESINNIVDHAIKSKDHATFNFLQWYVAEQHEEEVLFKDILDKIELIGNENHGLYLADQYVKGIAKSRKS

SEQ ID NO: 5221 - protein, 1379 aa, Artificial Sequence
  SARS-CoV-2/Iceland/319/2020__EPI_ISL_417648 spike protein (1-1211)(G889C_L1034C) Ferritin construct
MFVFLVLLPLVSSQCVNLTTRTQLPPAYTNSFTRGVYYPDKVFRSSVLHSTQDLFLPFFSNVTWFHAIHVSGTNGTKRFDNPVLPFNDGVYFASTEKSNIIRGWIFGTTLDSKTQSLLIVNNATNVVIKVCEFQFCNDPFLGVYYHKNNKSWMESEFRVYSSANNCTFEYVSQPFLIDLEGKQGNFKNLREFVFKNIDGYFKIYSKHTPINLVRDLPQGFSALEPLVDLPIGINITRFQTLLALHRSYLTPGDSSSGWTAGAAAYYVGYLQPRTFLLKYNENGTITDAVDCALDPLSETKCTLKSFTVEKGIYQTSNFRVQPTESIVRFPNITNLCPFGEVFNATRFASVYAWNRKRISNCVADYSVLYNSASFSTFKCYGVSPTKLNDLCFTNVYADSFVIRGDEVRQIAPGQTGKIADYNYKLPDDFTGCVIAWNSNNLDSKVGGNYNYLYRLFRKSNLKPFERDISTEIYQAGSTPCNGVEGFNCYFPLQSYGFQPTNGVGYQPYRVVVLSFELLHAPATVCGPKKSTNLVKNKCVNFNFNGLTGTGVLTESNKKFLPFQQFGRDIADTTDAVRDPQTLEILDITPCSFGGVSVITPGTNTSNQVAVLYQGVNCTEVPVAIHADQLTPTWRVYSTGSNVFQTRAGCLIGAEHVNNSYECDIPIGAGICASYQTQTNSPRRARSVASQSIIAYTMSLGAENSVAYSNNSIAIPTNFTISVTTEILPVSMTKTSVDCTMYICGDSTECSNLLLQYGSFCTQLNRALTGIAVEQDKNTQEVFAQVKQIYKTPPIKDFGGFNFSQILPDPSKPSKRSFIEDLLFNKVTLADAGFIKQYGDCLGDIAARDLICAQKFNGLTVLPPLLTDEMIAQYTSALLAGTITSGWTFCAGAALQIPFAMQMAYRFNGIGVTQNVLYENQKLIANQFNSAIGKIQDSLSSTASALGKLQDVVNQNAQALNTLVKQLSSNFGAISSVLNDILSRLDKVEAEVQIDRLITGRLQSLQTYVTQQLIRAAEIRASANLAATKMSECVCGQSKRVDFCGKGYHLMSFPQSAPHGVVFLHVTYVPAQEKNFTTAPAICHDGKAHFPREGVFVSNGTHWFVTQRNFYEPQIITTDNTFVSGNCDVVIGIVNNTVYDPLQPELDSFKEELDKYFKNHTSPDVDLGDISGINASVVNIQKEIDRLNEVAKNLNESLIDLQELGKYEQYIKGGGGSDIIKLLNEQVNKEMQSSNLYMSMSSWCYTHSLDGAGLFLFDHAAEEYEHAKKLIIFLNENNVPVQLTSISAPEHKFEGLTQIFQKAYEHEQHISESINNIVDHAIKSKDHATFNFLQWYVAEQHEEEVLFKDILDKIELIGNENHGLYLADQYVKGIAKSRKS

SEQ ID NO: 5222 - protein, 1379 aa, Artificial Sequence
  SARS-CoV-2/Congo/94/2020__EPI_ISL_417947 spike protein (1-1211)(G889C_L1034C) Ferritin construct
MFVFLVLLPLVSSQCVNLTTRTQLPPAYTNSFTRGVYYPDKVFRSSVLHSTQDLFLPFFSNVTWFHAIHVSGTNGTKRFDNPVLPFNDGVYFASTEKSNIIRGWIFGTTLDSKTQSLLIVNNATNVVIKVCEFQFCNDPFLGVYYHKNNKSWMESEFRVYSSANNCTFEYVSQPFLMDLEGKQGNFKNLREFVFKNIDGYFKIYSKHTPINLVRDLPQGFSALEPLVDLPIGINITRFQTLLALHRSYLTPGDSSSGWTAGAAAYYVGYLQPRTFLLKYNENGTITDAVDCALDPLSETKCTLKSFTVEKGIYQTSNFRVQPTESIVRFPNITNLCPFGEVFNATRFASVYAWNRKRISNCVADYSVLYNSASFSTFKCYGVSPTKLNDLCFTNVYADSFVIRGDEVRQIAPGQTGKIADYNYKLPDDFTGCVIAWNSNNLDSKVGGNYNYLYRLFRKSNLKPFERDISTEIYQAGSTPCNGVEGFNCYFPLQSYGFQPTNGVGYQPYRVVVLSFELLHAPATVCGPKKSTNLVKNKCVNFNFNGLTGTGVLTESNKKFLPFQQFGRDIADTTDAVRDPQTLEILDITPCSFGGVSVITPGTNTSNQVAVLYQGVNCTEVPVAIHADQLTPTWRVYSTGSNVFQTRAGCLIGAEHVNNSYECDIPIGAGICASYQTQTNSPRRARSVASQSIIAYTMSLGAENSVAYSNNSIAIPTNFTISVTTEILPVSMTKTSVDCTMYICGDSTECSNLLLQYGSFCTQLNRALTGIAVEQDKNTQEVFAQVKQIYKTPPIKDFGGFNFSQILPDPSKPSKRSFIEDILFNKVTLADAGFIKQYGDCLGDIAARDLICAQKFNGLTVLPPLLTDEMIAQYTSALLAGTITSGWTFCAGAALQIPFAMQMAYRFNGIGVTQNVLYENQKLIANQFNSAIGKIQDSLSSTASALGKLQDVVNQNAQALNTLVKQLSSNFGAISSVLNDILSRLDKVEAEVQIDRLITGRLQSLQTYVTQQLIRAAEIRASANLAATKMSECVCGQSKRVDFCGKGYHLMSFPQSAPHGVVFLHVTYVPAQEKNFTTAPAICHDGKAHFPREGVFVSNGTHWFVTQRNFYEPQIITTDNTFVSGNCDVVIGIVNNTVYDPLQPELDSFKEELDKYFKNHTSPDVDLGDISGINASVVNIQKEIDRLNEVAKNLNESLIDLQELGKYEQYIKGGGGSDIIKLLNEQVNKEMQSSNLYMSMSSWCYTHSLDGAGLFLFDHAAEEYEHAKKLIIFLNENNVPVQLTSISAPEHKFEGLTQIFQKAYEHEQHISESINNIVDHAIKSKDHATFNFLQWYVAEQHEEEVLFKDILDKIELIGNENHGLYLADQYVKGIAKSRKS

SEQ ID NO: 5223 - protein, 1379 aa, Artificial Sequence
  SARS-CoV-2/Congo/158/2020__EPI_ISL_417950 spike protein (1-1211)(G889C_L1034C) Ferritin construct
MFVFLVLLPLVSSQCVNLTTRTQLPPAYTNSFTRGVYYPDKVFRSSVLHSTQDLFLPFFSNVTWFHAIHVSGTNGTKRFDNPVLPFNDGVYFASTEKSNIIRGWIFGTTLDSKTQSLLIVNNATNVVIKVCEFQFCNDPFLGVYYHKNNKSWMESEFRVYSSANNCTFEYVSQPFLMDLEGKQGNFKNLREFVFKNIDGYFKIYSKHTPINLVRDLPQGFSALEPLVDLPIGINITRFQTLLALHRSYLTPGDSSSGWTAGAAAYYVGYLQPRTFLLKYNENGTITDAVDCALDPLSETKCTLKSFTVEKGIYQTSNFRVQPTESIVRFPNITNLCPFGEVFNATRFASVYAWNRKRISNCVADYSVLYNSASFSTFKCYGVSPTKLNDLCFTNVYADSFVIRGDEVRQIAPGQTGKIADYNYKLPDDFTGCVIAWNSNNLDSKVGGNYNYLYRLFRKSNLKPFERDISTEIYQAGSTPCNGVEGFNCYFPLQSYGFQPTNGVGYQPYRVVVLSFELLHAPATVCGPKKSTNLVKNKCVNFNFNGLTGTGVLTESNKKFLPFQQFGRDIADTTDAVRDPQTLEILDITPCSFGGVSVITPGTNTSNQVAVLYQDVNCTEVPVAIHADQLTPTWRVYSTGSNVFQTRAGCLIGAEHVNNSYECDIPIGAGICASYQTQTNSPRRARSVASQSIIAYTMSLGAENSVAYSNNSIAIPTNFTISVTTEILPVSMTKTSVDCTMYICGDSTECSNLLLQYGSFCTQLNRALTGIAVEQDKNTQEVFAQVKQIYKTPPIKDFGGFNFSQILPDPSKPSKRSFIEDLLFNKVTLADAGFIKQYGDCLGDIAARDLICAQKFNGLTVLPPLLTDEMIAQYTSALLAGTITSGWTFCAGAALQIPFAMQMAYRFNGIGVTQNVLYENQKLIANQFNSAIGKIQDSLSSTASALGKLQDVVNQNAQALNTLVKQLSSNFGAISSVLNDILSRLDKVEAEVQIDRLITGRLQSLQTYVTQQLIRAAEIRASANLAATKMSECVCGQSKRVDFCGKGYHLMSFPQSAPHGVVFLHVTYVPAQEKNFTTAPAICHDGKAHFPREGVFVSNGTHWFVTQRNFYEPQIITTDNTFLSGNCDVVIGIVNNTVYDPLQPELDSFKEELDKYFKNHTSPDVDLGDISGINASVVNIQKEIDRLNEVAKNLNESLIDLQELGKYEQYIKGGGGSDIIKLLNEQVNKEMQSSNLYMSMSSWCYTHSLDGAGLFLFDHAAEEYEHAKKLIIFLNENNVPVQLTSISAPEHKFEGLTQIFQKAYEHEQHISESINNIVDHAIKSKDHATFNFLQWYVAEQHEEEVLFKDILDKIELIGNENHGLYLADQYVKGIAKSRKS

SEQ ID NO: 5224 - protein, 1379 aa, Artificial Sequence
  SARS-CoV-2/USA/UT-00034/2020__EPI_ISL_417977 spike protein (1-1211)(G889C_L1034C) Ferritin construct
MFVFLVLLPLVSSQCVNLTTRTQLPPAYTNSFTRGVYYPDKVFRSSVLHSTQDLFLPFFSNVTWFHAIHVSGTNGTKRFDNPVLPFNDGVYFASTEKSNIIRGWIFGTTLDSKTQSLLIVNNATNVVIKVCEFQFCNDPFLGVYYYKNNKSWMESEFRVYSSANNCTFEYVSQPFLMDLEGKQGNFKNLREFVFKNIDGYFKIYSKHTPINLVRDLPQGFSALEPLVDLPIGINITRFQTLLALHRSYLTPGDSSSGWTAGAAAYYVGYLQPRTFLLKYNENGTITDAVDCALDPLSETKCTLKSFTVEKGIYQTSNFRVQPTESIVRFPNITNLCPFGEVFNATRFASVYAWNRKRISNCVADYSVLYNSASFSTFKCYGVSPTKLNDLCFTNVYADSFVIRGDEVRQIAPGQTGKIADYNYKLPDDFTGCVIAWNSNNLDSKVGGNYNYLYRLFRKSNLKPFERDISTEIYQAGSTPCNGVEGFNCYFPLQSYGFQPTNGVGYQPYRVVVLSFELLHAPATVCGPKKSTNLVKNKCVNFNFNGLTGTGVLTESNKKFLPFQQFGRDIADTTDAVRDPQTLEILDITPCSFGGVSVITPGTNTSNQVAVLYQGVNCTEVPVAIHADQLTPTWRVYSTGSNVFQTRAGCLIGAEHVNNSYECDIPIGAGICASYQTQTNSPRRARSVASQSIIAYTMSLGAENSVAYSNNSIAIPTNFTISVTTEILPVSMTKTSVDCTMYICGDSTECSNLLLQYGSFCTQLNRALTGIAVEQDKNTQEVFAQVKQIYKTPPIKDFGGFNFSQILPDPSKPSKRSFIEDLLFNKVTLADAGFIKQYGDCLGDIAARDLICAQKFNGLTVLPPLLTDEMIAQYTSALLAGTITSGWTFCAGAALQIPFAMQMAYRFNGIGVTQNVLYENQKLIANQFNSAIGKIQDSLSSTASALGKLQDVVNQNAQALNTLVKQLSSNFGAISSVLNDILSRLDKVEAEVQIDRLITGRLQSLQTYVTQQLIRAAEIRASANLAATKMSECVCGQSKRVDFCGKGYHLMSFPQSAPHGVVFLHVTYVPAQEKNFTTAPAICHDGKAHFPREGVFVSNGTHWFVTQRNFYEPQIITTDNTFVSGNCDVVIGIVNNTVYDPLQPELDSFKEELDKYFKNHTSPDVDLGDISGINASVVNIQKEIDRLNEVAKNLNESLIDLQELGKYEQYIKGGGGSDIIKLLNEQVNKEMQSSNLYMSMSSWCYTHSLDGAGLFLFDHAAEEYEHAKKLIIFLNENNVPVQLTSISAPEHKFEGLTQIFQKAYEHEQHISESINNIVDHAIKSKDHATFNFLQWYVAEQHEEEVLFKDILDKIELIGNENHGLYLADQYVKGIAKSRKS

SEQ ID NO: 5225 - protein, 1379 aa, Artificial Sequence
  SARS-CoV-2/USA/UT-00033/2020__EPI_ISL_417976 spike protein (1-1211)(G889C_L1034C) Ferritin construct
MFVFLVLLPLVSSQCVNLTTRTQLPPAYTNSFTRGVYYPDKVFRSSVLHSTQDLFLPFFSNVTWFHAIHVSGTNGTKRFDNPVLPFNDGVYFASTEKSNIIRGWIFGTTLDSKTQSLLIVNNATNVVIKVCEFQFCNDPFLGVYYHKNNKSWMESEFRVYSSANNCTFEYVSQPFLMDLEGKQGNFKNLREFVFKNIDGYFKIYSKHTPINLVRDLPQGFSALEPLVDLPIGINITRFQTLLALHRSYLTPGDSSSGLTAGAAAYYVGYLQPRTFLLKYNENGTITDAVDCALDPLSETKCTLKSFTVEKGIYQTSNFRVQPTESIVRFPNITNLCPFGEVFNATRFASVYAWNRKRISNCVADYSVLYNSASFSTFKCYGVSPTKLNDLCFTNVYADSFVIRGDEVRQIAPGQTGKIADYNYKLPDDFTGCVIAWNSNNLDSKVGGNYNYLYRLFRKSNLKPFERDISTEIYQAGSTPCNGVEGFNCYFPLQSYGFQPTNGVGYQPYRVVVLSFELLHAPATVCGPKKSTNLVKNKCVNFNFNGLTGTGVLTESNKKFLPFQQFGRDIADTTDAVRDPQTLEILDITPCSFGGVSVITPGTNTSNQVAVLYQGVNCTEVPVAIHADQLTPTWRVYSTGSNVFQTRAGCLIGAEHVNNSYECDIPIGAGICASYQTQTNSPRRARSVASQSIIAYTMSLGAENSVAYSNNSIAIPTNFTISVTTEILPVSMTKTSVDCTMYICGDSTECSNLLLQYGSFCTQLNRALTGIAVEQDKNTQEVFAQVKQIYKTPPIKDFGGFNFSQILPDPSKPSKRSFIEDLLFNKVTLADAGFIKQYGDCLGDIAARDLICAQKFNGLTVLPPLLTDEMIAQYTSALLAGTITSGWTFCAGAALQIPFAMQMAYRFNGIGVTQNVLYENQKLIANQFNSAIGKIQDSLSSTASALGKLQDVVNQNAQALNTLVKQLSSNFGAISSVLNDILSRLDKVEAEVQIDRLITGRLQSLQTYVTQQLIRAAEIRASANLAATKMSECVCGQSKRVDFCGKGYHLMSFPQSAPHGVVFLHVTYVPAQEKNFTTAPAICHDGKAHFPREGVFVSNGTHWFVTQRNFYEPQIITTDNTFVSGNCDVVIGIVNNTVYDPLQPELDSFKEELDKYFKNHTSPDVDLGDISGINASVVNIQKEIDRLNEVAKNLNESLIDLQELGKYEQYIKGGGGSDIIKLLNEQVNKEMQSSNLYMSMSSWCYTHSLDGAGLFLFDHAAEEYEHAKKLIIFLNENNVPVQLTSISAPEHKFEGLTQIFQKAYEHEQHISESINNIVDHAIKSKDHATFNFLQWYVAEQHEEEVLFKDILDKIELIGNENHGLYLADQYVKGIAKSRKS

SEQ ID NO: 5226 - protein, 1379 aa, Artificial Sequence
  SARS-CoV-2/USA/WI-13/2020__EPI_ISL_417516 spike protein (1-1211)(G889C_L1034C) Ferritin construct
MFVFLVLLPLVSSQCVNLTTRTQLPPAYTNSFTRGVYYPDKVFRSSVLHSTQDLFLPFFSNVTWFHAIHVSGTNGTKRFDNPVLPFNDGVYFASTEKSNIIRGWIFGTTLDSKTQSLLIVNNATNVVIKVCEFQFCNDPFLGVYYHKNNKSWMESEFRVYSSANNCTFEYVSQPFLMDLEGKQGNFKNLREFVFKNIDGYFKIYSKHTPINLVRDLPQGFSALEPLVDLPIGINITRFQTLLALHRSYLTPGDSSSGWTAGAAAYYVGYLQPRTFLLKYNENGTITDAVDCALDPLSETKCTLKSFTVEKGIYQTSNFRVLPTESIVRFPNITNLCPFGEVFNATRFASVYAWNRKRISNCVADYSVLYNSASFSTFKCYGVSPTKLNDLCFTNVYADSFVIRGDEVRQIAPGQTGKIADYNYKLPDDFTGCVIAWNSNNLDSKVGGNYNYLYRLFRKSNLKPFERDISTEIYQAGSTPCNGVEGFNCYFPLQSYGFQPTNGVGYQPYRVVVLSFELLHAPATVCGPKKSTNLVKNKCVNFNFNGLTGTGVLTESNKKFLPFQQFGRDIADTTDAVRDPQTLEILDITPCSFGGVSVITPGTNTSNQVAVLYQGVNCTEVPVAIHADQLTPTWRVYSTGSNVFQTRAGCLIGAEHVNNSYECDIPIGAGICASYQTQTNSPRRARSVASQSIIAYTMSLGAENSVAYSNNSIAIPTNFTISVTTEILPVSMTKTSVDCTMYICGDSTECSNLLLQYGSFCTQLNRALTGIAVEQDKNTQEVFAQVKQIYKTPPIKDFGGFNFSQILPDPSKPSKRSFIEDLLFNKVTLADAGFIKQYGDCLGDIAARDLICAQKFNGLTVLPPLLTDEMIAQYTSALLAGTITSGWTFCAGAALQIPFAMQMAYRFNGIGVTQNVLYENQKLIANQFNSAIGKIQDSLSSTASALGKLQDVVNQNAQALNTLVKQLSSNFGAISSVLNDILSRLDKVEAEVQIDRLITGRLQSLQTYVTQQLIRAAEIRASANLAATKMSECVCGQSKRVDFCGKGYHLMSFPQSAPHGVVFLHVTYVPAQEKNFTTAPAICHDGKAHFPREGVFVSNGTHWFVTQRNFYEPQIITTDNTFVSGNCDVVIGIVNNTVYDPLQPELDSFKEELDKYFKNHTSPDVDLGDISGINASVVNIQKEIDRLNEVAKNLNESLIDLQELGKYEQYIKGGGGSDIIKLLNEQVNKEMQSSNLYMSMSSWCYTHSLDGAGLFLFDHAAEEYEHAKKLIIFLNENNVPVQLTSISAPEHKFEGLTQIFQKAYEHEQHISESINNIVDHAIKSKDHATFNFLQWYVAEQHEEEVLFKDILDKIELIGNENHGLYLADQYVKGIAKSRKS

SEQ ID NO: 5227 - protein, 1378 aa, Artificial Sequence
  SARS-CoV-2/India/1-27/2020__EPI_ISL_413522 spike protein (1-1210)(G888C_L1033C) Ferritin construct
MFVFLVLLPLVSSQCVNLTTRTQLPPAYTNSFTRGVYYPDKVFRSSVLHSTQDLFLPFFSNVTWFHAIHVSGTNGTKRFDNPVLPFNDGVYFASTEKSNIIRGWIFGTTLDSKTQSLLIVNNATNVVIKVCEFQFCNDPFLGVYHKNNKSWMESEFRVYSSANNCTFEYVSQPFLMDLEGKQGNFKNLREFVFKNIDGYFKIYSKHTPINLVRDLPQGFSALEPLVDLPIGINITRFQTLLALHRSYLTPGDSSSGWTAGAAAYYVGYLQPRTFLLKYNENGTITDAVDCALDPLSETKCTLKSFTVEKGIYQTSNFRVQPTESIVRFPNITNLCPFGEVFNATRFASVYAWNRKRISNCVADYSVLYNSASFSTFKCYGVSPTKLNDLCFTNVYADSFVIRGDEVIQIAPGQTGKIADYNYKLPDDFTGCVIAWNSNNLDSKVGGNYNYLYRLFRKSNLKPFERDISTEIYQAGSTPCNGVEGFNCYFPLQSYGFQPTNGVGYQPYRVVVLSFELLHAPATVCGPKKSTNLVKNKCVNFNFNGLTGTGVLTESNKKFLPFQQFGRDIADTTDAVRDPQTLEILDITPCSFGGVSVITPGTNTSNQVAVLYQDVNCTEVPVAIHADQLTPTWRVYSTGSNVFQTRAGCLIGAEHVNNSYECDIPIGAGICASYQTQTNSPRRARSVASQSIIAYTMSLGAENSVAYSNNSIAIPTNFTISVTTEILPVSMTKTSVDCTMYICGDSTECSNLLLQYGSFCTQLNRALTGIAVEQDKNTQEVFAQVKQIYKTPPIKDFGGFNFSQILPDPSKPSKRSFIEDLLFNKVTLADAGFIKQYGDCLGDIAARDLICAQKFNGLTVLPPLLTDEMIAQYTSALLAGTITSGWTFCAGAALQIPFAMQMAYRFNGIGVTQNVLYENQKLIANQFNSAIGKIQDSLSSTASALGKLQDVVNQNAQALNTLVKQLSSNFGAISSVLNDILSRLDKVEAEVQIDRLITGRLQSLQTYVTQQLIRAAEIRASANLAATKMSECVCGQSKRVDFCGKGYHLMSFPQSAPHGVVFLHVTYVPAQEKNFTTAPAICHDGKAHFPREGVFVSNGTHWFVTQRNFYEPQIITTDNTFVSGNCDVVIGIVNNTVYDPLQPELDSFKEELDKYFKNHTSPDVDLGDISGINASVVNIQKEIDRLNEVAKNLNESLIDLQELGKYEQYIKGGGGSDIIKLLNEQVNKEMQSSNLYMSMSSWCYTHSLDGAGLFLFDHAAEEYEHAKKLIIFLNENNVPVQLTSISAPEHKFEGLTQIFQKAYEHEQHISESINNIVDHAIKSKDHATFNFLQWYVAEQHEEEVLFKDILDKIELIGNENHGLYLADQYVKGIAKSRKS

SEQ ID NO: 5228 - protein, 1373 aa, Artificial Sequence
  SARS-CoV-2/pangolin/Guangxi/P4L/2017__EPI_ISL_410538 spike protein (1-1205)(G883C_L1028C) Ferritin construct
MFVFLFVLPLVSSQCVNLTTRTGIPPGYTNSSTRGVYYPDKVFRSSILHLTQDLFLPFFSNVTWFNTINYQGGFKKFDNPVLPFNDGVYFASTEKSNIIRGWIFGTTLDARTQSLLIVNNATNVVIKVCEFQFCTDPFLGVYYHNNNKTWVENEFRVYSSANNCTFEYISQPFLMDLEGKQGNFKNLREFVFKNVDGYFKIYSKHTPIDLVRDLPRGFAALEPLVDLPIGINITRFQTLLALHRSYLTPGNLESGWTTGAAAYYVGYLQQRTFLLSYNQNGTITDAVDCSLDPLSETKCTLKSLTVEKGIYQTSNFRVQPTISIVRFPNITNLCPFGEVFNASKFASVYAWNRKRISNCVADYSVLYNSTSFSTFKCYGVSPTKLNDLCFTNVYADSFVVKGDEVRQIAPGQTGVIADYNYKLPDDFTGCVIAWNSVKQDALTGGNYGYLYRLFRKSKLKPFERDISTEIYQAGSTPCNGQVGLNCYYPLERYGFHPTTGVNYQPFRVVVLSFELLNGPATVCGPKLSTTLVKDKCVNFNFNGLTGTGVLTTSKKQFLPFQQFGRDISDTTDAVRDPQTLEILDITPCSFGGVSVITPGTNTSNQVAVLYQDVNCTEVPMAIHAEQLTPAWRVYSAGANVFQTRAGCLVGAEHVNNSYECDIPVGAGICASYHSMSSLRSVNQRSIIAYTMSLGAENSVAYSNNSIAIPTNFTISVTTEILPVSMTKTSVDCTMYICGDSIECSNLLLQYGSFCTQLNRALTGIAVEQDKNTQEVFAQVKQIYKTPPIKDFGGFNFSQILPDPSKPSKRSFIEDLLFNKVTLADAGFIKQYGDCLGDIAARDLICAQKFNGLTVLPPLLTDEMIAQYTSALLAGTITSGWTFCAGAALQIPFAMQMAYRFNGIGVTQNVLYENQKLIANQFNSAIGKIQDSLSSTASALGKLQDVVNQNAQALNTLVKQLSSNFGAISSVLNDILSRLDKVEAEVQIDRLITGRLQSLQTYVTQQLIRAAEIRASANLAATKMSECVCGQSKRVDFCGKGYHLMSFPQSAPHGVVFLHVTYVPAQEKNFTTAPAICHEGKAHFPREGVFVSNGTHWFITQRNFYEPQIITTDNTFVSGSCDVVIGIVNNTVYDPLQPELDSFKEELDKYFKNHTSPDVDLGDISGINASVVNIQKEIDRLNEVAKNLNESPIDLQELGKYEQYIKGGGGSDIIKLLNEQVNKEMQSSNLYMSMSSWCYTHSLDGAGLFLFDHAAEEYEHAKKLIIFLNENNVPVQLTSISAPEHKFEGLTQIFQKAYEHEQHISESINNIVDHAIKSKDHATFNFLQWYVAEQHEEEVLFKDILDKIELIGNENHGLYLADQYVKGIAKSRKS

SEQ ID NO: 5229 - protein, 1373 aa, Artificial Sequence
  SARS-CoV-2/pangolin/Guangxi/P5L/2017__EPI_ISL_410540 spike protein (1-1205)(G883C_L1028C) Ferritin construct
MFVFLFVLPLVSSQCVNLTTRTGIPPGYTNSSTRGVYYPDKVFRSSILHLTQDLFLPFFSNVTWFNTINYQGGFKKFDNPVLPFNDGVYFASTEKSNIIRGWIFGTTLDARTQSLLIVNNATNVVIKVCEFQFCTDPFLGVYYHNNNKTWVENEFRVYSSANNCTFEYISQPFLMDLEGKQGNFKNLREFVFKNVDGYFKIYSKHTPIDLVRDLPRGFAALEPLVDLPIGINITRFQTLLALHRSYLTPGKLESGWTTGAAAYYVGYLQQRTFLLSYNQNGTITDAVDCSLDPLSETKCTLKSLTVEKGIYQTSNFRVQPTISIVRFPNITNLCPFGEVFNASKFASVYAWNRKRISNCVADYSVLYNSTSFSTFKCYGVSPTKLNDLCFTNVYADSFVVKGDEVRQIAPGQTGVIADYNYKLPDDFTGCVIAWNSVKQDALTGGNYGYLYRLFRKSKLKPFERDISTEIYQAGSTPCNGQVGLNCYYPLERYGFHPTTGVNYQPFRVVVLSFELLNGPATVCGPKLSTTLVKDKCVNFNFNGLTGTGVLTTSKKQFLPFQQFGRDISDTTDAVRDPQTLEILDITPCSFGGVSVITPGTNTSNQVAVLYQDVNCTEVPMAIHAEQLTPAWRVYSAGANVFQTRAGCLVGAEHVNNSYECDIPVGAGICASYHSMSSFRSVNQRSIIAYTMSLGAENSVAYSNNSIAIPTNFTISVTTEILPVSMTKTSVDCTMYICGDSIECSNLLLQYGSFCTQLNRALTGIAVEQDKNTQEVFAQVKQIYKTPPIKDFGGFNFSQILPDPSKPSKRSFIEDLLFNKVTLADAGFIKQYGDCLGDIAARDLICAQKFNGLTVLPPLLTDEMIAQYTSALLAGTITSGWTFCAGAALQIPFAMQMAYRFNGIGVTQNVLYENQKLIANQFNSAIGKIQDSLSSTASALGKLQDVVNQNAQALNTLVKQLSSNFGAISSVLNDILSRLDKVEAEVQIDRLITGRLQSLQTYVTQQLIRAAEIRASANLAATKMSECVCGQSKRVDFCGKGYHLMSFPQSAPHGVVFLHVTYVPAQEKNFTTAPAICHEGKAHFPREGVFVSNGTHWFITQRNFYEPQIITTDNTFVSGSCDVVIGIVNNTVYDPLQPELDSFKEELDKYFKNHTSPDVDLGDISGINASVVNIQKEIDRLNEVAKNLNESLIDLQELGKYEQYIKGGGGSDIIKLLNEQVNKEMQSSNLYMSMSSWCYTHSLDGAGLFLFDHAAEEYEHAKKLIIFLNENNVPVQLTSISAPEHKFEGLTQIFQKAYEHEQHISESINNIVDHAIKSKDHATFNFLQWYVAEQHEEEVLFKDILDKIELIGNENHGLYLADQYVKGIAKSRKS

SEQ ID NO: 5230 - protein, 1373 aa, Artificial Sequence
  SARS-CoV-2/pangolin/Guangxi/P5E/2017__EPI_ISL_410541 spike protein (1-1205)(G883C_L1028C) Ferritin construct
MFVFLFVLPLVSSQCVNLTTRTGIPPGYTNSSTRGVYYPDKVFRSSILHLTQDLFLPFFSNVTWFNTITYQGGSKKFDNPVLPFNDGVYFASTEKSNIIRGWIFGTTLDARTQSLLIVNNATNVVIKVCEFQFCTDPFLGVYYHNNNKTWVENEFRVYSSANNCTFEYISQPFLMDLEGKQGNFKNLREFVFKNVDGYFKIYSKHTPIDLVRDLPRGFAALEPLVDLPIGINITRFQTLLALHRSYLTPGKLESGWTTGAAAYYVGYLQQRTFLLSYNQNGTITDAVDCSLDPLSETKCTLKSLTVEKGIYQTSNFRVQPTISIVRFPNITNLCPFGEVFNASKFASVYAWNRKRISNCVADYSVLYNSTSFSTFKCYGVSPTKLNDLCFTNVYADSFVVKGDEVRQIAPGQTGVIADYNYKLPDDFTGCVIAWNSVKQDALTGDNYGYLYRLFRKSKLKPFERDISTEIYQAGSTPCNGQVGLNCYYPLERYGFHPTTGVNYQPFRVVVLSFELLNGPATVCGPKLSTTLVKDKCVNFNFNGLTGTGVLTTSKKQFLPFQQFGRDISDTTDAVRDPQTLEILDITPCSFGGVSVITPGTNTSNQVAVLYQDVNCTEVPMAIHAEQLTPAWRVYSAGANVFQTRAGCLVGAEHVNNSYECDIPVGAGICASYHSMSSFRSVNQRSIIAYTMSLGAENSVAYSNNSIAIPTNFTISVTTEILPVSMTKTSVDCTMYICGDSIECSNLLLQYGSFCTQLNRALTGIAVEQDKNTQEVFAQVKQIYKTPPIKDFGGFNFSQILPDPSKPSKRSFIEDLLFNKVTLADAGFIKQYGDCLGDIAARDLICAQKFNGLTVLPPLLTDEMIAQYTSALLAGTITSGWTFCAGAALQIPFAMQMAYRFNGIGVTQNVLYENQKLIANQFNSAIGKIQDSLSSTASALGKLQDVVNQNAQALNTLVKQLSSNFGAISSVLNDILSRLDKVEAEVQIDRLITGRLQSLQTYVTQQLIRAAEIRASANLAATKMSECVCGQSKRVDFCGKGYHLMSFPQSAPHGVVFLHVTYVPAQEKNFTTAPAICHEGKAHFPREGVFVSNGTHWFITQRNFYEPQIITTDNTFVSGSCDVVIGIVNNTVYDPLQPELDSFKEELDKYFKNHTSPDVDLGDISGINASVVNIQKEIDRLNEVAKNLNESLIDLQELGKYEQYIKGGGGSDIIKLLNEQVNKEMQSSNLYMSMSSWCYTHSLDGAGLFLFDHAAEEYEHAKKLIIFLNENNVPVQLTSISAPEHKFEGLTQIFQKAYEHEQHISESINNIVDHAIKSKDHATFNFLQWYVAEQHEEEVLFKDILDKIELIGNENHGLYLADQYVKGIAKSRKS

SEQ ID NO: 5231 - protein, 1371 aa, Artificial Sequence
  SARS-CoV-2/pangolin/Guangxi/P1E/2017__EPI_ISL_410539 spike protein (1-1203)(G881C_L1026C) Ferritin construct
MFVFLFVLPLVSSQCVNLTTRTGIQPGYTNSSTRGVYYPDKVFRSSILHLTQDLFLPFFSNVTWFNTINYQGGFKKFDNPVLPFNDGVYFASTEKSNIIRGWIFGTTLDARTQSLLIVNNATNVVIKVCEFQFCTDPFLGVYYHNNNKTWVENEFRVYSSANNCTFEYISQPFLMDLEGKQGNFKNLREFVFKNVDGYFKIYSKHTPIDLVRDLPRGFAALEPLVDLPIGINITRFQTLLALHRSYLTPGKLESGWTTGAAAYYVGYLQQRTFLLSYNQNGTITDAVDCSLDPLSETKCTLKSLTVEKGIYQTSNFRVQPTISIVRFPNITNLCPFGEVFNASKFASVYAWNRKRISNCVADYSVLYNSTSFSTFKCYGVSPTKLNDLCFTNVYADSFVVKGDEVRQIAPGQTGVIADYNYKLPDDFTGCVIAWNSVKQDALTGGNYLYRLFRKSKLKPFERDISTEIYQAGSTPCNGQVGLNCYYPLERYGFHPTTGVNYQPFRVVVLSFELLNGPATVCGPKLSTTLVKDKCVNFNFNGLTGTGVLTTSKKQFLPFQQFGRDISDTTDAVRDPQTLEILDITPCSFGGVSVITPGTNTSNQVAVLYQDVNCTEVPMAIHAEQLTPAWRVYSAGANVFQTRAGCLVGAEHVNNSYECDIPVGAGICASYHSMSSLRSVNQRSIIAYTMSLGAENSVAYSNNSIAIPTNFTISVTTEILPVSMTKTSVDCTMYICGDSIECSNLLLQYGSFCTQLNRALTGIAVEQDKNTQEVFAQVKQIYKTPPIKDFGGFNFSQILPDPSKPSKRSFIEDLLFNKVTLADAGFIKQYGDCLGDIAARDLICAQKFNGLTVLPPLLTDEMIAQYTSALLAGTITSGWTFCAGAALQIPFAMQMAYRFNGIGVTQNVLYENQKLIANQFNSAIGKIQDSLSSTASALGKLQDVVNQNAQALNTLVKQLSSNFGAISSVLNDILSRLDKVEAEVQIDRLITGRLQSLQTYVTQQLIRAAEIRASANLAATKMSECVCGQSKRVDFCGKGYHLMSFPQSAPHGVVFLHVTYVPAQEKNFTTAPAICHEGKAHFPREGVFVSNGTHWFITQRNFYEPQIITTDNTFVSGSCDVVIGIVNNTVYDPLQPELDSFKEELDKYFKNHTSPDVDLGDISGINASVVNIQKEIDRLNEVAKNLNESLIDLQELGKYEQYIKGGGGSDIIKLLNEQVNKEMQSSNLYMSMSSWCYTHSLDGAGLFLFDHAAEEYEHAKKLIIFLNENNVPVQLTSISAPEHKFEGLTQIFQKAYEHEQHISESINNIVDHAIKSKDHATFNFLQWYVAEQHEEEVLFKDILDKIELIGNENHGLYLADQYVKGIAKSRKS

SEQ ID NO: 5232 - protein, 1379 aa, Artificial Sequence
  SARS-CoV-2/Wuhan/WIV05/2019__EPI_ISL_402128 spike protein (1-1211)(I909C_Y1047C) Ferritin construct
MFVFLVLLPLVSSQCVNLTTRTQLPPAYTNSFTRGVYYPDKVFRSSVLHSTQDLFLPFFSNVTWFHAIHVSGTNGTKRFDNPVLPFNDGVYFASTEKSNIIRGWIFGTTLDSKTQSLLIVNNATNVVIKVCEFQFCNDPFLGVYYHKNNKSWMESEFRVYSSANNCTFEYVSQPFLMDLEGKQGNFKNLREFVFKNIDGYFKIYSKHTPINLVRDLPQGFSALEPLVDLPIGINITRFQTLLALHRSYLTPGDSSSGWTAGAAAYYVGYLQPRTFLLKYNENGTITDAVDCALDPLSETKCTLKSFTVEKGIYQTSNFRVQPTESIVRFPNITNLCPFGEVFNATRFASVYAWNRKRISNCVADYSVLYNSASFSTFKCYGVSPTKLNDLCFTNVYADSFVIRGDEVRQIAPGQTGKIADYNYKLPDDFTGCVIAWNSNNLDSKVGGNYNYLYRLFRKSNLKPFERDISTEIYQAGSTPCNGVEGFNCYFPLQSYGFQPTNGVGYQPYRVVVLSFELLHAPATVCGPKKSTNLVKNKCVNFNFNGLTGTGVLTESNKKFLPFQQFGRDIADTTDAVRDPQTLEILDITPCSFGGVSVITPGTNTSNQVAVLYQDVNCTEVPVAIHADQLTPTWRVYSTGSNVFQTRAGCLIGAEHVNNSYECDIPIGAGICASYQTQTNSPRRARSVASQSIIAYTMSLGAENSVAYSNNSIAIPTNFTISVTTEILPVSMTKTSVDCTMYICGDSTECSNLLLQYGSFCTQLNRALTGIAVEQDKNTQEVFAQVKQIYKTPPIKDFGGFNFSQILPDPSKPSKRSFIEDLLFNKVTLADAGFIKQYGDCLGDIAARDLICAQKFNGLTVLPPLLTDEMIAQYTSALLAGTITSGWTFGAGAALQIPFAMQMAYRFNGCGVTQNVLYENQKLIANQFNSAIGKIQDSLSSTASALGKLQDVVNQNAQALNTLVKQLSSNFGAISSVLNDILSRLDKVEAEVQIDRLITGRLQSLQTYVTQQLIRAAEIRASANLAATKMSECVLGQSKRVDFCGKGCHLMSFPQSAPHGVVFLHVTYVPAQEKNFTTAPAICHDGKAHFPREGVFVSNGTHWFVTQRNFYEPQIITTDNTFVSGNCDVVIGIVNNTVYDPLQPELDSFKEELDKYFKNHTSPDVDLGDISGINASVVNIQKEIDRLNEVAKNLNESLIDLQELGKYEQYIKGGGGSDIIKLLNEQVNKEMQSSNLYMSMSSWCYTHSLDGAGLFLFDHAAEEYEHAKKLIIFLNENNVPVQLTSISAPEHKFEGLTQIFQKAYEHEQHISESINNIVDHAIKSKDHATFNFLQWYVAEQHEEEVLFKDILDKIELIGNENHGLYLADQYVKGIAKSRKS

SEQ ID NO: 5233 - protein, 1375 aa, Artificial Sequence
  SARS-CoV-2/bat/Yunnan/RaTG13/2013__EPI_ISL_402131 spike protein (1-1207)(I905C_Y1043C) Ferritin construct
MFVFLVLLPLVSSQCVNLTTRTQLPPAYTNSSTRGVYYPDKVFRSSVLHLTQDLFLPFFSNVTWFHAIHVSGTNGIKRFDNPVLPFNDGVYFASTEKSNIIRGWIFGTTLDSKTQSLLIVNNATNVVIKVCEFQFCNDPFLGVYYHKNNKSWMESEFRVYSSANNCTFEYVSQPFLMDLEGKQGNFKNLREFVFKNIDGYFKIYSKHTPINLVRDLPPGFSALEPLVDLPIGINITRFQTLLALHRSYLTPGDSSSGWTAGAAAYYVGYLQPRTFLLKYNENGTITDAVDCALDPLSETKCTLKSFTVEKGIYQTSNFRVQPTDSIVRFPNITNLCPFGEVFNATTFASVYAWNRKRISNCVADYSVLYNSTSFSTFKCYGVSPTKLNDLCFTNVYADSFVITGDEVRQIAPGQTGKIADYNYKLPDDFTGCVIAWNSKHIDAKEGGNFNYLYRLFRKANLKPFERDISTEIYQAGSKPCNGQTGLNCYYPLYRYGFYPTDGVGHQPYRVVVLSFELLNAPATVCGPKKSTNLVKNKCVNFNFNGLTGTGVLTESNKKFLPFQQFGRDIADTTDAVRDPQTLEILDITPCSFGGVSVITPGTNASNQVAVLYQDVNCTEVPVAIHADQLTPTWRVYSTGSNVFQTRAGCLIGAEHVNNSYECDIPIGAGICASYQTQTNSRSVASQSIIAYTMSLGAENSVAYSNNSIAIPTNFTISVTTEILPVSMTKTSVDCTMYICGDSTECSNLLLQYGSFCTQLNRALTGIAVEQDKNTQEVFAQVKQIYKTPPIKDFGGFNFSQILPDPSKPSKRSFIEDLLFNKVTLADAGFIKQYGDCLGDIAARDLICAQKFNGLTVLPPLLTDEMIAQYTSALLAGTITSGWTFGAGAALQIPFAMQMAYRFNGCGVTQNVLYENQKLIANQFNSAIGKIQDSLSSTASALGKLQDVVNQNAQALNTLVKQLSSNFGAISSVLNDILSRLDKVEAEVQIDRLITGRLQSLQTYVTQQLIRAAEIRASANLAATKMSECVLGQSKRVDFCGKGCHLMSFPQSAPHGVVFLHVTYVPAQEKNFTTAPAICHDGKAHFPREGVFVSNGTHWFVTQRNFYEPQIITTDNTFVSGSCDVVIGIVNNTVYDPLQPELDSFKEELDKYFKNHTSPDVDLGDISGINASVVNIQKEIDRLNEVAKNLNESLIDLQELGKYEQYIKGGGGSDIIKLLNEQVNKEMQSSNLYMSMSSWCYTHSLDGAGLFLFDHAAEEYEHAKKLIIFLNENNVPVQLTSISAPEHKFEGLTQIFQKAYEHEQHISESINNIVDHAIKSKDHATFNFLQWYVAEQHEEEVLFKDILDKIELIGNENHGLYLADQYVKGIAKSRKS

SEQ ID NO: 5234 - protein, 1379 aa, Artificial Sequence
  SARS-CoV-2/Wuhan/HBCDC-HB-01/2019__EPI_ISL_402132 spike protein (1-1211)(I909C_Y1047C) Ferritin construct
MFVFLVLLPLVSSQCVNLTTRTQLPPAYTNSITRGVYYPDKVFRSSVLHSTQDLFLPFFSNVTWFHAIHVSGTNGTKRFDNPVLPFNDGVYFASTEKSNIIRGWIFGTTLDSKTQSLLIVNNATNVVIKVCEFQFCNDPFLGVYYHKNNKSWMESEFRVYSSANNCTFEYVSQPFLMDLEGKQGNFKNLREFVFKNIDGYFKIYSKHTPINLVRDLPQGFSALEPLVDLPIGINITRFQTLLALHRSYLTPGDSSSGWTAGAAAYYVGYLQPRTFLLKYNENGTITDAVDCALDPLSETKCTLKSFTVEKGIYQTSNFRVQPTESIVRFPNITNLCPFGEVFNATRFASVYAWNRKRISNCVADYSVLYNSASFSTFKCYGVSPTKLNDLCFTNVYADSFVIRGDEVRQIAPGQTGKIADYNYKLPDDFTGCVIAWNSNNLDSKVGGNYNYLYRLFRKSNLKPFERDISTEIYQAGSTPCNGVEGFNCYFPLQSYGFQPTNGVGYQPYRVVVLSFELLHAPATVCGPKKSTNLVKNKCVNFNFNGLTGTGVLTESNKKFLPFQQFGRDIADTTDAVRDPQTLEILDITPCSFGGVSVITPGTNTSNQVAVLYQDVNCTEVPVAIHADQLTPTWRVYSTGSNVFQTRAGCLIGAEHVNNSYECDIPIGAGICASYQTQTNSPRRARSVASQSIIAYTMSLGAENSVAYSNNSIAIPTNFTISVTTEILPVSMTKTSVDCTMYICGDSTECSNLLLQYGSFCTQLNRALTGIAVEQDKNTQEVFAQVKQIYKTPPIKDFGGFNFSQILPDPSKPSKRSFIEDLLFNKVTLADAGFIKQYGDCLGDIAARDLICAQKFNGLTVLPPLLTDEMIAQYTSALLAGTITSGWTFGAGAALQIPFAMQMAYRFNGCGVTQNVLYENQKLIANQFNSAIGKIQDSLSSTASALGKLQDVVNQNAQALNTLVKQLSSNFGAISSVLNDILSRLDKVEAEVQIDRLITGRLQSLQTYVTQQLIRAAEIRASANLAATKMSECVLGQSKRVDFCGKGCHLMSFPQSAPHGVVFLHVTYVPAQEKNFTTAPAICHDGKAHFPREGVFVSNGTHWFVTQRNFYEPQIITTDNTFVSGNCDVVIGIVNNTVYDPLQPELDSFKEELDKYFKNHTSPDVDLGDISGINASVVNIQKEIDRLNEVAKNLNESLIDLQELGKYEQYIKGGGGSDIIKLLNEQVNKEMQSSNLYMSMSSWCYTHSLDGAGLFLFDHAAEEYEHAKKLIIFLNENNVPVQLTSISAPEHKFEGLTQIFQKAYEHEQHISESINNIVDHAIKSKDHATFNFLQWYVAEQHEEEVLFKDILDKIELIGNENHGLYLADQYVKGIAKSRKS

SEQ ID NO: 5235 - protein, 1379 aa, Artificial Sequence
  SARS-CoV-2/Guangdong/20SF028/2020__EPI_ISL_403936 spike protein (1-1211)(I909C_Y1047C) Ferritin construct
MFVFLVLLPLVSSQCVNLTTRTQLPPAYTNSFTRGVYYPDKVFRSSVLYSTQDLFLPFFSNVTWFHAIHVSGTNGTKRFDNPVLPFNDGVYFASTEKSNIIRGWIFGTTLDSKTQSLLIVNNATNVVIKVCEFQFCNDPFLGVYYHKNNKSWMESEFRVYSSANNCTFEYVSQPFLMDLEGKQGNFKNLREFVFKNIDGYFKIYSKHTPINLVRDLPQGFSALEPLVDLPIGINITRFQTLLALHRSYLTPGDSSSGWTAGAAAYYVGYLQPRTFLLKYNENGTITDAVDCALDPLSETKCTLKSFTVEKGIYQTSNFRVQPTESIVRFPNITNLCPFGEVFNATRFASVYAWNRKRISNCVADYSVLYNSASFSTFKCYGVSPTKLNDLCFTNVYADSFVIRGDEVRQIAPGQTGKIADYNYKLPDDFTGCVIAWNSNNLDSKVGGNYNYLYRLFRKSNLKPFERDISTEIYQAGSTPCNGVEGFNCYFPLQSYGFQPTNGVGYQPYRVVVLSFELLHAPATVCGPKKSTNLVKNKCVNFNFNGLTGTGVLTESNKKFLPFQQFGRDIADTTDAVRDPQTLEILDITPCSFGGVSVITPGTNTSNQVAVLYQDVNCTEVPVAIHADQLTPTWRVYSTGSNVFQTRAGCLIGAEHVNNSYECDIPIGAGICASYQTQTNSPRRARSVASQSIIAYTMSLGAENSVAYSNNSIAIPTNFTISVTTEILPVSMTKTSVDCTMYICGDSTECSNLLLQYGSFCTQLNRALTGIAVEQDKNTQEVFAQVKQIYKTPPIKDFGGFNFSQILPDPSKPSKRSFIEDLLFNKVTLADAGFIKQYGDCLGDIAARDLICAQKFNGLTVLPPLLTDEMIAQYTSALLAGTITSGWTFGAGAALQIPFAMQMAYRFNGCGVTQNVLYENQKLIANQFNSAIGKIQDSLSSTASALGKLQDVVNQNAQALNTLVKQLSSNFGAISSVLNDILSRLDKVEAEVQIDRLITGRLQSLQTYVTQQLIRAAEIRASANLAATKMSECVLGQSKRVDFCGKGCHLMSFPQSAPHGVVFLHVTYVPAQEKNFTTAPAICHDGKAHFPREGVFVSNGTHWFVTQRNFYEPQIITTDNTFVSGNCDVVIGIVNNTVYDPLQPELDSFKEELDKYFKNHTSPDVDLGDISGINASVVNIQKEIDRLNEVAKNLNESLIDLQELGKYEQYIKGGGGSDIIKLLNEQVNKEMQSSNLYMSMSSWCYTHSLDGAGLFLFDHAAEEYEHAKKLIIFLNENNVPVQLTSISAPEHKFEGLTQIFQKAYEHEQHISESINNIVDHAIKSKDHATFNFLQWYVAEQHEEEVLFKDILDKIELIGNENHGLYLADQYVKGIAKSRKS

SEQ ID NO: 5236 - protein, 1379 aa, Artificial Sequence
  SARS-CoV-2/Shenzhen/SZTH-001/2020__EPI_ISL_406592 spike protein (1-1211)(I909C_Y1047C) Ferritin construct
MFVFLVLLPLVSSQCVNLTTRTQLPPAYTNSFTRGVYYPDKVFRSSVLHSTQDLFLPFFSNVTWFHAIHVSGTNGTKRFDNPVLPFNDGVYFASTEKSNIIRGWIFGTTLDSKTQSLLIVNNATNVVIKVCEFQFCNDPFLGVYYHKNNKSWMESEFRVYSSANNCTFEYVSQPFLMDLEGKQGNFKNLREFVFKNIDGYFKIYSKHTPINLVRDLPQGFSALEPLVDLPIGINITRFQTLLALHRSYLTPGDSSSGWTAGAAAYYVGYLQPRTFLLKYNENGTITDAVDCALDPLSETKCTLKSFTVEKGIYQTSNFRVQPTESIVRFPNITNLCPFGEVFNATRFASVYAWNRKRISNCVADYSVLYNSASFSTFKCYGVSPTKLNDLCFTNVYADSFVIRGDEVRQIAPGQTGKIADYNYKLPDDFTGCVIAWNSNNLDSKVGGNYNYLYRLFRKSNLKPFERDISTEIYQAGSTPCNGVEGFNCYFPLQSYGFQPTNGVGYQPYRVVVLSFELLHAPATVCGPKKSTNLVKNKCVNFNFNGLTGTGVLTESNKKFLPFQQFGRDIADTTDAVRDPQTLEILDITPCSFGGVSVITPGTNTSNQVAVLYQDVNCTEVPVAIHADQLTPTWRVYSTGSNVFQTRAGCLIGAEHVNNSYECDIPIGAGICASYQTQTNSPRRARSVASQSIIAYTMSLGAENSVAYSNNSIAIPTNFTISVTTEILPVSMTKTSVDCTMYICGDSTECSNLLLQYGSFCTQLNRALTGIAVEQDKNTQEVFAQVKQIYKTPPIKDFGGFNFSQILPDPSKPSKRSFIEDLLFNKVTLADAGFIKQYGDCLGDIAARDLICAQKFNGLTVLPPLLTDEMIAQYTSALLAGTITSGWTFGAGAALQIPFAMQMAYRFNGCGVTQNVLYENQKLIANQFNSAIGKIQDSLSSTASALGKLQDVVNQNAQALNTLVKQLSSNFGAISSVLNDILSRLDKVEAEVQIDRLITGRLQSLQTYVTQQLIRAAEIRASANLAATKMSECVLGQSKRVDFCGKGCHLMSFPQSAPHGVVFLHVTYVPAQEKNFTTAPAICHDGKAHFPREGVFVSNGTHWFVTQRNFYEPQIITTDNTFVSGNCDVLIGIVNNTVYDPLQPELDSFKEELDKYFKNHTSPDVDLGDISGINASVVNIQKEIDRLNEVAKNLNESLIDLQELGKYEQYIKGGGGSDIIKLLNEQVNKEMQSSNLYMSMSSWCYTHSLDGAGLFLFDHAAEEYEHAKKLIIFLNENNVPVQLTSISAPEHKFEGLTQIFQKAYEHEQHISESINNIVDHAIKSKDHATFNFLQWYVAEQHEEEVLFKDILDKIELIGNENHGLYLADQYVKGIAKSRKS

SEQ ID NO: 5237 - protein, 1379 aa, Artificial Sequence
  SARS-CoV-2/Shenzhen/SZTH-004/2020__EPI_ISL_406595 spike protein (1-1211)(I909C_Y1047C) Ferritin construct
MFVFLVLLPLVSSQCVNLTTRTQLPPAYTNSFTRGVYYPDKVFRSSVLHSTQDLFLPFFSNVTWFHAIHVSGTNGTKRFDNPVLPFNDGVYFASTEKSNIIRGWIFGTTLDSKTQSLLIVNNATNVVIKVCEFQFCNDPFLGVYYHKNNKSWMESEFRVYSSANNCTFEYVSQPFLMDLEGKQGNFKNLREFVFKNIDGYFKIYSKHTPINLVRDLPQGFSALEPLVDLPIGINITRFQTLLALHRSYLTPGDSSSGWTAGAAAYYVGYLQPRTFLLKYNENGTITDAVDCALDPLSETKCTLKSFTVEKGIYQTSNFRVQPTESIVRFPNITNLCPFGEVFNATRFASVYAWDRKRISNCVAYYSVLYNSASFSTFKCYGVSPTKLNDLCFTNVYADSFVIRGDEVRQIAPGQTGKIADYNYKLPDDFTGCVIAWNSNNLDSKVGGNYNYLYRLFRKSNLKPFERDISTEIYQAGSTPCNGVEGFNCYFPLQSYGFQPTNGVGYQPYRVVVLSFELLHAPATVCGPKKSTNLVKNKCVNFNFNGLTGTGVLTESNKKFLPFQQFGRDIADTTDAVRDPQTLEILDITPCSFGGVSVITPGTNTSNQVAVLYQDVNCTEVPVAIHADQLTPTWRVYSTGSNVFQTRAGCLIGAEHVNNSYECDIPIGAGICASYQTQTNSPRRARSVASQSIIAYTMSLGAENSVAYSNNSIAIPTNFTISVTTEILPVSMTKTSVDCTMYICGDSTECSNLLLQYGSFCTQLNRALTGIAVEQDKNTQEVFAQVKQIYKTPPIKDFGGFNFSQILPDPSKPSKRSFIEDLLFNKVTLADAGFIKQYGDCLGDIAARDLICAQKFNGLTVLPPLLTDEMIAQYTSALLAGTITSGWTFGAGAALQIPFAMQMAYRFNGCGVTQNVLYENQKLIANQFNSAIGKIQDSLSSTASALGKLQDVVNQNAQALNTLVKQLSSNFGAISSVLNDILSRLDKVEAEVQIDRLITGRLQSLQTYVTQQLIRAAEIRASANLAATKMSECVLGQSKRVDFCGKGCHLMSFPQSAPHGVVFLHVTYVPAQEKNFTTAPAICHDGKAHFPREGVFVSNGTHWFVTQRNFYEPQIITTDNTFVSGNCDVVIGIVNNTVYDPLQPELDSFKEELDKYFKNHTSPDVDLGDISGINASVVNIQKEIDRLNEVAKNLNESLIDLQELGKYEQYIKGGGGSDIIKLLNEQVNKEMQSSNLYMSMSSWCYTHSLDGAGLFLFDHAAEEYEHAKKLIIFLNENNVPVQLTSISAPEHKFEGLTQIFQKAYEHEQHISESINNIVDHAIKSKDHATFNFLQWYVAEQHEEEVLFKDILDKIELIGNENHGLYLADQYVKGIAKSRKS

SEQ ID NO: 5238 - protein, 1379 aa, Artificial Sequence
  SARS-CoV-2/France/IDF0372/2020__EPI_ISL_406596 spike protein (1-1211)(I909C_Y1047C) Ferritin construct
MFVFLVLLPLVSSQCVNLTTRTQLPPAYTNSFTRGVYYPDKVFRSSVLHSTQDLFLPFFSNVTWFHAIHVSGTNGTKRFDNPVLPFNDGVYFASTEKSNIIRGWIFGTTLDSKTQSLLIVNNATNVVIKVCEFQFCNDPFLGVYYHKNNKSWMESEFRVYSSANNCTFEYVSQPFLMDLEGKQGNFKNLREFVFKNIDGYFKIYSKHTPINLVRDLPQGFSALEPLVDLPIGINITRFQTLLALHRSYLTPGDSSSGWTAGAAAYYVGYLQPRTFLLKYNENGTITDAVDCALDPLSETKCTLKSFTVEKGIYQTSNFRVQPTESIVRFPNITNLCPFGEVFNATRFASVYAWNRKRISNCVADYSFLYNSASFSTFKCYGVSPTKLNDLCFTNVYADSFVIRGDEVRQIAPGQTGKIADYNYKLPDDFTGCVIAWNSNNLDSKVGGNYNYLYRLFRKSNLKPFERDISTEIYQAGSTPCNGVEGFNCYFPLQSYGFQPTNGVGYQPYRVVVLSFELLHAPATVCGPKKSTNLVKNKCVNFNFNGLTGTGVLTESNKKFLPFQQFGRDIADTTDAVRDPQTLEILDITPCSFGGVSVITPGTNTSNQVAVLYQDVNCTEVPVAIHADQLTPTWRVYSTGSNVFQTRAGCLIGAEHVNNSYECDIPIGAGICASYQTQTNSPRRARSVASQSIIAYTMSLGAENSVAYSNNSIAIPTNFTISVTTEILPVSMTKTSVDCTMYICGDSTECSNLLLQYGSFCTQLNRALTGIAVEQDKNTQEVFAQVKQIYKTPPIKDFGGFNFSQILPDPSKPSKRSFIEDLLFNKVTLADAGFIKQYGDCLGDIAARDLICAQKFNGLTVLPPLLTDEMIAQYTSALLAGTITSGWTFGAGAALQIPFAMQMAYRFNGCGVTQNVLYENQKLIANQFNSAIGKIQDSLSSTASALGKLQDVVNQNAQALNTLVKQLSSNFGAISSVLNDILSRLDKVEAEVQIDRLITGRLQSLQTYVTQQLIRAAEIRASANLAATKMSECVLGQSKRVDFCGKGCHLMSFPQSAPHGVVFLHVTYVPAQEKNFTTAPAICHDGKAHFPREGVFVSNGTHWFVTQRNFYEPQIITTDNTFVSGNCDVVIGIVNNTVYDPLQPELDSFKEELDKYFKNHTSPDVDLGDISGINASVVNIQKEIDRLNEVAKNLNESLIDLQELGKYEQYIKGGGGSDIIKLLNEQVNKEMQSSNLYMSMSSWCYTHSLDGAGLFLFDHAAEEYEHAKKLIIFLNENNVPVQLTSISAPEHKFEGLTQIFQKAYEHEQHISESINNIVDHAIKSKDHATFNFLQWYVAEQHEEEVLFKDILDKIELIGNENHGLYLADQYVKGIAKSRKS

SEQ ID NO: 5239 - protein, 1379 aa, Artificial Sequence
  SARS-CoV-2/Australia/VIC01/2020__EPI_ISL_406844 spike protein (1-1211)(I909C_Y1047C) Ferritin construct
MFVFLVLLPLVSSQCVNLTTRTQLPPAYTNSFTRGVYYPDKVFRSSVLHSTQDLFLPFFSNVTWFHAIHVSGTNGTKRFDNPVLPFNDGVYFASTEKSNIIRGWIFGTTLDSKTQSLLIVNNATNVVIKVCEFQFCNDPFLGVYYHKNNKSWMESEFRVYSSANNCTFEYVSQPFLMDLEGKQGNFKNLREFVFKNIDGYFKIYSKHTPINLVRDLPQGFSALEPLVDLPIGINITRFQTLLALHRRYLTPGDSSSGWTAGAAAYYVGYLQPRTFLLKYNENGTITDAVDCALDPLSETKCTLKSFTVEKGIYQTSNFRVQPTESIVRFPNITNLCPFGEVFNATRFASVYAWNRKRISNCVADYSVLYNSASFSTFKCYGVSPTKLNDLCFTNVYADSFVIRGDEVRQIAPGQTGKIADYNYKLPDDFTGCVIAWNSNNLDSKVGGNYNYLYRLFRKSNLKPFERDISTEIYQAGSTPCNGVEGFNCYFPLQSYGFQPTNGVGYQPYRVVVLSFELLHAPATVCGPKKSTNLVKNKCVNFNFNGLTGTGVLTESNKKFLPFQQFGRDIADTTDAVRDPQTLEILDITPCSFGGVSVITPGTNTSNQVAVLYQDVNCTEVPVAIHADQLTPTWRVYSTGSNVFQTRAGCLIGAEHVNNSYECDIPIGAGICASYQTQTNSPRRARSVASQSIIAYTMSLGAENSVAYSNNSIAIPTNFTISVTTEILPVSMTKTSVDCTMYICGDSTECSNLLLQYGSFCTQLNRALTGIAVEQDKNTQEVFAQVKQIYKTPPIKDFGGFNFSQILPDPSKPSKRSFIEDLLFNKVTLADAGFIKQYGDCLGDIAARDLICAQKFNGLTVLPPLLTDEMIAQYTSALLAGTITSGWTFGAGAALQIPFAMQMAYRFNGCGVTQNVLYENQKLIANQFNSAIGKIQDSLSSTASALGKLQDVVNQNAQALNTLVKQLSSNFGAISSVLNDILSRLDKVEAEVQIDRLITGRLQSLQTYVTQQLIRAAEIRASANLAATKMSECVLGQSKRVDFCGKGCHLMSFPQSAPHGVVFLHVTYVPAQEKNFTTAPAICHDGKAHFPREGVFVSNGTHWFVTQRNFYEPQIITTDNTFVSGNCDVVIGIVNNTVYDPLQPELDSFKEELDKYFKNHTSPDVDLGDISGINASVVNIQKEIDRLNEVAKNLNESLIDLQELGKYEQYIKGGGGSDIIKLLNEQVNKEMQSSNLYMSMSSWCYTHSLDGAGLFLFDHAAEEYEHAKKLIIFLNENNVPVQLTSISAPEHKFEGLTQIFQKAYEHEQHISESINNIVDHAIKSKDHATFNFLQWYVAEQHEEEVLFKDILDKIELIGNENHGLYLADQYVKGIAKSRKS

SEQ ID NO: 5240 - protein, 1379 aa, Artificial Sequence
  SARS-CoV-2/Germany/BavPat1/2020__EPI_ISL_406862 spike protein (1-1211)(I909C_Y1047C) Ferritin construct
MFVFLVLLPLVSSQCVNLTTRTQLPPAYTNSFTRGVYYPDKVFRSSVLHSTQDLFLPFFSNVTWFHAIHVSGTNGTKRFDNPVLPFNDGVYFASTEKSNIIRGWIFGTTLDSKTQSLLIVNNATNVVIKVCEFQFCNDPFLGVYYHKNNKSWMESEFRVYSSANNCTFEYVSQPFLMDLEGKQGNFKNLREFVFKNIDGYFKIYSKHTPINLVRDLPQGFSALEPLVDLPIGINITRFQTLLALHRSYLTPGDSSSGWTAGAAAYYVGYLQPRTFLLKYNENGTITDAVDCALDPLSETKCTLKSFTVEKGIYQTSNFRVQPTESIVRFPNITNLCPFGEVFNATRFASVYAWNRKRISNCVADYSVLYNSASFSTFKCYGVSPTKLNDLCFTNVYADSFVIRGDEVRQIAPGQTGKIADYNYKLPDDFTGCVIAWNSNNLDSKVGGNYNYLYRLFRKSNLKPFERDISTEIYQAGSTPCNGVEGFNCYFPLQSYGFQPTNGVGYQPYRVVVLSFELLHAPATVCGPKKSTNLVKNKCVNFNFNGLTGTGVLTESNKKFLPFQQFGRDIADTTDAVRDPQTLEILDITPCSFGGVSVITPGTNTSNQVAVLYQGVNCTEVPVAIHADQLTPTWRVYSTGSNVFQTRAGCLIGAEHVNNSYECDIPIGAGICASYQTQTNSPRRARSVASQSIIAYTMSLGAENSVAYSNNSIAIPTNFTISVTTEILPVSMTKTSVDCTMYICGDSTECSNLLLQYGSFCTQLNRALTGIAVEQDKNTQEVFAQVKQIYKTPPIKDFGGFNFSQILPDPSKPSKRSFIEDLLFNKVTLADAGFIKQYGDCLGDIAARDLICAQKFNGLTVLPPLLTDEMIAQYTSALLAGTITSGWTFGAGAALQIPFAMQMAYRFNGCGVTQNVLYENQKLIANQFNSAIGKIQDSLSSTASALGKLQDVVNQNAQALNTLVKQLSSNFGAISSVLNDILSRLDKVEAEVQIDRLITGRLQSLQTYVTQQLIRAAEIRASANLAATKMSECVLGQSKRVDFCGKGCHLMSFPQSAPHGVVFLHVTYVPAQEKNFTTAPAICHDGKAHFPREGVFVSNGTHWFVTQRNFYEPQIITTDNTFVSGNCDVVIGIVNNTVYDPLQPELDSFKEELDKYFKNHTSPDVDLGDISGINASVVNIQKEIDRLNEVAKNLNESLIDLQELGKYEQYIKGGGGSDIIKLLNEQVNKEMQSSNLYMSMSSWCYTHSLDGAGLFLFDHAAEEYEHAKKLIIFLNENNVPVQLTSISAPEHKFEGLTQIFQKAYEHEQHISESINNIVDHAIKSKDHATFNFLQWYVAEQHEEEVLFKDILDKIELIGNENHGLYLADQYVKGIAKSRKS

SEQ ID NO: 5241 - protein, 1379 aa, Artificial Sequence
  SARS-CoV-2/Wuhan/HBCDC-HB-02/2020__EPI_ISL_412978 spike protein (1-1211)(I909C_Y1047C) Ferritin construct
MFVFLVLLPLVSSQCVNLTTRTQLPPAYTNSFTRGVYYPDKVFRSSVLHSTQDLFLPFFSNVTWFHAIHVSGTNGTKRFDNPVLPFNDGVYFASTEKSNIIRGWIFGTTLDSKTQSLLIVNNATNVVIKVCEFQFCNDPFLGVYYHKNNKSWMESEFRVYSSANNCTFEYVSQPFLMDLEGKQGNFKNLREFVFKNIDGYFKIYSKHTPINLVRDLPQGFSALEPLVDLPIGINITRFQTLLALHRSYLTPGDSSSGWTAGAAAYYVGYLQPRTFLLKYNENGTITDAVDCALDPLSETKCTLKSFTVEKGIYQTSNFRVQPTESIVRFPNITNLCPFGEVFNATRFASVYAWNRKRISNCVADYSVLYNSASFSTFKCYGVSPTKLNDLCFTNVYADSFVIRGDEVRQIAPGQTGKIADYNYKLPDDFTGCVIAWNSNNLDSKVGGNYNYLYRLFRKSNLKPFERDISTEIYQAGSTPCNGVEGFNCYFPLQSYGFQPTNGVGYQPYRVVVLSFELLHAPATVCGPKKSTNLVKNKCVNFNFNGLTGTGVLTESNKKFLPFQQFGRDIADTTDAVRDPQTLEILDITPCSFGGVSVITPGTNTSNQVAVLYQDVNCTEVPVAIHADQLTPTWRVYSTGSNVFQTRAGCLIGAEHVNNSYECDIPIGAGICASYQTQTNSPRRARSVASQSIIAYTMSLGAENSVAYSNNSIAIPTNFTISVTTEILPVSMTKTSVDCTMYICGDSTECSNFLLQYGSFCTQLNRALTGIAVEQDKNTQEVFAQVKQIYKTPPIKDFGGFNFSQILPDPSKPSKRSFIEDLLFNKVTLADAGFIKQYGDCLGDIAARDLICAQKFNGLTVLPPLLTDEMIAQYTSALLAGTITSGWTFGAGAALQIPFAMQMAYRFNGCGVTQNVLYENQKLIANQFNSAIGKIQDSLSSTASALGKLQDVVNQNAQALNTLVKQLSSNFGAISSVLNDILSRLDKVEAEVQIDRLITGRLQSLQTYVTQQLIRAAEIRASANLAATKMSECVLGQSKRVDFCGKGCHLMSFPQSAPHGVVFLHVTYVPAQEKNFTTAPAICHDGKAHFPREGVFVSNGTHWFVTQRNFYEPQIITTDNTFVSGNCDVVIGIVNNTVYDPLQPELDSFKEELDKYFKNHTSPDVDLGDISGINASVVNIQKEIDRLNEVAKNLNESLIDLQELGKYEQYIKGGGGSDIIKLLNEQVNKEMQSSNLYMSMSSWCYTHSLDGAGLFLFDHAAEEYEHAKKLIIFLNENNVPVQLTSISAPEHKFEGLTQIFQKAYEHEQHISESINNIVDHAIKSKDHATFNFLQWYVAEQHEEEVLFKDILDKIELIGNENHGLYLADQYVKGIAKSRKS

SEQ ID NO: 5242 - protein, 1379 aa, Artificial Sequence
  SARS-CoV-2/Australia/QLD02/2020__EPI_ISL_407896 spike protein (1-1211)(I909C_Y1047C) Ferritin construct
MFVFLVLLPLVSSQCVNLTTRTQLPPAYTNSFTRGVYYPDKVFRSSVLHSTQDLFLPFFSNVTWFHAIHVSGTNGTKRFDNPVLPFNDGVYFASTEKSNIIRGWIFGTTLDSKTQSLLIVNNATNVVIKVCEFQFCNDPFLGVYYHKNNKSWMESEFRVYSSANNCTFEYVSQPFLMDLEGKQGNFKNLREFVFKNIDGYFKIYSKHTPINLVRDLPQGFSALEPLVDLPIGINITRFQTLLALHRSYLTPGDSSSGWTAGAAAYYVGYLQPRTFLLKYNENGTITDAVDCALDPLSETKCTLKSFTVEKGIYQTSNFRVQPTESIVRFPNITNLCPFGEVFNATRFASVYAWNRKRISNCVADYSVLYNSASFSTFKCYGVSPTKLNDLCFTNVYADSFVIRGDEVRQIAPGQTGKIADYNYKLPDDFTGCVIAWNSNNLDSKVGGNYNYLYRLFRKSNLKPFERDISTEIYQAGSTPCNGVEGFNCYFPLQSYGFQPTNGVGYQPYRVVVLSFELLHAPATVCGPKKSTNLVKNKCVNFNFNGLTGTGVLTESNKKFLPFQQFGRDIADTTDAVRDPQTLEILDITPCSFGGVSVITPGTNTSNQVAVLYQDVNCTEVPVAIHADQLTPTWRVYSTGSNVFQTRAGCLIGAEHVNNSYECDIPIGAGICASYQTQTNSPRRARSVASQSIIAYTMSLGAENSVAYSNNSIAIPTNFTISVTTEILPVSMTKTSVDCTMYICGDSTECSNLLLQYGSFCTQLNRALTGIAVEQDKNTQEVFAQVKQIYKTPPIKDFGGFNFSQILPDPSKPSKRSFIEDLLFNKVTLADAGFIKQYGDCLGDIAARDLICAQKFNGLTVLPPLLTDEMIAQYTSALLAGTITSGWTFGAGAALQIPFAMQMAYRFNGCGVTQNVLYENQKLIANQFNSAIGKIQDSLSSTASALGKLQDVVNQNAQALNTLVKQLSSNFGAISSVLNDILSRLDKVEAEVQIDRLITGRLQSLQTYVTQQLIRAAEIRASANLAATKMSECVLGQSKRVDFCGKGCHLMSFPQSAPHGVVFLHVTYVPAQEKNFTTAPAICHDGKAHFPREGVFVSNGTHWFVTQRNFYEPQIITTDNTFVSGNCDVVIGIVNNTVYDPLQLELDSFKEELDKYFKNHTSPDVDLGDISGINASVVNIQKEIDRLNEVAKNLNESLIDLQELGKYEQYIKGGGGSDIIKLLNEQVNKEMQSSNLYMSMSSWCYTHSLDGAGLFLFDHAAEEYEHAKKLIIFLNENNVPVQLTSISAPEHKFEGLTQIFQKAYEHEQHISESINNIVDHAIKSKDHATFNFLQWYVAEQHEEEVLFKDILDKIELIGNENHGLYLADQYVKGIAKSRKS

SEQ ID NO: 5243 - protein, 1379 aa, Artificial Sequence
  SARS-CoV-2/India/1-31/2020__EPI_ISL_413523 spike protein (1-1211)(I909C_Y1047C) Ferritin construct
MFVFLVLLPLVSSQCVNLTTRTQLPPAYTNSFTRGVYYPDKVFRSSVLHSTQDLFLPFFSNVTWFHAIHVSGTNGTKRFDNPVLPFNDGVYFASTEKSNIIRGWIFGTTLDSKTQSLLIVNNATNVVIKVCEFQFCNDPFLGVYYHKNNKSWMESEFRVYSSANNCTFEYVSQPFLMDLEGKQGNFKNLREFVFKNIDGYFKIYSKHTPINLVRDLPQGFSALEPLVDLPIGINITRFQTLLALHRSYLTPGDSSSGWTAGAAAYYVGYLQPRTFLLKYNENGTITDAVDCALDPLSETKCTLKSFTVEKGIYQTSNFRVQPTESIVRFPNITNLCPFGEVFNATRFASVYAWNRKRISNCVADYSVLYNSASFSTFKCYGVSPTKLNDLCFTNVYADSFVIRGDEVRQIAPGQTGKIADYNYKLPDDFTGCVIAWNSNNLDSKVGGNYNYLYRLFRKSNLKPFERDISTEIYQAGSTPCNGVEGFNCYFPLQSYGFQPTNGVGYQPYRVVVLSFELLHAPATVCGPKKSTNLVKNKCVNFNFNGLTGTGVLTESNKKFLPFQQFGRDIADTTDAVRDPQTLEILDITPCSFGGVSVITPGTNTSNQVAVLYQDVNCTEVPVAIHADQLTPTWRVYSTGSNVFQTRAGCLIGAEHVNNSYECDIPIGAGICASYQTQTNSPRRARSVASQSIIAYTMSLGAENSVAYSNNSIAIPTNFTISVTTEILPVSMTKTSVDCTMYICGDSTECSNLLLQYGSFCTQLNRALTGIAVEQDKNTQEVFAQVKQIYKTPPIKDFGGFNFSQILPDPSKPSKRSFIEDLLFNKVTLADAGFIKQYGDCLGDIAARDLICAQKFNGLTVLPPLLTDEMIAQYTSALLAGTITSGWTFGAGAALQIPFAMQMAYRFNGCGVTQNVLYENQKLIANQFNSVIGKIQDSLSSTASALGKLQDVVNQNAQALNTLVKQLSSNFGAISSVLNDILSRLDKVEAEVQIDRLITGRLQSLQTYVTQQLIRAAEIRASANLAATKMSECVLGQSKRVDFCGKGCHLMSFPQSAPHGVVFLHVTYVPAQEKNFTTAPAICHDGKAHFPREGVFVSNGTHWFVTQRNFYEPQIITTDNTFVSGNCDVVIGIVNNTVYDPLQPELDSFKEELDKYFKNHTSPDVDLGDISGINASVVNIQKEIDRLNEVAKNLNESLIDLQELGKYEQYIKGGGGSDIIKLLNEQVNKEMQSSNLYMSMSSWCYTHSLDGAGLFLFDHAAEEYEHAKKLIIFLNENNVPVQLTSISAPEHKFEGLTQIFQKAYEHEQHISESINNIVDHAIKSKDHATFNFLQWYVAEQHEEEVLFKDILDKIELIGNENHGLYLADQYVKGIAKSRKS

SEQ ID NO: 5244 - protein, 1379 aa, Artificial Sequence
  SARS-CoV-2/Guangdong/GD2020087-P0008/2020__EPI_ISL_413863 spike protein (1-1211)(I909C_Y1047C) Ferritin construct
MFVFLVLLPLVSSQCVNLTTRTQLPPAYTNSFTRGVYYPDKVFRSSVLHSTQDLFLPFFSNVTWFHAIHVSGTNGTKRFDNPVLPFNDGVYFASTEKSNIIRGWIFGTTLDSKTQSLLIVNNATNVVIKVCEFQFCNDPFLGVYYHKNNKSWMESEFRVYSSANNCTFEYVSQPFLMDLEGKQGNFKNLREFVFKNIDGYFKIYSKHTPINLVRDLPQGFSALEPLVDLPIGINITRFQTLLALHRSYLTPGDSSSGWTAGAAAYYVGYLQPRTFLLKYNENGTITDAVDCALDPLSETKCTLKSFTVEKGIYQTSNFRVQPTESIVRFPNITNLCPFGEVFNATRFASVYAWNRKRISNCVADYSVLYNSASFSTFKCYGVSPTKLNDLCFTNVYADSFVIRGDEVREIAPGQTGKIADYNYKLPDDFTGCVIAWNSNNLDSKVGGNYNYLYRLFRKSNLKPFERDISTEIYQAGSTPCNGVEGFNCYFPLQSYGFQPTNGVGYQPYRVVVLSFELLHAPATVCGPKKSTNLVKNKCVNFNFNGLTGTGVLTESNKKFLPFQQFGRDIADTTDAVRDPQTLEILDITPCSFGGVSVITPGTNTSNQVAVLYQDVNCTEVPVAIHADQLTPTWRVYSTGSNVFQTRAGCLIGAEHVNNSYECDIPIGAGICASYQTQTNSPRRARSVASQSIIAYTMSLGAENSVAYSNNSIAIPTNFTISVTTEILPVSMTKTSVDCTMYICGDSTECSNLLLQYGSFCTQLNRALTGIAVEQDKNTQEVFAQVKQIYKTPPIKDFGGFNFSQILPDPSKPSKRSFIEDLLFNKVTLADAGFIKQYGDCLGDIAARDLICAQKFNGLTVLPPLLTDEMIAQYTSALLAGTITSGWTFGAGAALQIPFAMQMAYRFNGCGVTQNVLYENQKLIANQFNSAIGKIQDSLSSTASALGKLQDVVNQNAQALNTLVKQLSSNFGAISSVLNDILSRLDKVEAEVQIDRLITGRLQSLQTYVTQQLIRAAEIRASANLAATKMSECVLGQSKRVDFCGKGCHLMSFPQSAPHGVVFLHVTYVPAQEKNFTTAPAICHDGKAHFPREGVFVSNGTHWFVTQRNFYEPQIITTDNTFVSGNCDVVIGIVNNTVYDPLQPELDSFKEELDKYFKNHTSPDVDLGDISGINASVVNIQKEIDRLNEVAKNLNESLIDLQELGKYEQYIKGGGGSDIIKLLNEQVNKEMQSSNLYMSMSSWCYTHSLDGAGLFLFDHAAEEYEHAKKLIIFLNENNVPVQLTSISAPEHKFEGLTQIFQKAYEHEQHISESINNIVDHAIKSKDHATFNFLQWYVAEQHEEEVLFKDILDKIELIGNENHGLYLADQYVKGIAKSRKS

SEQ ID NO: 5245 - protein, 1379 aa, Artificial Sequence
  SARS-CoV-2/Sweden/01/2020__EPI_ISL_411951 spike protein (1-1211)(I909C_Y1047C) Ferritin construct
MFVFLVLLPLVSSQCVNLTTRTQLPPAYTNSFTRGVYYPDKVFRSSVLHSTQDLFLPFFSNVTWFHAIHVSGTNGTKRFDNPVLPFNDGVYFASTEKSNIIRGWIFGTTLDSKTQSLLIVNNATNVVIKVCEFQFCNDPFLGVYYHKNNKSWMESEFRVYSSANNCTFEYVSQPFLMDLEGKQGNFKNLREFVFKNIDGYFKIYSKHTPINLVRDLPQGFSALEPLVDLPIGINITRFQTLLALHRSYLTPGDSSSGWTAGAAAYYVGYLQPRTFLLKYNENGTITDAVDCALDPLSETKCTLKSFTVEKGIYQTSNFRVQPTESIVRFPNITNLCPFGEVFNATRFASVYAWNRKRISNCVADYSVLYNSASFSTFKCYGVSPTKLNDLCFTNVYADSFVIRGDEVRQIAPGQTGKIADYNYKLPDDFTGCVIAWNSNNLDSKVGGNYNYLYRLFRKSNLKPFERDISTEIYQAGSTPCNGVEGFNCYFPLQSYGFQPTNGVGYQPYRVVVLSFELLHAPATVCGPKKSTNLVKNKCVNFNFNGLTGTGVLTESNKKFLPFQQFGRDIADTTDAVRDPQTLEILDITPCSFGGVSVITPGTNTSNQVAVLYQDVNCTEVPVAIHADQLTPTWRVYSTGSNVFQTRAGCLIGAEHVNNSYECDIPIGAGICASYQTQTNSPRRARSVASQSIIAYTMSLGAENSVAYSNNSIAIPTNFTISVTTEILPVSMTKTSVDCTMYICGDSTECSNLLLQYGSFCTQLNRALTGIAVEQDKNTQEVFAQVKQIYKTPPIKDCGGFNFSQILPDPSKPSKRSFIEDLLFNKVTLADAGFIKQYGDCLGDIAARDLICAQKFNGLTVLPPLLTDEMIAQYTSALLAGTITSGWTFGAGAALQIPFAMQMAYRFNGCGVTQNVLYENQKLIANQFNSAIGKIQDSLSSTASALGKLQDVVNQNAQALNTLVKQLSSNFGAISSVLNDILSRLDKVEAEVQIDRLITGRLQSLQTYVTQQLIRAAEIRASANLAATKMSECVLGQSKRVDFCGKGCHLMSFPQSAPHGVVFLHVTYVPAQEKNFTTAPAICHDGKAHFPREGVFVSNGTHWFVTQRNFYEPQIITTDNTFVSGNCDVVIGIVNNTVYDPLQPELDSFKEELDKYFKNHTSPDVDLGDISGINASVVNIQKEIDRLNEVAKNLNESLIDLQELGKYEQYIKGGGGSDIIKLLNEQVNKEMQSSNLYMSMSSWCYTHSLDGAGLFLFDHAAEEYEHAKKLIIFLNENNVPVQLTSISAPEHKFEGLTQIFQKAYEHEQHISESINNIVDHAIKSKDHATFNFLQWYVAEQHEEEVLFKDILDKIELIGNENHGLYLADQYVKGIAKSRKS

SEQ ID NO: 5246 - protein, 1379 aa, Artificial Sequence
  SARS-CoV-2/Tianmen/HBCDC-HB-07/2020__EPI_ISL_412983 spike protein (1-1211)(I909C_Y1047C) Ferritin construct
MFVFLVLLPLVSSQCVNLTTRTQLPPAYTNSFTRGVYYPDKVFRSSVLHSTQDLFLPFFSNVTWFHAIHVSGTNGTKRFDNPVLPFNDGVYFASTEKSNIIRGWIFGTTLDSKTQSLLIVNNATNVVIKVCEFQFCNDPFLGVYYHKNNKSWMESEFRVYSSANNCTFEYVSQPFLMDLEGKQGNFKNLREFVFKNIDGYFKIYSKHTPINLVRDLPQGFSALEPLVDLPIGINITRFQTLLALHRSYLTPGDSSSGWTAGAAAYYVGYLQPRTFLLKYNENGTITDAVDCALDPLSETKCTLKSFTVEKGIYQTSNFRVQPTESIVRFPNITNLCPFGEVFNATRFASVYAWNRKRISNCVADYSVLYNSASFSTFKCYGVSPTKLNDLCFTNVYADSFVIRGDEVRQIAPGQTGKIADYNYKLPDDFTGCVIAWNSNNLDSKVGGNYNYLYRLFRKSNLKPFERDISTEIYQAGSTPCNGVEGFNCYFPLQSYGFQPTNGVGYQPYRVVVLSFELLHAPATVCGPKKSTNLVKNKCVNFNFNGLTGTGVLTESNKKFLPFQQFGRDIADTTDAVRDPQTLEILDITPCSFGGVSVITPGTNTSNQVAVLYQDLNCTEVPVAIHADQLTPTWRVYSTGSNVFQTRAGCLIGAEHVNNSYECDIPIGAGICASYQTQTNSPRRARSVASQSIIAYTMSLGAENSVAYSNNSIAIPTNFTISVTTEILPVSMTKTSVDCTMYICGDSTECSNLLLQYGSFCTQLNRALTGIAVEQDKNTQEVFAQVKQIYKTPPIKDFGGFNFSQILPDPSKPSKRSFIEDLLFNKVTLADAGFIKQYGDCLGDIAARDLICAQKFNGLTVLPPLLTDEMIAQYTSALLAGTITSGWTFGAGAALQIPFAMQMAYRFNGCGVTQNVLYENQKLIANQFNSAIGKIQDSLSSTASALGKLQDVVNQNAQALNTLVKQLSSNFGAISSVLNDILSRLDKVEAEVQIDRLITGRLQSLQTYVTQQLIRAAEIRASANLAATKMSECVLGQSKRVDFCGKGCHLMSFPQSAPHGVVFLHVTYVPAQEKNFTTAPAICHDGKAHFPREGVFVSNGTHWFVTQRNFYEPQIITTDNTFVSGNCDVVIGIVNNTVYDPLQPELDSFKEELDKYFKNHTSPDVDLGDISGINASVVNIQKEIDRLNEVAKNLNESLIDLQELGKYEQYIKGGGGSDIIKLLNEQVNKEMQSSNLYMSMSSWCYTHSLDGAGLFLFDHAAEEYEHAKKLIIFLNENNVPVQLTSISAPEHKFEGLTQIFQKAYEHEQHISESINNIVDHAIKSKDHATFNFLQWYVAEQHEEEVLFKDILDKIELIGNENHGLYLADQYVKGIAKSRKS

SEQ ID NO: 5247 - protein, 1379 aa, Artificial Sequence
  SARS-CoV-2/Hong Kong/case42_VM20002493/2020__EPI_ISL_414527 spike protein (1-1211)(I909C_Y1047C) Ferritin construct
MFVFLVLLPLVSSQCVNLTTRTQLPPAYTNSFTRGVYYPDKVFRSSVLHSTQDLFLPFFSNVTWFHAIHVSGTNGTKRFDNPVLPFNDGVYFASTEKSNIIRGWIFGTTLDSKTQSLLIVNNATNVVIKVCEFQFCNDPFLGVYYHKNNKSWMESEFRVYSSANNCTFEYVSQPFLMDLEGKQGNFKNLREFVFKNIDGYFKIYSKHTPINLVRDLPQGFSALEPLVDLPIGINITRFQTLLALHRSYLTPGDSSSGWTAGAAAYYVGYLQPRTFLLKYNENGTITDAVDCALDPLSETKCTLKSFTVEKGIYQTSNFRVQPTESIVRFPNITNLCPFGEVFNATRFASVYAWNRKRISNCVADYSVLYNSASFSTFKCYGVSPTKLNDLCFTNVYADSFVIRGDEVRQIAPGQTGKIADYNYKLPDDFTGCVIAWNSNNLDSKVGGNYNYLYRLFRKSNLKPFERDISTEIYQAGSTPCNGVEGFNCYFPLQSYGFQPTNGVGYQPYRVVVLSFELLHAPATVCGPKKSTNLVKNKCVNFNFNGLTGTGVLTESNKKFLPFQQFGRDIADTTDAVRDPQTLEILDITPCSFGGVSVITPGTNTSNQVAVLYQDVNCTEVPVAIHADQLTPTWRVYSTGSNVFQTRAGCLIGAEHVNNSYECDIPIGAGICASYQTQTNSPRRARSVASQSIIAYTMSLGAENSVAYSNNSIAIPTNFAISVTTEILPVSMTKTSVDCTMYICGDSTECSNLLLQYGSFCTQLNRALTGIAVEQDKNTQEVFAQVKQIYKTPPIKDFGGFNFSQILPDPSKPSKRSFIEDLLFNKVTLADAGFIKQYGDCLGDIAARDLICAQKFNGLTVLPPLLTDEMIAQYTSALLAGTITSGWTFGAGAALQIPFAMQMAYRFNGCGVTQNVLYENQKLIANQFNSAIGKIQDSLSSTASALGKLQDVVNQNAQALNTLVKQLSSNFGAISSVLNDILSRLDKVEAEVQIDRLITGRLQSLQTYVTQQLIRAAEIRASANLAATKMSECVLGQSKRVDFCGKGCHLMSFPQSAPHGVVFLHVTYVPAQEKNFTTAPAICHDGKAHFPREGVFVSNGTHWFVTQRNFYEPQIITTDNTFVSGNCDVVIGIVNNTVYDPLQPELDSFKEELDKYFKNHTSPDVDLGDISGINASVVNIQKEIDRLNEVAKNLNESLIDLQELGKYEQYIKGGGGSDIIKLLNEQVNKEMQSSNLYMSMSSWCYTHSLDGAGLFLFDHAAEEYEHAKKLIIFLNENNVPVQLTSISAPEHKFEGLTQIFQKAYEHEQHISESINNIVDHAIKSKDHATFNFLQWYVAEQHEEEVLFKDILDKIELIGNENHGLYLADQYVKGIAKSRKS

SEQ ID NO: 5248 - protein, 1379 aa, Artificial Sequence
  SARS-CoV-2/USA/CruiseA-23/2020__EPI_ISL_414482 spike protein (1-1211)(I909C_Y1047C) Ferritin construct
MFVFLVLLPLVSSQCVNLTTRTQLPPAYTNSFTRGVYYPDKVFRSSVLHSTQDLFLPFFSNVTWFHAIHVSGTNGTKRFDNPVLPFNDGVYFASTEKSNIIRGWIFGTTLDSKTQSLLIVNNATNVVIKVCEFQFCNDPFLGVYYHKNNKSWMESEFRVYSSANNCTFEYVSQPFLMDLEVKQGNFKNLREFVFKNIDGYFKIYSKHTPINLVRDLPQGFSALEPLVDLPIGINITRFQTLLALHRSYLTPGDSSSGWTAGAAAYYVGYLQPRTFLLKYNENGTITDAVDCALDPLSETKCTLKSFTVEKGIYQTSNFRVQPTESIVRFPNITNLCPFGEVFNATRFASVYAWNRKRISNCVADYSVLYNSASFSTFKCYGVSPTKLNDLCFTNVYADSFVIRGDEVRQIAPGQTGKIADYNYKLPDDFTGCVIAWNSNNLDSKVGGNYNYLYRLFRKSNLKPFERDISTEIYQAGSTPCNGVEGFNCYFPLQSYGFQPTNGVGYQPYRVVVLSFELLHAPATVCGPKKSTNLVKNKCVNFNFNGLTGTGVLTESNKKFLPFQQFGRDIADTTDAVRDPQTLEILDITPCSFGGVSVITPGTNTSNQVAVLYQDVNCTEVPVAIHADQLTPTWRVYSTGSNVFQTRAGCLIGAEHVNNSYECDIPIGAGICASYQTQTNSPRRARSVASQSIIAYTMSLGAENSVAYSNNSIAIPTNFTISVTTEILPVSMTKTSVDCTMYICGDSTECSNLLLQYGSFCTQLNRALTGIAVEQDKNTQEVFAQVKQIYKTPPIKDFGGFNFSQILPDPSKPSKRSFIEDLLFNKVTLADAGFIKQYGDCLGDIAARDLICAQKFNGLTVLPPLLTDEMIAQYTSALLAGTITSGWTFGAGAALQIPFAMQMAYRFNGCGVTQNVLYENQKLIANQFNSAIGKIQDSLSSTASALGKLQDVVNQNAQALNTLVKQLSSNFGAISSVLNDILSRLDKVEAEVQIDRLITGRLQSLQTYVTQQLIRAAEIRASANLAATKMSECVLGQSKRVDFCGKGCHLMSFPQSAPHGVVFLHVTYVPAQEKNFTTAPAICHDGKAHFPREGVFVSNGTHWFVTQRNFYEPQIITTDNTFVSGNCDVVIGIVNNTVYDPLQPELDSFKEELDKYFKNHTSPDVDLGDISGINASVVNIQKEIDRLNEVAKNLNESLIDLQELGKYEQYIKGGGGSDIIKLLNEQVNKEMQSSNLYMSMSSWCYTHSLDGAGLFLFDHAAEEYEHAKKLIIFLNENNVPVQLTSISAPEHKFEGLTQIFQKAYEHEQHISESINNIVDHAIKSKDHATFNFLQWYVAEQHEEEVLFKDILDKIELIGNENHGLYLADQYVKGIAKSRKS

SEQ ID NO: 5249 - protein, 1379 aa, Artificial Sequence
  SARS-CoV-2/Hong Kong/case85_VM20002868/2020__EPI_ISL_414519 spike protein (1-1211)(I909C_Y1047C) Ferritin construct
MFVFLVLVPLVSSQCVNLTTRTQLPPAYTNSFTRGVYYPDKVFRSSVLHSTQDLFLPFFSNVTWFHAIHVSGTNGTKRFDNPVLPFNDGVYFASTEKSNIIRGWIFGTTLDSKTQSLLIVNNATNVVIKVCEFQFCNDPFLGVYYHKNNKSWMESEFRVYSSANNCTFEYVSQPFLMDLEGKQGNFKNLREFVFKNIDGYFKIYSKHTPINLVRDLPQGFSALEPLVDLPIGINITRFQTLLALHRSYLTPGDSSSGWTAGAAAYYVGYLQPRTFLLKYNENGTITDAVDCALDPLSETKCTLKSFTVEKGIYQTSNFRVQPTESIVRFPNITNLCPFGEVFNATRFASVYAWNRKRISNCVADYSVLYNSASFSTFKCYGVSPTKLNDLCFTNVYADSFVIRGDEVRQIAPGQTGKIADYNYKLPDDFTGCVIAWNSNNLDSKVGGNYNYLYRLFRKSNLKPFERDISTEIYQAGSTPCNGVEGFNCYFPLQSYGFQPTNGVGYQPYRVVVLSFELLHAPATVCGPKKSTNLVKNKCVNFNFNGLTGTGVLTESNKKFLPFQQFGRDIADTTDAVRDPQTLEILDITPCSFGGVSVITPGTNTSNQVAVLYQDVNCTEVPVAIHADQLTPTWRVYSTGSNVFQTRAGCLIGAEHVNNSYECDIPIGAGICASYQTQTNSPRRARSVASQSIIAYTMSLGAENSVAYSNNSIAIPTNFTISVTTEILPVSMTKTSVDCTMYICGDSTECSNLLLQYGSFCTQLNRALTGIAVEQDKNTQEVFAQVKQIYKTPPIKDFGGFNFSQILPDPSKPSKRSFIEDLLFNKVTLADAGFIKQYGDCLGDIAARDLICAQKFNGLTVLPPLLTDEMIAQYTSALLAGTITSGWTFGAGAALQIPFAMQMAYRFNGCGVTQNVLYENQKLIANQFNSAIGKIQDSLSSTASALGKLQDVVNQNAQALNTLVKQLSSNFGAISSVLNDILSRLDKVEAEVQIDRLITGRLQSLQTYVTQQLIRAAEIRASANLAATKMSECVLGQSKRVDFCGKGCHLMSFPQSAPHGVVFLHVTYVPAQEKNFTTAPAICHDGKAHFPREGVFVSNGTHWFVTQRNFYEPQIITTDNTFVSGNCDVVIGIVNNTVYDPLQPELDSFKEELDKYFKNHTSPDVDLGDISGINASVVNIQKEIDRLNEVAKNLNESLIDLQELGKYEQYIKGGGGSDIIKLLNEQVNKEMQSSNLYMSMSSWCYTHSLDGAGLFLFDHAAEEYEHAKKLIIFLNENNVPVQLTSISAPEHKFEGLTQIFQKAYEHEQHISESINNIVDHAIKSKDHATFNFLQWYVAEQHEEEVLFKDILDKIELIGNENHGLYLADQYVKGIAKSRKS

SEQ ID NO: 5250 - protein, 1379 aa, Artificial Sequence; identical to SEQ ID NO: 5240
  SARS-CoV-2/England/200990660/2020__EPI_ISL_414523 spike protein (1-1211)(I909C_Y1047C) Ferritin construct

SEQ ID NO: 5251 - protein, 1379 aa, Artificial Sequence
  SARS-CoV-2/Australia/NSW09/2020__EPI_ISL_413595 spike protein (1-1211)(I909C_Y1047C) Ferritin construct
MFVFLVLLPLVSSQCVNLTTRTQLPPAYTNSFTRGVYYPDKVFRSSVLHSTQDLFLPFFSNVTWFHAIHVSGTNGTKRFDNPVLPFNDGVYFASTEKSNIIRGWIFGTTLDSKTQSLLIVNNATNVVIKVCEFQFCNDPFLGVYYHKNNKSWMESEFRVYSSANNCTFEYVSQPFLMDLEGKQGNFKNLREFVFKNIDGYFKIYSKHTPINLVRDLPQGFSALEPLVDLPIGINITRFQTLLALHRSYLTPGDSSSGWTAGAAAYYVGYLQPRTFLLKYNENGTITDAVDCALDPLSETKCTLKSFTVEKGIYQTSNFRVQPTESIVRFPNITNLCPFGEVFNATRFASVYAWNRKRISNCVADYSVLYNSASFSTFKCYGVSPTKLNDLCFTNVYADSFVIRGDEVRQIAPGQTGKIADYNYKLPDDFTGCVIAWNSNNLDSKVGGNYNYLYRLFRKSNLKPFERDISTEIYQAGSTPCNGVEGFNCYFPLQSYGFQPTNGVGYQPYRVVVLSFELLHAPATVCGPKKSTNLVKNKCVNFNFNGLTGTGVLTESNKKFLPFQQFGRDIADTTDAVRDPQTLEILDITPCSFGGVSVITPGTNTSNQVAVLYQDVNCTEVPVAIHADQLTPTWRVYSTGSNVFQTRAGCLIGAEHVNNSYECDIPIGAGICASYQTQTNSPRRARSVASQSIIAYTMSLGAENSVAYSNNSIAIPTNFTISVTTEILPVSMTKTSVDCTMYICGDSTECSNLLLQYGSFCTQLNRALTGIAVEQDKNTQEVFAQVKQIYKTPPIKDFGGFNFSQILPDPSKPSKRSFIEDLLFNKVTLADAGFIKQYGDCLGDIAARDLICAQKFNGLTVLPPLLTDEMIAQYTSALLAGTITSGWTFGAGAALQIPFAMQMAYRFNGCGVTQNVLYENQKLIANQFNSAIGKIQDSLSFTASALGKLQDVVNQNAQALNTLVKQLSSNFGAISSVLNDILSRLDKVEAEVQIDRLITGRLQSLQTYVTQQLIRAAEIRASANLAATKMSECVLGQSKRVDFCGKGCHLMSFPQSAPHGVVFLHVTYVPAQEKNFTTAPAICHDGKAHFPREGVFVSNGTHWFVTQRNFYEPQIITTDNTFVSGNCDVVIGIVNNTVYDPLQPELDSFKEELDKYFKNHTSPDVDLGDISGINASVVNIQKEIDRLNEVAKNLNESLIDLQELGKYEQYIKGGGGSDIIKLLNEQVNKEMQSSNLYMSMSSWCYTHSLDGAGLFLFDHAAEEYEHAKKLIIFLNENNVPVQLTSISAPEHKFEGLTQIFQKAYEHEQHISESINNIVDHAIKSKDHATFNFLQWYVAEQHEEEVLFKDILDKIELIGNENHGLYLADQYVKGIAKSRKS

SEQ ID NO: 5252 - protein, 1379 aa, Artificial Sequence; identical to SEQ ID NO: 5232
  SARS-CoV-2/Australia/NSW10/2020__EPI_ISL_413596 spike protein (1-1211)(I909C_Y1047C) Ferritin construct

SEQ ID NO: 5253 - protein, 1379 aa, Artificial Sequence
  SARS-CoV-2/Switzerland/1000477797/2020__EPI_ISL_413023 spike protein (1-1211)(I909C_Y1047C) Ferritin construct
MFVFLVLLPLVSSQCVNLTTRTQLPPAYTNSFTRGVYYPDKVFRSSVLHSTQDLFLPFFSNVTWFHAIHVSGTNGTKRFDNPVLPFNDGVYFASTEKSNIIRGWIFGTTLDSKTQSLLIVNNATNVVIKVCEFQFCNDPFLGVYYHKNNKSWMESEFRVYSSANNCTFEYVSQPFLMDLEGKQGNFKNLREFVFKNIDGYFNIYSKHTPINLVRDLPQGFSALEPLVDLPIGINITRFQTLLALHRSYLTPGDSSSGWTAGAAAYYVGYLQPRTFLLKYNENGTITDAVDCALDPLSETKCTLKSFTVEKGIYQTSNFRVQPTESIVRFPNITNLCPFGEVFNATRFASVYAWNRKRISNCVADYSVLYNSASFSTFKCYGVSPTKLNDLCFTNVYADSFVIRGDEVRQIAPGQTGKIADYNYKLPDDFTGCVIAWNSNNLDSKVGGNYNYLYRLFRKSNLKPFERDISTEIYQAGSTPCNGVEGFNCYFPLQSYGFQPTNGVGYQPYRVVVLSFELLHAPATVCGPKKSTNLVKNKCVNFNFNGLTGTGVLTESNKKFLPFQQFGRDIADTTDAVRDPQTLEILDITPCSFGGVSVITPGTNTSNQVAVLYQGVNCTEVPVAIHADQLTPTWRVYSTGSNVFQTRAGCLIGAEHVNNSYECDIPIGAGICASYQTQTNSPRRARSVASQSIIAYTMSLGAENSVAYSNNSIAIPTNFTISVTTEILPVSMTKTSVDCTMYICGDSTECSNLLLQYGSFCTQLNRALTGIAVEQDKNTQEVFAQVKQIYKTPPIKDFGGFNFSQILPDPSKPSKRSFIEDLLFNKVTLADAGFIKQYGDCLGDIAARDLICAQKFNGLTVLPPLLTDEMIAQYTSALLAGTITSGWTFGAGAALQIPFAMQMAYRFNGCGVTQNVLYENQKLIANQFNSAIGKIQDSLSSTASALGKLQDVVNQNAQALNTLVKQLSSNFGAISSVLNDILSRLDKVEAEVQIDRLITGRLQSLQTYVTQQLIRAAEIRASANLAATKMSECVLGQSKRVDFCGKGCHLMSFPQSAPHGVVFLHVTYVPAQEKNFTTAPAICHDGKAHFPREGVFVSNGTHWFVTQRNFYEPQIITTDNTFVSGNCDVVIGIVNNTVYDPLQPELDSFKEELDKYFKNHTSPDVDLGDISGINASVVNIQKEIDRLNEVAKNLNESLIDLQELGKYEQYIKGGGGSDIIKLLNEQVNKEMQSSNLYMSMSSWCYTHSLDGAGLFLFDHAAEEYEHAKKLIIFLNENNVPVQLTSISAPEHKFEGLTQIFQKAYEHEQHISESINNIVDHAIKSKDHATFNFLQWYVAEQHEEEVLFKDILDKIELIGNENHGLYLADQYVKGIAKSRKS

SEQ ID NO: 5254 - protein, 1379 aa, Artificial Sequence
  SARS-CoV-2/Belgium/BA-02291/2020__EPI_ISL_415159 spike protein (1-1211)(I909C_Y1047C) Ferritin construct
MFVFLVLLPLVSSQCVNLTTRTQLPPAYTNSFTRGVYYPDKVFRSSVLHSTQDLFLPFFSNVTWFHAIHVSGTNGTKRFDNPVLPFNDGVYFASTEKSNIIRGWIFGTTLDSKTQSLLIVNNATNVVIKVCEFQFCNDPFLGVYYHKNNKSWMESEFRVYSSANNCTFEYVSQPFLMDLEGKQGNFKNLREFVFKNIDGYFKIYSKHTPINLVRDLPQGFSALEPLVDLPIGINITRFQTLLALHRSYLTPGDSSSGWTAGAAAYYVGYLQPRTFLLKYNENGTITDAVDCALDPLSETKCTLKSFTVEKGIYQTSNFRVQPTESIVRFPNITNLCPFGEVFNATRFASVYAWNRKRISNCVADYSVLYNSASFSTFKCYGVSPTKLNDLCFTNVYADSFVIRGDEVRQIAPGQTGKIADYNYKLPDDFTGCVIAWNSNNLDSKVGGNYNYLYRLFRRSNLKPFERDISTEIYQAGSTPCNGVEGFNCYFPLQSYGFQPTNGVGYQPYRVVVLSFELLPAPATVCGPKKSTNLVKNKCVNFNFNGLTGTGVLTESNKKFLPFQQFGRDIADTTDAVRDPQTLEILDITPCSFGGVSVITPGTNTSNQVAVLYQGVNCTEVPVAIHADQLTPTWRVYSTGSNVFQTRAGCLIGAEHVNNSYECDIPIGAGICASYQTQTNSPRRARSVASQSIIAYTMSLGAENSVAYSNNSIAIPTNFTISVTTEILPVSMTKTSVDCTMYICGDSTECSNLLLQYGSFCTQLNRALTGIAVEQDKNTQEVFAQVKQIYKTPPIKDFGGFNFSQILPDPSKPSKRSFIEDLLFNKVTLADAGFIKQYGDCLGDIAARDLICAQKFNGLTVLPPLLTDEMIAQYTSALLAGTITSGWTFGAGAALQIPFAMQMAYRFNGCGVTQNVLYENQKLIANQFNSAIGKIQDSLSSAAPALGKLQDVVNQNAQALNTLVKQLSSNFGAISSVLNDILSRLDKVEAEVQIDRLITGRLQSLQTYVTQQLIRAAEIRASANLAATKMSECVLGQSKRVDFCGKGCHLMSFPQSAPHGVVFLHVTYVPAQEKNFTTAPAICHDGKAHFPREGVFVSNGTHWFVTQRNFYEPQIITTDNTFVSGNCDVVIGIVNNTVYDPLQPELDSFKEELDKYFKNHTSPDVDLGDISGINASVVNIQKEIDRLNEVAKNLNESLIDLQELGKYEQYIKGGGGSDIIKLLNEQVNKEMQSSNLYMSMSSWCYTHSLDGAGLFLFDHAAEEYEHAKKLIIFLNENNVPVQLTSISAPEHKFEGLTQIFQKAYEHEQHISESINNIVDHAIKSKDHATFNFLQWYVAEQHEEEVLFKDILDKIELIGNENHGLYLADQYVKGIAKSRKS

SEQ ID NO: 5255 - protein, 1379 aa, Artificial Sequence
  SARS-CoV-2/USA/WA8-UW5/2020__EPI_ISL_413486 spike protein (1-1211)(I909C_Y1047C) Ferritin construct
MFVFLVLLPLVSSQCVNLTTRTQLPPAYTNSFTRGVYYPDKVFRSSVLHSTQDLFLPFFSNVTWFHAIHVSGTNGTKRFDNPVLPFNDGVYFASTEKSNIIRGWIFGTTLDSKTQSLLIVNNATNVVIKVCEFQFCNDPFLGVYYHKNNKSWMESEFRVYSSANNCTFEYVSQPFLMDLEGKQGNFKNLREFVFKNIDGYFKIYSKHTPINLVRDLPQGFSALEPLVDLPIGINITRFQTLLALHRSYLTPGDSSSGWTAGAAAYYVGYLQPRTFLLKYNENGTITDAVDCALDPLSETKCTLKSFTVEKGIYQTSNFRVQPTESIVRFPNITNLCPFGEVFNATRFASVYAWNRKRISNCVADYSVLYNSASFSTFKCYGVSPTKLNDLCFTNVYADSFVIRGDEVRQIAPGQTGKIADYNYKLPDDFTGCVIAWNSNNLDSKVGGNYNYLYRLFRKSNLKPFERDISTEIYQAGSTPCNGVEGFNCYFPLQSYGFQPTNGVGYQPYRVVVLSFELLHAPATVCGPKKSTNLVKNKCVNFNFNGLTGTGVLTESNKKFLPFQQFGRDIADTTDAVRDPQTLEILDITPCSFGGVSVITPGTNTSNQVAVLYQDVNCTEVPVAIHADQLTPTWRVYSTGSNVFQTRAGCLIGAEYVNNSYECDIPIGAGICASYQTQTNSPRRARSVASQSIIAYTMSLGAENSVAYSNNSIAIPTNFTISVTTEILPVSMTKTSVDCTMYICGDSTECSNLLLQYGSFCTQLNRALTGIAVEQDKNTQEVFAQVKQIYKTPPIKDFGGFNFSQILPDPSKPSKRSFIEDLLFNKVTLADAGFIKQYGDCLGDIAARDLICAQKFNGLTVLPPLLTDEMIAQYTSALLAGTITSGWTFGAGAALQIPFAMQMAYRFNGCGVTQNVLYENQKLIANQFNSAIGKIQDSLSSTASALGKLQDVVNQNAQALNTLVKQLSSNFGAISSVLNDILSRLDKVEAEVQIDRLITGRLQSLQTYVTQQLIRAAEIRASANLAATKMSECVLGQSKRVDFCGKGCHLMSFPQSAPHGVVFLHVTYVPAQEKNFTTAPAICHDGKAHFPREGVFVSNGTHWFVTQRNFYEPQIITTDNTFVSGNCDVVIGIVNNTVYDPLQPELDSFKEELDKYFKNHTSPDVDLGDISGINASVVNIQKEIDRLNEVAKNLNESLIDLQELGKYEQYIKGGGGSDIIKLLNEQVNKEMQSSNLYMSMSSWCYTHSLDGAGLFLFDHAAEEYEHAKKLIIFLNENNVPVQLTSISAPEHKFEGLTQIFQKAYEHEQHISESINNIVDHAIKSKDHATFNFLQWYVAEQHEEEVLFKDILDKIELIGNENHGLYLADQYVKGIAKSRKS

SEQ ID NO: 5256 - protein, 1379 aa, Artificial Sequence
  SARS-CoV-2/England/20102000506/2020__EPI_ISL_415147 spike protein (1-1211)(I909C_Y1047C) Ferritin construct
MFVFLVLLPLVSSQCVNLTTRTQLPPAYTNSFTRGVYYPDKVFRSSVLHSTQDLFLPFFSNVTWFHAIHVSGTNGTKRFDNPVLPFNDGVYFASTEKSNIIRGWIFGTTLDSKTQSLLIVNNATNVVIKVCEFQFCNDPFLGVYYHKNNKSWMESEFRVYSSANNCTFEYVSQPFLMDLEGKQGNFKNLREFVFKNIDGYFKIYSKHTPINLVRDLPQGFSALEPLVDLPIGINITRFQTLLALHRSYLTPGDSSSGWTAGAAAYYVGYLQPRTFLLKYNENGTITDAVDCALDPLSETKCTLKSFTVEKGIYQTSNFRVQPTESIVRFPNITNLCPFGEVFNATRFASVYAWNRKRISNCVADYSVLYNSASFSTFKCYGVSPTKLNDLCFTNVYADSFVIRGDEVRQIAPGQTGKIADYNYKLPDDFTGCVIAWNSNNLDSKVGGNYNYLYRLFRKSNLKPFERDISTEIYQAGSTPCNGVEGFNCYFPLQSYGFQPTNGVGYQPYRVVVLSFELLHAPATVCGPKKSTNLVKNKCVNFNFNGLTGTGVLTESNKKFLPFQQFGRDIADTTDAVRDPQTLEILDITPCSFGGVSVITPGTNTSNQVAVLYQGVNCTEVPVAIHADQLTPTWRVYSTGSNVFQTRAGCLIGAEHVNNSYECDIPIGAGICASYQTQTNSPRRARSVASQSIIAYTMSLGAENSVAYSNNSIAIPTNFTISVTTEILPVSMTKTSVDCTMYICGDSTECSNLLLQYGSFCTQLNRALTGIAVEQDKNTQEVFAQVKQIYKTPPIKDFGGFNFSQILPDPSKPSKRSFIEDLLFNKVTLADAGFIKQYGYCLGDIAARDLICAQKFNGLTVLPPLLTDEMIAQYTSALLAGTITSGWTFGAGAALQIPFAMQMAYRFNGCGVTQNVLYENQKLIANQFNSAIGKIQDSLSSTASALGKLQDVVNQNAQALNTLVKQLSSNFGAISSVLNDILSRLDKVEAEVQIDRLITGRLQSLQTYVTQQLIRAAEIRASANLAATKMSECVLGQSKRVDFCGKGCHLMSFPQSAPHGVVFLHVTYVPAQEKNFTTAPAICHDGKAHFPREGVFVSNGTHWFVTQRNFYEPQIITTDNTFVSGNCDVVIGIVNNTVYDPLQPELDSFKEELDKYFKNHTSPDVDLGDISGINASVVNIQKEIDRLNEVAKNLNESLIDLQELGKYEQYIKGGGGSDIIKLLNEQVNKEMQSSNLYMSMSSWCYTHSLDGAGLFLFDHAAEEYEHAKKLIIFLNENNVPVQLTSISAPEHKFEGLTQIFQKAYEHEQHISESINNIVDHAIKSKDHATFNFLQWYVAEQHEEEVLFKDILDKIELIGNENHGLYLADQYVKGIAKSRKS

SEQ ID NO: 5257 - protein, 1379 aa, Artificial Sequence
  SARS-CoV-2/Belgium/VAG-03013/2020__EPI_ISL_415155 spike protein (1-1211)(I909C_Y1047C) Ferritin construct
MFVFLVLLPLVSSQCVNLTTRTQLPPAYTNSFTRGVYYPDKVFRSSVLHSTQDLFLPFFSNVTWFHAIHVSGTNGTKRFDNPVLPFNDGVYFASTEKSNIIRGWIFGTTLDSKTQSLLIVNNATNVVIKVCEFQFCNDPFLGVYYHKNNKSWMESEFRVYSSANNCTFEYVSQPFLMDLEGKQGNFKNLREFVFKNIDGYFKIYSKHTPINLVRDLPQGFSALEPLVDLPIGINITRFQTLLALHRSYLTPGDSSSGWTAGAAAYYVGYLQPRTFLLKYNENGTITDAVDCALDPLSETKCTLKSFTVEKGIYQTSNFRVQPTESIVRFPNITNLCPFGEVFNATRFASVYAWNRKRISNCVADYSVLYNSASFSTFKCYGVSPTKLNDLCFTNVYADSFVIRGDEVRQIAPGQTGKIADYNYKLPDDFTGCVIAWNSNNLDSKVGGNYNYLYRLFRKSNLKPFERDISTEIYQAGSTPCNGVEGFNCYFPLQSYGFQPTNGVGYQPYRVVVLSFELLHAPATVCGPKKSTNLVKNKCVNFNFNGLTGTGVLTESNKKFLPFQQFGRDIADTTDAVRDPQTLEILDITPCSFGGVSVITPGTNTSNQVAVLYQGVNCTEVPVAIHADQLTPTWRVYSTGSNVFQTRAGCLIGAEHVNNSYECDIPIGAGICASYQTQTNSPRRARSVASQSIIAYTMSLGAENSVAYSNNSIAIPTNFTISVTTEILPVSMTKTSVDCTMYICGDSTECSNLLLQYGSFCTQLNRALTGIAVEQDKNTQEVFAQVKQIYKTPPIKDFGGFNFSQILPDPSKPSKRSFIEDLLFNKVTLADAGFIKQYGDCLGDIAARDLICAQKFNGLTVLPPLLTDEMIAQYTSALLAGTITSGWTFGAGAALQIPFAMQMAYRFNGCGVTQNVLYENQKLIANQFNSAIGKIQDSLSSTATALGKLQDVVNQNAQALNTLVKQLSSNFGAISSVLNDILSRLDKVEAEVQIDRLITGRLQSLQTYVTQQLIRAAEIRASANLAATKMSECVLGQSKRVDFCGKGCHLMSFPQSAPHGVVFLHVTYVPAQEKNFTTAPAICHDGKAHFPREGVFVSNGTHWFVTQRNFYEPQIITTDNTFVSGNCDVVIGIVNNTVYDPLQPELDSFKEELDKYFKNHTSPDVDLGDISGINASVVNIQKEIDRLNEVAKNLNESLIDLQELGKYEQYIKGGGGSDIIKLLNEQVNKEMQSSNLYMSMSSWCYTHSLDGAGLFLFDHAAEEYEHAKKLIIFLNENNVPVQLTSISAPEHKFEGLTQIFQKAYEHEQHISESINNIVDHAIKSKDHATFNFLQWYVAEQHEEEVLFKDILDKIELIGNENHGLYLADQYVKGIAKSRKS

SEQ ID NO: 5258 - protein, 1379 aa, Artificial Sequence
  SARS-CoV-2/Belgium/BC-03016/2020__EPI_ISL_415157 spike protein (1-1211)(I909C_Y1047C) Ferritin construct
MFVFLVLLPLVSSQCVNLTTRTQLPPAYTNSFTRGVYYPDKVFRSSVLHSTQDLFLPFFSNVTWFHAIHVSGTNGTKRFDNPVLPFNDGVYFASTEKSNIIRGWIFGTTLDSKTQSLLIVNNATNVVIKVCEFQFCNDPFLGVYYHKNNKSWMESEFRVYSSANNCTFEYVSQPFLMDLEGKQGNFKNLREFVFKNIDGYFKIYSKHTPINLVRDLPQGFSALEPLVDLPIGINITRFQTLLALHRSYLTPGDSSSGWTAGAAAYYVGYLQPRTFLLKYNENGTITDAVDCALDPLSETKCTLKSFTVEKGIYQTSNFRVQPTESIVRFPNITNLCPFGEVFNATRFASVYAWNRKRISNCVADYSVLYNSASFSTFKCYGVSPTKLNDLCFTNVYADSFVIRGDEVRQIAPGQTGKIADYNYKLPDDFTGCVIAWNSNNLDSKVGGNYNYLYRLFRKSNLKPFERDISTEIYQAGSTPCNGVEGFNCYFPLQSYGFQPTNGVGYQPYRVVVLSFELLHAPATVCGPKKSTNLVKNKCVNFNFNGLTGTGVLTESNKKFLPFQQFGRDIADTTDAVRDPQTLEILDITPCSFGGVSVITPGTNTSNQVAVLYQGVNCTEVPVAIHADQLTPTWRVYSTGSNVFQTRAGCLIGAEHVNNSYECDIPIGAGICASYQTQTNSPRRARSVASQSIIAYTMSLGAENSVAYSNNSIAIPTNFTISVTTEILPVSMTKTSVDCTMYICGDSTECSNLLLQYGSFCTQLNRALTGIAVEQDKNTQEVFAQVKQIYKTPPIKDFGGFNFSQILPDPSKPSKRSFIEDLLFNKVTLADAGFIKQYGDCLGDIAARDLICAQKFNGLTVLPPLLTDEMIAQYTSALLAGTITSGWTFGAGAALQIPFAMQMAYRFNGCGVTQNVLYENQKLIANQFNSAIGKIQDSLSSTAPALGKLQDVVNQNAQALNTLVKQLSSNFGAISSVLNDILSRLDKVEAEVQIDRLITGRLQSLQTYVTQQLIRAAEIRASANLAATKMSECVLGQSKRVDFCGKGCHLMSFPQSAPHGVVFLHVTYVPAQEKNFTTAPAICHDGKAHFPREGVFVSNGTHWFVTQRNFYEPQIITTDNTFVSGNCDVVIGIVNNTVYDPLQPELDSFKEELDKYFKNHTSPDVDLGDISGINASVVNIQKEIDRLNEVAKNLNESLIDLQELGKYEQYIKGGGGSDIIKLLNEQVNKEMQSSNLYMSMSSWCYTHSLDGAGLFLFDHAAEEYEHAKKLIIFLNENNVPVQLTSISAPEHKFEGLTQIFQKAYEHEQHISESINNIVDHAIKSKDHATFNFLQWYVAEQHEEEVLFKDILDKIELIGNENHGLYLADQYVKGIAKSRKS

SEQ ID NO: 5259 - protein, 1379 aa, Artificial Sequence
  SARS-CoV-2/Germany/BavPat3/2020__EPI_ISL_414521 spike protein (1-1211)(I909C_Y1047C) Ferritin construct
MFVFLVLLPLVSSQCVNLTTRTQLPPAYTNSFTRGVYYPDKVFRSSVLHSTQDLFLPFFSNVTWFHAIHVSGTNGTKRFDNPVLPFNDGVYFASTEKSNIIRGWIFGTTLDSKTQSLLIVNNATNVVIKVCEFQFCNDPFLGVYYHKNNKSWMESEFRVYSSANNCTFEYVSQPFLMDLEGKQGNFKNLREFVFKNIDGYFKIYSKHTPINLVRDLPQGFSALEPLVDLPIGINITRFQTLLALHRSYLTPGDSSSGWTAGAAAYYVGYLQPRTFLLKYNENGTITDAVDCALDPLSETKCTLKSFTVEKGIYQTSNFRVQPTESIVRFPNITNLCPFGEVFNATRFASVYAWNRKRISNCVADYSVLYNSASFSTFKCYGVSPTKLNDLCFTNVYADSFVIRGDEVRQIAPGQTGKIADYNYKLPDDFTGCVIAWNSNNLDSKVGGNYNYLYRLFRKSNLKPFERDISTEIYQAGSTPCNGVEGFNCYFPLQSYGFQPTNGVGYQPYRVVVLSFELLHAPATVCGPKKSTNLVKNKCVNFNFNGLTGTGVLTESNKKFLPFQQFGRDIADTTDAVRDPQTLEILDITPCSFGGVSVITPGTNTSNQVAVLYQDVNCTEVPVAIHADQLTPTWRVYSTGSNVFQTRAGCLIGAEHVNNSYECDIPIGAGICASYQTQTNSPRRARSVASQSIIAYTMSLGAENSVAYSNNSIAIPTNFTISVTTEILPVSMTKTSVDCTMYICGDSTECSNLLLQYGSFCTQLNRALTGIAVEQDKNTQQVFAQVKQIYKTPPIKDFGGFNFSQILPDPSKPSKRSFIEDLLFNKVTLADAGFIKQYGDCLGDIAARDLICAQKFNGLTVLPPLLTDEMIAQYTSALLAGTITSGWTFGAGAALQIPFAMQMAYRFNGCGVTQNVLYENQKLIANQFNSAIGKIQDSLSSTASALGKLQDVVNQNAQALNTLVKQLSSNFGAISSVLNDILSRLDKVEAEVQIDRLITGRLQSLQTYVTQQLIRAAEIRASANLAATKMSECVLGQSKRVDFCGKGCHLMSFPQSAPHGVVFLHVTYVPAQEKNFTTAPAICHDGKAHFPREGVFVSNGTHWFVTQRNFYEPQIITTDNTFVSGNCDVVIGIVNNTVYDPLQPELDSFKEELDKYFKNHTSPDVDLGDISGINASVVNIQKEIDRLNEVAKNLNESLIDLQELGKYEQYIKGGGGSDIIKLLNEQVNKEMQSSNLYMSMSSWCYTHSLDGAGLFLFDHAAEEYEHAKKLIIFLNENNVPVQLTSISAPEHKFEGLTQIFQKAYEHEQHISESINNIVDHAIKSKDHATFNFLQWYVAEQHEEEVLFKDILDKIELIGNENHGLYLADQYVKGIAKSRKS

SEQ ID NO: 5260 - protein, 1379 aa, Artificial Sequence
  SARS-CoV-2/France/HF1805/2020__EPI_ISL_414628 spike protein (1-1211)(I909C_Y1047C) Ferritin construct
MFVFLVLLPLVSSQCVNLTTRTQLPPAYTNSFTRGVYYPDKVFRSSVLHSTQDLFLPFFSNVTWFHAIHVSGTNGTKRFDNPVLPFNDGVYFASTEKSNIIRGWIFGTTLDSKTQSLLIVNNATNVVIKVCEFQFCNDPFLGVYYHKNNKSWMESEFRVYSSANNCTFEYVSQPFLMDLEGKQGNFKNLREFVFKNIDGYFKIYSKHTPINLVRDLPQGFSALEPLVDLPIGINITRFQTLLALHRSYLTPGDSSSGWTAGAAAYYVGYLQPRTFLLKYNENGTITDAVDCALDPLSETKCTLKSFTVEKGIYQTSNFRVQPTESIVRFPNITNLCPFGEVFNATRFASVYAWNRKRISNCVADYSVLYNSASFSTFKCYGVSPTKLNDLCFTNVYADSFVIRGDEVRQIAPGQTGKIADYNYKLPDDFTGCVIAWNSNNLDSKVGGNYNYLYRLFRKSNLKPFERDISTEIYQAGSTPCNGVEGFNCYFPLQSYGFQPTNGVGYQPYRVVVLSFELLHAPATVCGPKKSTNLVKNKCVNFNFNGLTGTGVLTESNKKFLPFQQFGRDIADTTDAVRDPQTLEILDITPCSFGGVSVITPGTNTSNQVAVLYQGVNCTEVPVAIHADQLTPTWRVYSTGSNVFQTRAGCLIGAEHVNNSYECDIPIGAGICASYQTQTNSPRRARSVASQSIIAYTMSLGAENSVAYSNNSIAIPTNFTISVTTEILPVSMTKTSVDCTMYICGDSTECSNLLLQYGSFCTQLNRALTGIAVEQDKNTQEVFAQVKQIYKTPPIKDFGGFNFSQILPDPSKPSKRSFIEDLLFNKVTLADAGFIKQYGDCLGDIAARDLICAQKFNGLTVLPPLLTDEMIAQYTSALLAGTITSGWTFGAGAALQIPFAMQMAYRFNGCGVTQNVLYENQKLIANQFNSAIGKIQDSLSSTASALGKLQDVVNQNAQALNTLVKQLSSNFGAISSVLNDILSRLDKVEAEVQIDRLITGRLQSLQTYVTQQLIRAAEIRASANLAATKMSECVLGQSKRVDFCGKGCHLMSFPQSAPHGVVFLHVTYVPAQEKNFTTAPAICHDGKAHFPREGVFVSNGTHWFVTQRNFYEPQIITTDNTFVSGNCDVVIGVVNNTVYDPLQPELDSFKEELDKYFKNHTSPDVDLGDISGINASVVNIQKEIDRLNEVAKNLNESLIDLQELGKYEQYIKGGGGSDIIKLLNEQVNKEMQSSNLYMSMSSWCYTHSLDGAGLFLFDHAAEEYEHAKKLIIFLNENNVPVQLTSISAPEHKFEGLTQIFQKAYEHEQHISESINNIVDHAIKSKDHATFNFLQWYVAEQHEEEVLFKDILDKIELIGNENHGLYLADQYVKGIAKSRKS

SEQ ID NO: 5261 - protein, 1379 aa, Artificial Sequence
  SARS-CoV-2/Netherlands/ZuidHolland_9/2020__EPI_ISL_414445 spike protein (1-1211)(I909C_Y1047C) Ferritin construct
MFVFLVLLPLVSSQCVNLTTRTQLPPAYTNSFTRGVYYPDKVFRSSVLHSTQDLFLPFFSNVTWFHAIHVSGTNGTKRFDNPVLPFNDGVYFASTEKSNIIRGWIFGTTLDSKTQSLLIVNNATNVVIKVCEFQFCNDPFLGVYYHKNNKSWMESEFRVYSSANNCTFEYVSQPFLMDLEGKQGNFKNLREFVFKNIDGYFKIYSKHTPINLVRDLPQGFSALEPLVDLPIGINITRFQTLLALHRSYLTPGDSSSGWTAGAAAYYVGYLQPRTFLLKYNENGTITDAVDCALDPLSETKCTLKSFTVEKGIYQTSNFRVQPTESIVRFPNITNLCPFGEVFNATRFASVYAWNRKRISNCVADYSVLYNSASFSTFKCYGVSPTKLNDLCFTNVYADSFVIRGDEVRQIAPGQTGKIADYNYKLPDDFTGCVIAWNSNNLDSKVGGNYNYLYRLFRKSNLKPFERDISTEIYQAGSTPCNGVEGFNCYFPLQSYGFQPTNGVGYQPYRVVVLSFELLHAPATVCGPKKSTNLVKNKCVNFNFNGLTGTGVLTESNKKFLPFQQFGRDIADTTDAVRDPQTLEILDITPCSFGGVSVITPGTNTSNQVAVLYQGVNCTEVPVAIHADQLTPTWRVYSTGSNVFQTRAGCLIGAEHVNNSYECDIPIGAGICASYQTQTNSPRRARSVASQSIIAYTMSLGAENSVAYSNNSIAIPTNFTISVTTEILPVSMTKTSVDCTMYICGDSTECSNLLLQYGSFCTQLNRALTGIAVEQDKNTQEVFAQVKQIYKTPPIKDFGGFNFSQILPDPSKPSKRSFIEDLLFNKVTLADAGFIKQYGDCLGDIAARDLICVQKFNGLTVLPPLLTDEMIAQYTSALLAGTITSGWTFGAGAALQIPFAMQMAYRFNGCGVTQNVLYENQKLIANQFNSAIGKIQDSLSSTASALGKLQDVVNQNAQALNTLVKQLSSNFGAISSVLNDILSRLDKVEAEVQIDRLITGRLQSLQTYVTQQLIRAAEIRASANLAATKMSECVLGQSKRVDFCGKGCHLMSFPQSAPHGVVFLHVTYVPAQEKNFTTAPAICHDGKAHFPREGVFVSNGTHWFVTQRNFYEPQIITTDNTFVSGNCDVVIGIVNNTVYDPLQPELDSFKEELDKYFKNHTSPDVDLGDISGINASVVNIQKEIDRLNEVAKNLNESLIDLQELGKYEQYIKGGGGSDIIKLLNEQVNKEMQSSNLYMSMSSWCYTHSLDGAGLFLFDHAAEEYEHAKKLIIFLNENNVPVQLTSISAPEHKFEGLTQIFQKAYEHEQHISESINNIVDHAIKSKDHATFNFLQWYVAEQHEEEVLFKDILDKIELIGNENHGLYLADQYVKGIAKSRKS

SEQ ID NO: 5262 - protein, 1379 aa, Artificial Sequence
  SARS-CoV-2/Finland/FIN03032020A/2020__EPI_ISL_413602 spike protein (1-1211)(I909C_Y1047C) Ferritin construct
MFVFLVLLPLVSSQCVNLTTRTQLPPAYTNSFTRGVYYPDKVFRSSVLHSTQDLFLPFFSNVTWFHAIHVSGTNGTKRFDNPVLPFNDGVYFASTEKSNIIRGWIFGTTLDSKTQSLLIVNNATNVVIKVCEFQFCNDPFLGVYYHKNNKSWMESEFRVYSSANNCTFEYVSQPFLMDLEGKQGNFKNLREFVFKNIDGYFKIYSKHTPINLVRDLPQGFSALEPLVDLPIGINITRFQTLLALHRSYLTPGDSSSGWTAGAAAYYVGYLQPRTFLLKYNENGTITDAVDCALDPLSETKCTLKSFTVEKGIYQTSNFRVQPTESIVRFPNITNLCPFGEVFNATRFASVYAWNRKRISNCVADYSVLYNSASFSTFKCYGVSPTKLNDLCFTNVYADSFVIRGDEVRQIAPGQTGKIADYNYKLPDDFTGCVISWNSNNLDSKVGGNYNYLYRLFRKSNLKPFERDISTEIYQAGSTPCNGVEGFNCYFPLQSYGFQPTNGVGYQPYRVVVLSFELLHAPATVCGPKKSTNLVKNKCVNFNFNGLTGTGVLTESNKKFLPFQQFGRDIADTTDAVRDPQTLEILDITPCSFGGVSVITPGTNTSNQVAVLYQGVNCTEVPVAIHADQLTPTWRVYSTGSNVFQTRAGCLIGAEHVNNSYECDIPIGAGICASYQTQTNSPRRARSVASQSIIAYTMSLGAENSVAYSNNSIAIPTNFTISVTTEILPVSMTKTSVDCTMYICGDSTECSNLLLQYGSFCTQLNRALTGIAVEQDKNTQEVFAQVKQIYKTPPIKDFGGFNFSQILPDPSKPSKRSFIEDLLFNKVTLADAGFIKQYGDCLGDIAARDLICAQKFNGLTVLPPLLTDEMIAQYTSALLAGTITSGWTFGAGAALQIPFAMQMAYRFNGCGVTQNVLYENQKLIANQFNSAIGKIQDSLSSTASALGKLQDVVNQNAQALNTLVKQLSSNFGAISSVLNDILSRLDKVEAEVQIDRLITGRLQSLQTYVTQQLIRAAEIRASANLAATKMSECVLGQSKRVDFCGKGCHLMSFPQSAPHGVVFLHVTYVPAQEKNFTTAPAICHDGKAHFPREGVFVSNGTHWFVTQRNFYEPQIITTDNTFVSGNCDVVIGIVNNTVYDPLQPELDSFKEELDKYFKNHTSPDVDLGDISGINASVVNIQKEIDRLNEVAKNLNESLIDLQELGKYEQYIKGGGGSDIIKLLNEQVNKEMQSSNLYMSMSSWCYTHSLDGAGLFLFDHAAEEYEHAKKLIIFLNENNVPVQLTSISAPEHKFEGLTQIFQKAYEHEQHISESINNIVDHAIKSKDHATFNFLQWYVAEQHEEEVLFKDILDKIELIGNENHGLYLADQYVKGIAKSRKS

SEQ ID NO: 5263 - protein, 1379 aa, Artificial Sequence
  SARS-CoV-2/France/GE1977/2020__EPI_ISL_414632 spike protein (1-1211)(I909C_Y1047C) Ferritin construct
MFVFLVLLPLVSSQCVNLTTRTQLPPAYTNSFTRGVYYPDKVFRSSVLHSTQDLFLPFFSNVTWFHAIHVSGTNGTKRFDNPVLPFNDGVYFASTEKSNIIRGWIFGTTLDSKTQSLLIVNNATNVVIKVCEFQFCNDPFLGVYYHKNNKSWMESEFRVYSSANNCTFEYVSQPFLMDLEGKQGNFKNLREFVFKNIDGYFKIYSKHTPINLVRDLPQGFSALEPLVDLPIGINITRFQTLLALHRSYLTPGDSSSGWTAGAAAYYVGYLQPRTFLLKYNENGTITDAVDCALDPLSETKCTLKSFTVEKGIYQTSNFRVQPTESIVRFPNITNLCPFGEVFNATRFASVYAWNRKRISNCVADYSVLYNSASFSTFKCYGVSPTKLNDLCFTNVYADSFVIRGDEVRQIAPGQTGKIADYNYKLPDDFTGCVIAWNSNNLDSKVGGNYNYLYRLFRKSNLKPFERDISTEIYQAGSTPCNGVEGFNCYFPLQSYGFQPTNGVGYQPYRVVVLSFELLHAPATVCGPKKSTNLVKNKCVNFNFNGLTGTGVLTESNKKFLPFQQFGRDIADTTDAVRDPQTLEILDITPCSFGGVSVITPGTNTSNQVAVLYQGVNCTEVPVAIHADQLTPTWRVYSTGSNVFQTRAGCLIGAEHVNNSYECDIPIGAGICASYQTQTNSPRRARSVASQSIIAYTMSLGAENSVAYSNNSIAIPTNFTISVTTEILPVSMTKTSVDCTMYICGDSTECSNLLLQYGSFCTQLNRALTGIAVEQDKNTQEVFAQVKQIYKTPPIKDFGGFNFSQILPDPSKPSKRSFIEDLLFNKVTLADAGFIKQYGDCLGDIAARDLICAQKFNGLTVLPPLLTDEMIAQYTSALLAGTITSGWTFGAGAALQIPFAMQMAYRFNGCGVTQNVLYENQKLIANQFNSAIGKIQDSLFSTASALGKLQDVVNQNAQALNTLVKQLSSNFGAISSVLNDILSRLDKVEAEVQIDRLITGRLQSLQTYVTQQLIRAAEIRASANLAATKMSECVLGQSKRVDFCGKGCHLMSFPQSAPHGVVFLHVTYVPAQEKNFTTAPAICHDGKAHFPREGVFVSNGTHWFVTQRNFYEPQIITTDNTFVSGNCDVVIGIVNNTVYDPLQPELDSFKEELDKYFKNHTSPDVDLGDISGINASVVNIQKEIDRLNEVAKNLNESLIDLQELGKYEQYIKGGGGSDIIKLLNEQVNKEMQSSNLYMSMSSWCYTHSLDGAGLFLFDHAAEEYEHAKKLIIFLNENNVPVQLTSISAPEHKFEGLTQIFQKAYEHEQHISESINNIVDHAIKSKDHATFNFLQWYVAEQHEEEVLFKDILDKIELIGNENHGLYLADQYVKGIAKSRKS

SEQ ID NO: 5264 - protein, 1379 aa, Artificial Sequence
  SARS-CoV-2/Finland/FIN-313/2020__EPI_ISL_414641 spike protein (1-1211)(I909C_Y1047C) Ferritin construct
MFVFLVLLPLVSSQCVNLTTRTQLPPAYTNSFTRGVYYPDKVFRSSVLHSTQDLFLPFFSNVTWFHAIHVSGTNGTKRFDNPVLPFNDGVYFASTEKSNIIRGWIFGTTLDSKTQSLLIVNNATNVVIKVCEFQFCNDPFLGVYYHKNNKSWMESEFRVYSSANNCTFEYVSQPFLMDLEGKQGNFKNLREFVFKNIDGYFKIYSKHTPINLVRDLPQGFSALEPLVDLPIGINITRFKTLLALHRSYLTPGDSSSGWTAGAAAYYVGYLQPRTFLLKYNENGTITDAVDCALDPLSETKCTLKSFTVEKGIYQTSNFRVQPTESIVRFPNITNLCPFGEVFNATRFASVYAWNRKRISNCVADYSVLYNSASFSTFKCYGVSPTKLNDLCFTNVYADSFVIRGDEVRQIAPGQTGKIADYNYKLPDDFTGCVIAWNSNNLDSKVGGNYNYLYRLFRKSNLKPFERDISTEIYQAGSTPCNGVEGFNCYFPLQSYGFQPTNGVGYQPYRVVVLSFELLHAPATVCGPKKSTNLVKNKCVNFNFNGLTGTGVLTESNKKFLPFQQFGRDIADTTDAVRDPQTLEILDITPCSFGGVSVITPGTNTSNQVAVLYQGVNCTEVPVAIHADQLTPTWRVYSTGSNVFQTRAGCLIGAEHVNNSYECDIPIGAGICASYQTQTNSPRRARSVASQSIIAYTMSLGAENSVAYSNNSIAIPTNFTISVTTEILPVSMTKTSVDCTMYICGDSTECSNLLLQYGSFCTQLNRALTGIAVEQDKNTQEVFAQVKQIYKTPPIKDFGGFNFSQILPDPSKPSKRSFIEDLLFNKVTLADAGFIKQYGDCLGDIAARDLICAQKFNGLTVLPPLLTDEMIAQYTSALLAGTITSGWTFGAGAALQIPFAMQMAYRFNGCGVTQNVLYENQKLIANQFNSAIGKIQDSLSSTASALGKLQDVVNQNAQALNTLVKQLSSNFGAISSVLNDILSRLDKVEAEVQIDRLITGRLQSLQTYVTQQLIRAAEIRASANLAATKMSECVLGQSKRVDFCGKGCHLMSFPQSAPHGVVFLHVTYVPAQEKNFTTAPAICHDGKAHFPREGVFVSNGTHWFVTQRNFYEPQIITTDNTFVSGNCDVVIGIVNNTVYDPLQPELDSFKEELDKYFKNHTSPDVDLGDISGINASVVNIQKEIDRLNEVAKNLNESLIDLQELGKYEQYIKGGGGSDIIKLLNEQVNKEMQSSNLYMSMSSWCYTHSLDGAGLFLFDHAAEEYEHAKKLIIFLNENNVPVQLTSISAPEHKFEGLTQIFQKAYEHEQHISESINNIVDHAIKSKDHATFNFLQWYVAEQHEEEVLFKDILDKIELIGNENHGLYLADQYVKGIAKSRKS

SEQ ID NO: 5265 - protein, 1379 aa, Artificial Sequence
  SARS-CoV-2/Netherlands/ZuidHolland_2/2020__EPI_ISL_414556 spike protein (1-1211)(I909C_Y1047C) Ferritin construct
MFVFLVLLPLVSSQCVNLTTRTQLPPAYTNSFTRGVYYPDKVFRSSVLHSTQDLFLPFFSNVTWFHAIHVSGTNGTKRFDNPVLPFNDGVYFASTEKSNIIRGWIFGTTLDSKTQSLLIVNNATNVVIKVCEFQFCNDPFLGVYYHKNNKSWMESEFRVYSSANNCTFEYVSQPFLMDLEGKQGNFKNLREFVFKNIDGYFKIYSKHTPINLVRDLPQGFSALEPLVDLPIGINITRFQTLLALHRSYLTPGDSSSGWTAGAAAYYVGYLQPRTFLLKYNENGTITDAVDCALDPLSETKCTLKSFTVEKGIYQTSNFRVQPTESIVRFPNITNLCPFGEVFNATRFASVYAWNRKRISNCVADYSVLYNSASFSTFKCYGVSPTKLNDLCFTNVYADSFVIRGDEVRQIAPGQTGKIADYNYKLPDDFTGCVIAWNSNNLDSKVGGNYNYLYRLFRKSNLKPFERDISTEIYQAGSTPCNGVEGFNCYFPLQSYGFQPTNGVGYQPYRVVVLSFELLHAPATVCGPKKSTNLVKNKCVNFNFNGLTGTGVLTESNKKFLPFQQFGRDIADTTDAVRDPQTLEILDITPCSFGGVSVITPGTNTSNQVAVLYQGVNCTEVPVAIHADQLTPTWRVYSTGSNVFQTRAGCLIGAEHVNNSYECDIPIGAGICASYQTQTNSPRRARSVASQSIIAYTMSLGAENSVAYSNNSIAIPTNFTISVTTEILPVSMTKTSVDCTMYICGDSTECSNLLLQYGSFCTQLNRALTGIALEQDKNTQEVFAQVKQIYKTPPIKDFGGFNFSQILPDPSKPSKRSFIEDLLFNKVTLADAGFIKQYGDCLGDIAARDLICAQKFNGLTVLPPLLTDEMIAQYTSALLAGTITSGWTFGAGAALQIPFAMQMAYRFNGCGVTQNVLYENQKLIANQFNSAIGKIQDSLSSTASALGKLQDVVNQNAQALNTLVKQLSSNFGAISSVLNDILSRLDKVEAEVQIDRLITGRLQSLQTYVTQQLIRAAEIRASANLAATKMSECVLGQSKRVDFCGKGCHLMSFPQSAPHGVVFLHVTYVPAQEKNFTTAPAICHDGKAHFPREGVFVSNGTHWFVTQRNFYEPQIITTDNTFVSGNCDVVIGIVNNTVYDPLQPELDSFKEELDKYFKNHTSPDVDLGDISGINASVVNIQKEIDRLNEVAKNLNESLIDLQELGKYEQYIKGGGGSDIIKLLNEQVNKEMQSSNLYMSMSSWCYTHSLDGAGLFLFDHAAEEYEHAKKLIIFLNENNVPVQLTSISAPEHKFEGLTQIFQKAYEHEQHISESINNIVDHAIKSKDHATFNFLQWYVAEQHEEEVLFKDILDKIELIGNENHGLYLADQYVKGIAKSRKS

SEQ ID NO: 5266 - protein, 1379 aa, Artificial Sequence
  SARS-CoV-2/USA/WA-UW31/2020__EPI_ISL_414618 spike protein (1-1211)(I909C_Y1047C) Ferritin construct
MFVFLVLLPLVSSQCVNLTTRTQLPPAYTNSFTRGVYYPDKVFRSSVLHSTQDLFLPFFSNVTWFHAIHVSGTNGTKRFDNPVLPFNDGVYFASTEKSNIIRGWIFGTTLDSKTQSLLIVNNATNVVIKVCEFQFCNDPFLGVYYHKNNKSWMESEFRVYSSANNCTFEYVSQPFLMDLEGKQGNFKNLREFVFKNIDGYFKIYSKHTPINLVRDLPQGFSALEPLVDLPIGINITRFQTLLALHRSYLTPGDSSSGWTAGAAAYYVGYLQPRTFLLKYNENGTITDAVDCALDPLSETKCTLKSFTVEKGIYQTSNFRVQPTESIVRFPNITNLCPFGEVFNATRFASVYAWNRKRISNCVADYSVLYNSASFSTFKCYGVSPTKLNDLCFTNVYADSFVIRGDEVRQIAPGQTGKIADYNYKLPDDFTGCVIAWNSNNLDSKVGGNYNYLYRLFRKSNLKPFERDISTEIYQAGSTPCNGAEGFNCYFPLQSYGFQPTNGVGYQPYRVVVLSFELLHAPATVCGPKKSTNLVKNKCVNFNFNGLTGTGVLTESNKKFLPFQQFGRDIADTTDAVRDPQTLEILDITPCSFGGVSVITPGTNTSNQVAVLYQDVNCTEVPVAIHADQLTPTWRVYSTGSNVFQTRAGCLIGAEHVNNSYECDIPIGAGICASYQTQTNSPRRARSVASQSIIAYTMSLGAENSVAYSNNSIAIPTNFTISVTTEILPVSMTKTSVDCTMYICGDSTECSNLLLQYGSFCTQLNRALTGIAVEQDKNTQEVFAQVKQIYKTPPIKDFGGFNFSQILPDPSKPSKRSFIEDLLFNKVTLADAGFIKQYGDCLGDIAARDLICAQKFNGLTVLPPLLTDEMIAQYTSALLAGTITSGWTFGAGAALQIPFAMQMAYRFNGCGVTQNVLYENQKLIANQFNSAIGKIQDSLSSTASALGKLQDVVNQNAQALNTLVKQLSSNFGAISSVLNDILSRLDKVEAEVQIDRLITGRLQSLQTYVTQQLIRAAEIRASANLAATKMSECVLGQSKRVDFCGKGCHLMSFPQSAPHGVVFLHVTYVPAQEKNFTTAPAICHDGKAHFPREGVFVSNGTHWFVTQRNFYEPQIITTDNTFVSGNCDVVIGIVNNTVYDPLQPELDSFKEELDKYFKNHTSPDVDLGDISGINASVVNIQKEIDRLNEVAKNLNESLIDLQELGKYEQYIKGGGGSDIIKLLNEQVNKEMQSSNLYMSMSSWCYTHSLDGAGLFLFDHAAEEYEHAKKLIIFLNENNVPVQLTSISAPEHKFEGLTQIFQKAYEHEQHISESINNIVDHAIKSKDHATFNFLQWYVAEQHEEEVLFKDILDKIELIGNENHGLYLADQYVKGIAKSRKS

SEQ ID NO: 5267 - protein, 1379 aa, Artificial Sequence
  SARS-CoV-2/South Korea/SNU01/2020__EPI_ISL_411929 spike protein (1-1211)(I909C_Y1047C) Ferritin construct
MFVFLVLLPLVSSQCVNLTTRTQLPPAYTNSFTRGVYYPDKVFRSSVLHSTQDLFLPFFSNVTWFHAIHVSGTNGTKRFDNPVLPFNDGVYFASTEKSNIIRGWIFGTTLDSKTQSLLIVNNATNVVIKVCEFQFCNDPFLGVYYHKNNKSWMESEFRVYSSANNCTFEYVSQPFLMDLEGKQGNFKNLREFVFKNIDGYFKIYSKHTPINLVRDLPQGFWALEPLVDLPIGINITRFQTLLALHRSYLTPGDSSSGWTAGAAAYYVGYLQPRTFLLKYNENGTITDAVDCALDPLSETKCTLKSFTVEKGIYQTSNFRVQPTESIVRFPNITNLCPFGEVFNATRFASVYAWNRKRISNCVADYSVLYNSASFSTFKCYGVSPTKLNDLCFTNVYADSFVIRGDEVRQIAPGQTGKIADYNYKLPDDFTGCVIAWNSNNLDSKVGGNYNYLYRLFRKSNLKPFERDISTEIYQAGSTPCNGVEGFNCYFPLQSYGFQPTNGVGYQPYRVVVLSFELLHAPATVCGPKKSTNLVKNKCVNFNFNGLTGTGVLTESNKKFLPFQQFGRDIADTTDAVRDPQTLEILDITPCSFGGVSVITPGTNTSNQVAVLYQDVNCTEVPVAIHADQLTPTWRVYSTGSNVFQTRAGCLIGAEHVNNSYECDIPIGAGICASYQTQTNSPRRARSVASQSIIAYTMSLGAENSVAYSNNSIAIPTNFTISVTTEILPVSMTKTSVDCTMYICGDSTECSNLLLQYGSFCTQLNRALTGIAVEQDKNTQEVFAQVKQIYKTPPIKDFGGFNFSQILPDPSKPSKRSFIEDLLFNKVTLADAGFIKQYGDCLGDIAARDLICAQKFNGLTVLPPLLTDEMIAQYTSALLAGTITSGWTFGAGAALQIPFAMQMAYRFNGCGVTQNVLYENQKLIANQFNSAIGKIQDSLSSTASALGKLQDVVNQNAQALNTLVKQLSSNFGAISSVLNDILSRLDKVEAEVQIDRLITGRLQSLQTYVTQQLIRAAEIRASANLAATKMSECVLGQSKRVDFCGKGCHLMSFPQSAPHGVVFLHVTYVPAQEKNFTTAPAICHDGKAHFPREGVFVSNGTHWFVTQRNFYEPQIITTDNTFVSGNCDVVIGIVNNTVYDPLQPELDSFKEELDKYFKNHTSPDVDLGDISGINASVVNIQKEIDRLNEVAKNLNESLIDLQELGKYEQYIKGGGGSDIIKLLNEQVNKEMQSSNLYMSMSSWCYTHSLDGAGLFLFDHAAEEYEHAKKLIIFLNENNVPVQLTSISAPEHKFEGLTQIFQKAYEHEQHISESINNIVDHAIKSKDHATFNFLQWYVAEQHEEEVLFKDILDKIELIGNENHGLYLADQYVKGIAKSRKS

SEQ ID NO: 5268 - protein, 1379 aa, Artificial Sequence
  SARS-CoV-2/China/WF0004/2020__EPI_ISL_413694 spike protein (1-1211)(I909C_Y1047C) Ferritin construct
MFVFLVLLPLVSSQCVNLTTRTQLPPAYTNSFTRGVYYPDKVFRSSVLHSTQDLFLPFFSNVTWFHAIHVSGTNGTKRFDNPVLPFNDGVYFASTEKSNIIRGWIFGTTLDSKTQSLLIVNNATNVVIKVCEFQFCNDPFLGVYYHKNNKSWTESEFRVYSSANNCTFEYVSQPFLMDLEGKQGNFKNLREFVFKNIDGYFKIYSKHTPINLVRDLPQGFSALEPLVDLPIGINITRFQTLLALHRSYLTPGDSSSGWTAGAAAYYVGYLQPRTFLLKYNENGTITDAVDCALDPLSETKCTLKSFTVEKGIYQTSNFRVQPTESIVRFPNITNLCPFGEVFNATRFASVYAWNRKRISNCVADYSVLYNSASFSTFKCYGVSPTKLNDLCFTNVYADSFVIRGDEVRQIAPGQTGKIADYNYKLPDDFTGCVIAWNSNNLDSKVGGNYNYLYRLFRKSNLKPFERDISTEIYQAGSTPCNGVEGFNCYFPLQSYGFQPTNGVGYQPYRVVVLSFELLHAPATVCGPKKSTNLVKNKCVNFNFNGLTGTGVLTESNKKFLPFQQFGRDIADTTDAVRDPQTLEILDITPCSFGGVSVITPGTNTSNQVAVLYQDVNCTEVPVAIHADQLTPTWRVYSTGSNVFQTRAGCLIGAEHVNNSYECDIPIGAGICASYQTQTNSPRRARSVASQSIIAYTMSLGAENSVAYSNNSIAIPTNFTISVTTEILPVSMTKTSVDCTMYICGDSTECSNLLLQYGSFCTQLNRALTGIAVEQDKNTQEVFAQVKQIYKTPPIKDFGGFNFSQILPDPSKPSKRSFIEDLLFNKVTLADAGFIKQYGDCLGDIAARDLICAQKFNGLTVLPPLLTDEMIAQYTSALLAGTITSGWTFGAGAALQIPFAMQMAYRFNGCGVTQNVLYENQKLIANQFNSAIGKIQDSLSSTASALGKLQDVVNQNAQALNTLVKQLSSNFGAISSVLNDILSRLDKVEAEVQIDRLITGRLQSLQTYVTQQLIRAAEIRASANLAATKMSECVLGQSKRFDFCGKGCHLMSFPQSAPHGVVFLHVTYVPAQEKNFTTAPAICHDGKAHFPREGVFVSNGTHWFVTQRNFYEPQIITTDNTFVSGNCDVVIGIVNNTVYDPLQPELDSFKEELDKYFKNHTSPDVDLGDISGINASVVNIQKEIDRLNEVAKNLNESLIDLQELGKYEQYIKGGGGSDIIKLLNEQVNKEMQSSNLYMSMSSWCYTHSLDGAGLFLFDHAAEEYEHAKKLIIFLNENNVPVQLTSISAPEHKFEGLTQIFQKAYEHEQHISESINNIVDHAIKSKDHATFNFLQWYVAEQHEEEVLFKDILDKIELIGNENHGLYLADQYVKGIAKSRKS

SEQ ID NO: 5269 - protein, 1379 aa, Artificial Sequence
  SARS-CoV-2/China/WF0028/2020__EPI_ISL_413791 spike protein (1-1211)(I909C_Y1047C) Ferritin construct
MFVFLVLLPLVSSQCVNLTTRTQLPPAYTNSFTRGVYYPDKVFRSSVLHSTQDLFLPFFSNVTWFHAIHVSGTNGTKRFDNPVLPFNDGVYFASTEKSNIIRGWIFGTTLDSKTQSLLIVNNATNVVIKVCEFQFCNDPFLGVYYHKNNKSWMESEFRVYSSANNCTFEYVSQPFLMDLEGKQGNFKNLREFVFKNIDGYFKIYSKHTPINLVRDLPQGFSALEPLVDLPIGINITRFQTLLALHRSYLTPGDSSSGWTAGAAAYYVGYLQPRTFLLKYNENGTITDAVDCALDPLSETKCTLKSFTVEKGIYQTSNFRVQPTESIVRFPNITNLCPFGEVFNATRFASVYAWNRKRISNCVADYSVLYNSASFSTFKCYGVSPTKLNDLCFTNVYADSFVIRGDEVRQIAPGQTGKIADYNYKLPDDFTGCVIAWNSNNLDSKVGGNYNYLYRLFRKSNLKPFERDISTEIYQAGSTPCNGVEGFNCYFPLQSYGFQPTNGVGYQPYRVVVLSFELLHAPATVCGPKKSTNLVKNKCVNFNFNGLTGTGVLTESNKKFLPFQQFGRDIADTTDAVRDPQTLEILDITPCSFGGVSVITPGTNTSNQVAVLYQDVNCTEVPVAIHADQLTPTWRVYSTGSNVFQTRAGCLIGAEHVNNSYECDIPIGAGICASYQTQTNSPRRARSVASQSIIAYTMSLGAENSVAYSNNSIAIPTNFTISVTTEILPVSMTKTSVDCTMYICGDSTECSNLLLQYGSFCTQLNRALTGIAVEQDKNTQEVFAQVKQIYKTPPIKDFGGFNFSQILPDPSKPSKRSFIEDLLFNKVTLADAGFIKQYGDCLGDIAARDLICAQKFNGLTVLPPLLTDEMIAQYTSALLAGTITSGWTFGAGAALQIPFAMQMAYRFNGCGVTQNVLYENQKLIANQFNSAIGKIQDSLSSTASALGKLQDVVNQNAQALNTLVKQLSSNFGAISSVLNDILSRLDKVEAEVQIDRLITGRLQSLQTYVTQQLIRAAEIRASANLAATKMSECVLGQSKRVDFCGKGCHLMSFPQSAPHGVVFLHVTYVPAQEKNFTTAPAICHDGKAHFPREGVFVSNGTHWFVTQRNFYEPQIITTDNTFVSGNCDVVIGIVNNTVYDPLQPELESFKEELDKYFKNHTSPDVDLGDISGINASVVNIQKEIDRLNEVAKNLNESLIDLQELGKYEQYIKGGGGSDIIKLLNEQVNKEMQSSNLYMSMSSWCYTHSLDGAGLFLFDHAAEEYEHAKKLIIFLNENNVPVQLTSISAPEHKFEGLTQIFQKAYEHEQHISESINNIVDHAIKSKDHATFNFLQWYVAEQHEEEVLFKDILDKIELIGNENHGLYLADQYVKGIAKSRKS

SEQ ID NO: 5270 - protein, 1379 aa, Artificial Sequence
  SARS-CoV-2/2019-nCoV/USA-CruiseA-18/2020__MT159716.1 spike protein (1-1211)(I909C_Y1047C) Ferritin construct
MFVFLVLLPLVSSQCVNLTTRTQLPPAYTNSFTRGVYYPDKVFRSSVLHSTQDLFLPFFSNVTWFHAIHVSGTNGTKRFDNPVLPFNDGVYFASTEKSNIIRGWIFGTTLDSKTQSLLIVNNATNVVIKVCEFQFCNDPFLGVYYHKNNKSWMESELRVYSSANNCTFEYVSQPFLMDLEGKQGNFKNLREFVFKNIDGYFKIYSKHTPINLVRDLPQGFSALEPLVDLPIGINITRFQTLLALHRSYLTPGDSSSGWTAGAAAYYVGYLQPRTFLLKYNENGTITDAVDCALDPLSETKCTLKSFTVEKGIYQTSNFRVQPTESIVRFPNITNLCPFGEVFNATRFASVYAWNRKRISNCVADYSVLYNSASFSTFKCYGVSPTKLNDLCFTNVYADSFVIRGDEVRQIAPGQTGKIADYNYKLPDDFTGCVIAWNSNNLDSKVGGNYNYLYRLFRKSNLKPFERDISTEIYQAGSTPCNGVEGFNCYFPLQSYGFQPTNGVGYQPYRVVVLSFELLHAPATVCGPKKSTNLVKNKCVNFNFNGLTGTGVLTESNKKFLPFQQFGRDIADTTDAVRDPQTLEILDITPCSFGGVSVITPGTNTSNQVAVLYQDVNCTEVPVAIHADQLTPTWRVYSTGSNVFQTRAGCLIGAEHVNNSYECDIPIGAGICASYQTQTNSPRRARSVASQSIIAYTMSLGAENSVAYSNNSIAIPTNFTISVTTEILPVSMTKTSVDCTMYICGDSTECSNLLLQYGSFCTQLNRALTGIAVEQDKNTQEVFAQVKQIYKTPPIKDFGGFNFSQILPDPSKPSKRSFIEDLLFNKVTLADAGFIKQYGDCLGDIAARDLICAQKFNGLTVLPPLLTDEMIAQYTSALLAGTITSGWTFGAGAALQIPFAMQMAYRFNGCGVTQNVLYENQKLIANQFNSAIGKIQDSLSSTASALGKLQDVVNQNAQALNTLVKQLSSNFGAISSVLNDILSRLDKVEAEVQIDRLITGRLQSLQTYVTQQLIRAAEIRASANLAATKMSECVLGQSKRVDFCGKGCHLMSFPQSAPHGVVFLHVTYVPAQEKNFTTAPAICHDGKAHFPREGVFVSNGTHWFVTQRNFYEPQIITTDNTFVSGNCDVVIGIVNNTVYDPLQPELDSFKEELDKYFKNHTSPDVDLGDISGINASVVNIQKEIDRLNEVAKNLNESLIDLQELGKYEQYIKGGGGSDIIKLLNEQVNKEMQSSNLYMSMSSWCYTHSLDGAGLFLFDHAAEEYEHAKKLIIFLNENNVPVQLTSISAPEHKFEGLTQIFQKAYEHEQHISESINNIVDHAIKSKDHATFNFLQWYVAEQHEEEVLFKDILDKIELIGNENHGLYLADQYVKGIAKSRKS

SEQ ID NO: 5271 - protein, 1379 aa, Artificial Sequence
  SARS-CoV-2/SARS-CoV-2/Yunnan-01/human/2020/CHN__MT049951.1 spike protein (1-1211)(I909C_Y1047C) Ferritin construct
MFVFLVLLPLVSSQCVNLTTRTQLPPANTNSFTRGVYYPDKVFRSSVLHSTQDLFLPFFSNVTWFHAIHVSGTNGTKRFDNPVLPFNDGVYFASTEKSNIIRGWIFGTTLDSKTQSLLIVNNATNVVIKVCEFQFCNDPFLGVYYHKNNKSWMESEFRVYSSANNCTFEYVSQPFLMDLEGKQGNFKNLREFVFKNIDGYFKIYSKHTPINLVRDLPQGFSALEPLVDLPIGINITRFQTLLALHRSYLTPGDSSSGWTAGAAAYYVGYLQPRTFLLKYNENGTITDAVDCALDPLSETKCTLKSFTVEKGIYQTSNFRVQPTESIVRFPNITNLCPFGEVFNATRFASVYAWNRKRISNCVADYSVLYNSASFSTFKCYGVSPTKLNDLCFTNVYADSFVIRGDEVRQIAPGQTGKIADYNYKLPDDFTGCVIAWNSNNLDSKVGGNYNYLYRLFRKSNLKPFERDISTEIYQAGSTPCNGVEGFNCYFPLQSYGFQPTNGVGYQPYRVVVLSFELLHAPATVCGPKKSTNLVKNKCVNFNFNGLTGTGVLTESNKKFLPFQQFGRDIADTTDAVRDPQTLEILDITPCSFGGVSVITPGTNTSNQVAVLYQDVNCTEVPVAIHADQLTPTWRVYSTGSNVFQTRAGCLIGAEHVNNSYECDIPIGAGICASYQTQTNSPRRARSVASQSIIAYTMSLGAENSVAYSNNSIAIPTNFTISVTTEILPVSMTKTSVDCTMYICGDSTECSNLLLQYGSFCTQLNRALTGIAVEQDKNTQEVFAQVKQIYKTPPIKDFGGFNFSQILPDPSKPSKRSFIEDLLFNKVTLADAGFIKQYGDCLGDIAARDLICAQKFNGLTVLPPLLTDEMIAQYTSALLAGTITSGWTFGAGAALQIPFAMQMAYRFNGCGVTQNVLYENQKLIANQFNSAIGKIQDSLSSTASALGKLQDVVNQNAQALNTLVKQLSSNFGAISSVLNDILSRLDKVEAEVQIDRLITGRLQSLQTYVTQQLIRAAEIRASANLAATKMSECVLGQSKRVDFCGKGCHLMSFPQSAPHGVVFLHVTYVPAQEKNFTTAPAICHDGKAHFPREGVFVSNGTHWFVTQRNFYEPQIITTDNTFVSGNCDVVIGIVNNTVYDPLQPELDSFKEELDKYFKNHTSPDVDLGDISGINASVVNIQKEIDRLNEVAKNLNESLIDLQELGKYEQYIKGGGGSDIIKLLNEQVNKEMQSSNLYMSMSSWCYTHSLDGAGLFLFDHAAEEYEHAKKLIIFLNENNVPVQLTSISAPEHKFEGLTQIFQKAYEHEQHISESINNIVDHAIKSKDHATFNFLQWYVAEQHEEEVLFKDILDKIELIGNENHGLYLADQYVKGIAKSRKS

SEQ ID NO: 5272 - protein, 1379 aa, Artificial Sequence
  SARS-CoV-2/USA/WA-UW292/2020__EPI_ISL_418077 spike protein (1-1211)(I909C_Y1047C) Ferritin construct
MFVFLVLLPLVSSQCVNLTTRTQLPPAYTNSFTRGVYYPDKVFRSSVLHSTQDLFLPFFSNVTWFHAIHVSGTNGTKRFDNPVLPFNDGVYFASTEKSNIIRGWIFGTTLDSKTQSLLIVNNATNVVIKVCEFQFCNDPFLGVYYHKNNKSWMESEFRVYSSANNCTFEYVSQPFLMDLEGKQGNFKNLREFVFKNIDGYFKIYSKHTPINLVRDLPQGFSALEPLVDLPIGINITRFQTLLALHRSYLTPGDSSSGWTAGAAAYYVGYLQPRTFLLKYNENGTITDAVDCALDPLSETKCTLKSFTVEKGIYQTSNFRVQPTESIVRFPNITNLCPFGEVFNATRFASVYAWNRKRISNCVADYSVLYNSASFSTFKCYGVSPTKLNDLCFTNVYADSFVIRGDEVRQIAPGQTGKIADYNYKLPDDFTGCVIAWNSNNLDSKVGGNYNYLYRLFRKSNLKPFERDISTEIYQASSTPCNGVEGFNCYFPLQSYGFQPTNGVGYQPYRVVVLSFELLHAPATVCGPKKSTNLVKNKCVNFNFNGLTGTGVLTESNKKFLPFQQFGRDIADTTDAVRDPQTLEILDITPCSFGGVSVITPGTNTSNQVAVLYQDVNCTEVPVAIHADQLTPTWRVYSTGSNVFQTRAGCLIGAEHVNNSYECDIPIGAGICASYQTQTNSPRRARSVASQSIIAYTMSLGAENSVAYSNNSIAIPTNFTISVTTEILPVSMTKTSVDCTMYICGDSTECSNLLLQYGSFCTQLNRALTGIAVEQDKNTQEVFAQVKQIYKTPPIKDFGGFNFSQILPDPSKPSKRSFIEDLLFNKVTLADAGFIKQYGDCLGDIAARDLICAQKFNGLTVLPPLLTDEMIAQYTSALLAGTITSGWTFGAGAALQIPFAMQMAYRFNGCGVTQNVLYENQKLIANQFNSAIGKIQDSLSSTASALGKLQDVVNQNAQALNTLVKQLSSNFGAISSVLNDILSRLDKVEAEVQIDRLITGRLQSLQTYVTQQLIRAAEIRASANLAATKMSECVLGQSKRVDFCGKGCHLMSFPQSAPHGVVFLHVTYVPAQEKNFTTAPAICHDGKAHFPREGVFVSNGTHWFVTQRNFYEPQIITTDNTFVSGNCDVVIGIVNNTVYDPLQPELDSFKEELDKYFKNHTSPDVDLGDISGINASVVNIQKEIDRLNEVAKNLNESLIDLQELGKYEQYIKGGGGSDIIKLLNEQVNKEMQSSNLYMSMSSWCYTHSLDGAGLFLFDHAAEEYEHAKKLIIFLNENNVPVQLTSISAPEHKFEGLTQIFQKAYEHEQHISESINNIVDHAIKSKDHATFNFLQWYVAEQHEEEVLFKDILDKIELIGNENHGLYLADQYVKGIAKSRKS

SEQ ID NO: 5273 - protein, 1379 aa, Artificial Sequence
  SARS-CoV-2/Iceland/192/2020__EPI_ISL_417819 spike protein (1-1211)(I909C_Y1047C) Ferritin construct
MFVFFVLLPLVSSQCVNLTTRTQLPPAYTNSFTRGVYYPDKVFRSSVLHSTQDLFLPFFSNVTWFHAIHVSGTNGTKRFDNPVLPFNDGVYFASTEKSNIIRGWIFGTTLDSKTQSLLIVNNATNVVIKVCEFQFCNDPFLGVYYHKNNKSWMESEFRVYSSANNCTFEYVSQPFLMDLEGKQGNFKNLREFVFKNIDGYFKIYSKHTPINLVRDLPQGFSALEPLVDLPIGINITRFQTLLALHRSYLTPGDSSSGWTAGAAAYYVGYLQPRTFLLKYNENGTITDAVDCALDPLSETKCTLKSFTVEKGIYQTSNFRVQPTESIVRFPNITNLCPFGEVFNATRFASVYAWNRKRISNCVADYSVLYNSASFSTFKCYGVSPTKLNDLCFTNVYADSFVIRGDEVRQIAPGQTGKIADYNYKLPDDFTGCVIAWNSNNLDSKVGGNYNYLYRLFRKSNLKPFERDISTEIYQAGSTPCNGVEGFNCYFPLQSYGFQPTNGVGYQPYRVVVLSFELLHAPATVCGPKKSTNLVKNKCVNFNFNGLTGTGVLTESNKKFLPFQQFGRDIADTTDAVRDPQTLEILDITPCSFGGVSVITPGTNTSNQVAVLYQGVNCTEVPVAIHADQLTPTWRVYSTGSNVFQTRAGCLIGAEHVNNSYECDIPIGAGICASYQTQTNSPRRARSVASQSIIAYTMSLGAENSVAYSNNSIAIPTNFTISVTTEILPVSMTKTSVDCTMYICGDSTECSNLLLQYGSFCTQLNRALTGIAVEQDKNTQEVFAQVKQIYKTPPIKDFGGFNFSQILPDPSKPSKRSFIEDLLFNKVTLADAGFIKQYGDCLGDIAARDLICAQKFNGLTVLPPLLTDEMIAQYTSALLAGTITSGWTFGAGAALQIPFAMQMAYRFNGCGVTQNVLYENQKLIANQFNSAIGKIQDSLSSTASALGKLQDVVNQNAQALNTLVKQLSSNFGAISSVLNDILSRLDKVEAEVQIDRLITGRLQSLQTYVTQQLIRAAEIRASANLAATKMSECVLGQSKRVDFCGKGCHLMSFPQSAPHGVVFLHVTYVPAQEKNFTTAPAICHDGKAHFPREGVFVSNGTHWFVTQRNFYEPQIITTDNTFVSGNCDVVIGIVNNTVYDPLQPELDSFKEELDKYFKNHTSPDVDLGDISGINASVVNIQKEIDRLNEVAKNLNESLIDLQELGKYEQYIKGGGGSDIIKLLNEQVNKEMQSSNLYMSMSSWCYTHSLDGAGLFLFDHAAEEYEHAKKLIIFLNENNVPVQLTSISAPEHKFEGLTQIFQKAYEHEQHISESINNIVDHAIKSKDHATFNFLQWYVAEQHEEEVLFKDILDKIELIGNENHGLYLADQYVKGIAKSRKS

SEQ ID NO: 5274 - protein, 1379 aa, Artificial Sequence
  SARS-CoV-2/Belgium/ULG-6939/2020__EPI_ISL_417020 spike protein (1-1211)(I909C_Y1047C) Ferritin construct
MFVFLVLLPLVSSQCVNLTTRTQLPPAYTNSFTRGVYYPDKVFRSSVLHSTQDLFLPFFSNVTWFHAIHVSGTNGTKRFDNPVLPFNDGVYFASTEKSNIIRGWIFGTTLDSKTQSLLIVNNATNVVIKVCEFQFCNDPFLGVYYHKNNKSWMESEFRVYSSANNCTFEYVSQPFLMDLEGKQGNFKNLREFVFKNIDGYFKIYSKHTPINLVRDLPQGFSALEPLVDLPIGINITRFQTLLALHRSYLTPGDSSSGWTAGAAAYYVGYLQPRTFLLKYNENGTITDAVDCALDPLSETKCTLKSFTVEKGIYQTSNFRVQPTESIVRFPNITNLCPFGEVFNATRFASVYAWNRKRISNCVADYSVLYNSASFSTFKCYGVSPTKLNDLCFTNVYADSFVIRGDEVRQIAPGQTGKIADYNYKLPDDFTGCVIAWNSNNLDSKVGGNYNYLYRLFRKSNLKPFERDISTEIYQAGSTPCNGVEGFNCYFPLQSYGFQPTNGVGYQPYRVVVLSFELLHAPATVCGPKKSTNLVKNKCVNFNFNGLTGTGVLTESNKKFLPFQQFGRDIADTTDAVRDPQTLEILDITPCSFGGVSVITPGTNTSNQVAVLYQGVNCTEVPVAIHADQLTPTWRVYSTGSNVFQTRAGCLIGAEHVNNSYECDIPIGAGICASYQTQTNSPRRARSVASQSIIAYTMSLGAENSVVYSNNSIAIPTNFTISVTTEILPVSMTKTSVDCTMYICGDSTECSNLLLQYGSFCTQLNRALTGIAVEQDKNTQEVFAQVKQIYKTPPIKDFGGFNFSQILPDPSKPSKRSFIEDLLFNKVTLADAGFIKQYGDCLGDIAARDLICAQKFNGLTVLPPLLTDEMIAQYTSALLAGTITSGWTFGAGAALQIPFAMQMAYRFNGCGVTQNVLYENQKLIANQFNSAIGKIQDSLSSTASALGKLQDVVNQNAQALNTLVKQLSSNFGAISSVLNDILSRLDKVEAEVQIDRLITGRLQSLQTYVTQQLIRAAEIRASANLAATKMSECVLGQSKRVDFCGKGCHLMSFPQSAPHGVVFLHVTYVPAQEKNFTTAPAICHDGKAHFPREGVFVSNGTHWFVTQRNFYEPQIITTDNTFVSGNCDVVIGIVNNTVYDPLQPELDSFKEELDKYFKNHTSPDVDLGDISGINASVVNIQKEIDRLNEVAKNLNESLIDLQELGKYEQYIKGGGGSDIIKLLNEQVNKEMQSSNLYMSMSSWCYTHSLDGAGLFLFDHAAEEYEHAKKLIIFLNENNVPVQLTSISAPEHKFEGLTQIFQKAYEHEQHISESINNIVDHAIKSKDHATFNFLQWYVAEQHEEEVLFKDILDKIELIGNENHGLYLADQYVKGIAKSRKS

SEQ ID NO: 5275 - protein, 1379 aa, Artificial Sequence
  SARS-CoV-2/France/HF2496/2020__EPI_ISL_418231 spike protein (1-1211)(I909C_Y1047C) Ferritin construct
MFVFLVLLPLVSSQCVNLTTRTQLPPAYTNSFTRGVYYPDKVFRSSVLHSTQDLFLPFFSNVTWFHAIHVSGTNGTKRFDNPVLPFNDGVYFASTEKSNIIRGWIFGTTLDSKTQSLLIVNNATNVVIKVCEFQFCNDPFLGVYYHKNNKSWMESEFRVYSSANNCTFEYVSQPFLMDLEGKQGNFKNLREFVFKNIDGYFKIYSKHTPINLVRDLPQGFSALEPLVDLPIGINITRFQTLLALHRSYLTPGDSSSGWTAGAAAYYVGYLQPRTFLLKYNENGTITDAVDCALDPLSETKCTLKSFTVEKGIYQTSNFRVQPTESIVRFPNITNLCPFGEVFNATRFASVYAWNRKRISNCVADYSVLYNSASFSTFKCYGVSPTKLNDLCFTNVYADSFVIRGDEVRQIAPGQTGKIADYNYKLPDDFTGCVIAWNSNNLDSKVGGNYNYLYRLFRKSNLKPFERDISTEIYQAGSTPCNGVEGFNCYFPLQSYGFQPTNGVGYQPYRVVVLSFELLHAPATVCGPKKSTNLVKNKCVNFNFNGLTGTGVLTESNKKFLPFQQFGRDIADTTDAVRDPQTLEILDITPCSFGGVSVITPGTNTSNQVAVLYQGVNCTEVPVAIHADQLTPTWRVYSTGSNVFQTRAGCLIGAEHVNNSYECDIPIGAGICASYQTQTNSPRRARSVASQSIIAYTMSLGAENSVAYSNNSIAIPTNFTISVTTEILPVSMTKTSVDCTMYICGDSTECSNLLLQYGSFCTQLNRALTGIAVEQDKNTQEVFAQVKQIYKTPPIKDFGGFNFSQILPDPSKPSKRSFIEDLLFNKVTLADAGFIKQYGDCLGDIVARDLICAQKFNGLTVLPPLLTDEMIAQYTSALLAGTITSGWTFGAGAALQIPFAMQMAYRFNGCGVTQNVLYENQKLIANQFNSAIGKIQDSLSSTASALGKLQDVVNQNAQALNTLVKQLSSNFGAISSVLNDILSRLDKVEAEVQIDRLITGRLQSLQTYVTQQLIRAAEIRASANLAATKMSECVLGQSKRVDFCGKGCHLMSFPQSAPHGVVFLHVTYVPAQEKNFTTAPAICHDGKAHFPREGVFVSNGTHWFVTQRNFYEPQIITTDNTFVSGNCDVVIGIVNNTVYDPLQPELDSFKEELDKYFKNHTSPDVDLGDISGINASVVNIQKEIDRLNEVAKNLNESLIDLQELGKYEQYIKGGGGSDIIKLLNEQVNKEMQSSNLYMSMSSWCYTHSLDGAGLFLFDHAAEEYEHAKKLIIFLNENNVPVQLTSISAPEHKFEGLTQIFQKAYEHEQHISESINNIVDHAIKSKDHATFNFLQWYVAEQHEEEVLFKDILDKIELIGNENHGLYLADQYVKGIAKSRKS

SEQ ID NO: 5276 - protein, 1379 aa, Artificial Sequence
  SARS-CoV-2/USA/WA-UW291/2020__EPI_ISL_418076 spike protein (1-1211)(I909C_Y1047C) Ferritin construct
MFVFLVLLPLVSSQCVNLTTRTQLPPAYTNSFTRGVYYPDKVFRSSVLHSTQDLFLPFFSNVTWFHAIHVSGTNGTKRFDNPVLPFNDGVYFASTEKSNIIRGWIFGTTLDSKTQSLLIVNNATNVVIKVCEFQFCNDPFLGVYYHKNNKSWMESEFRVYSSANNCTFEYVSQPFLMDLEGKQGNFKNLREFVFKNIDGYFKIYSKHTPINLVRDLPQGFSALEPLVDLPIGINITRFQTLLALHRSYLTPGDSSSGWTAGAAAYYVGYLQPRTFLLKYNENGTITDAVDCALDPLSETKCTLKSFTVEKGIYQTSNFRVQPTESIVRFPNITNLCPFGEVFNATRFASVYAWNRKRISNCVADYSVLYNSASFSTFKCYGVSPTKLNDLCFTNVYADSFVIRGDEVRQIAPGQTGKIADYNYKLPDDFTGCVIAWNSNNLDSKVGGNYNYLYRLFRKSNLKPFERDISTEIYQAGSTPCNGVEGFNCYFPLQSYGFQPTNGVGYQPYRVVVLSFELLHAPATVCGPKKSTNLVKNKCVNFNFNGLTGTGVLTESNKKFLPFQQFGRDIADTTDAVRDPQTLEILDITPCSFGGVSVITPGTNTSNQVAVLYQGVNCTEVPVAIHADQLTPTWRVYSTGSNVFQTRAGCLIGAEHVNNSYECDIPIGAGICASYQTQTNSPRRARSVASQSIIAYTMSLGAENSVAYSNNSIAIPTNFTISVTTEILPVSMTKTSVDCTMYICGDSTECSNLLLQYGSFCTQLNRALTGIAVEQDKNTQEVFAQVKQIYKTPPIKDFGGFNFSQILPDPSKPSKRSFIEDLLFNKVTLADAGFIKQYGDCLGDIAARDLICAQKFNGLTVLPPLLTDEMIAQYTSALLAGTITSGWTFGAGAALQIPFAMQMAYRFNGCGVTQNVLYENQKLIANQFNSAIGKIQYSLSSTASALGKLQDVVNQNAQALNTLVKQLSSNFGAISSVLNDILSRLDKVEAEVQIDRLITGRLQSLQTYVTQQLIRAAEIRASANLAATKMSECVLGQSKRVDFCGKGCHLMSFPQSAPHGVVFLHVTYVPAQEKNFTTAPAICHDGKAHFPREGVFVSNGTHWFVTQRNFYEPQIITTDNTFVSGNCDVVIGIVNNTVYDPLQPELDSFKEELDKYFKNHTSPDVDLGDISGINASVVNIQKEIDRLNEVAKNLNESLIDLQELGKYEQYIKGGGGSDIIKLLNEQVNKEMQSSNLYMSMSSWCYTHSLDGAGLFLFDHAAEEYEHAKKLIIFLNENNVPVQLTSISAPEHKFEGLTQIFQKAYEHEQHISESINNIVDHAIKSKDHATFNFLQWYVAEQHEEEVLFKDILDKIELIGNENHGLYLADQYVKGIAKSRKS

SEQ ID NO: 5277 - protein, 1379 aa, Artificial Sequence; identical to SEQ ID NO: 5240
  SARS-CoV-2/Portugal/PT0034/2020__EPI_ISL_418019 spike protein (1-1211)(I909C_Y1047C) Ferritin construct

SEQ ID NO: 5278 - protein, 1379 aa, Artificial Sequence
  SARS-CoV-2/Iceland/202/2020__EPI_ISL_417750 spike protein (1-1211)(I909C_Y1047C) Ferritin construct
MFVFLVLLPLVSSQCVNLTTRTQLPPAYTNSFTRGVYYPDKVFRSSVLHSTQDLFLPFFSNVTWFHAIHVSGTNGTKRFDNPVLPFNDGVYFASTEKSNIIRGWIFGTTLDSKTQSLLIVNNATNVVIKVCEFQFCNDPFLGVYYHKNNKSWMESEFRVYSSANNCTFEYVSQPFLMDLEGKQGNFKNLREFVFKNIDGYFKIYSKHTPINLVRDLPQGFSALEPLVDLPIGINITRFQTLLALHRSYLTPGDSSSGWTAGAAAYYVGYLQPRTFLLKYNENGTITDAVDCALDPLSETKCTLKSFTVEKGIYQTSNFRVQPTESIVRFPNITNLCPFGEVFNATRFASVYAWNRKRISNCVADYSVLYNSASFSTFKCYGVSPTKLNDLCFTNVYADSFVIRGDEVRQIAPGQTGKIADYNYKLPDDFTGCVIAWNSNNLDSKVGGNYNYLYRLFRKSNLKPFERDISTEIYQAGSTPCNGVEGFNCYFPLQSYGFQPTNGVGYQPYRVVVLSFELLHAPATVCGPKKSTNLVKNKCVNFNFNGLTGTGVLTESNKKFLPFQQFGRDIADTTDAVRDPQTLEILDITPCSFGGVSVITPGTNTSNQVAVLYQDVNCTEVPVAIHADQLTPTWRVYSTGSNVFQTRAGCLIGAEHVNNSYECDIPIGAGICASYQTQTNSPRRARSVASQSIIAYTMSLGAENSVAYSNNSIAIPTNFTISVTTEILPVSMTKTSVDCTMYICGDSTECSNLLLQYGSFCTQLNRALTGIAVEQDKNTQEVFAQVKQIYKTPPIKDFGGFNFSQILPDPSKPSKRSFIEDLLFNKVTLADAGFIKQYGDCLGDIAARDLICAQKFNGLTVLPPLLTDEMIAQYTSALLAGTITSGWTFGAGAALQIPFAMQMAYRFNGCGVTQNVLYENQKLIANQFNSAIGKIQDSLSSTASALGKLQDVVNQNAQALNTLVKQLSSNFGAISSVLNDILSRLDKVEAEVQIDRLITGRLQSLQTYVTQQLIRAAEIRASANLAATKMSECVLGQSKRVDFCGKGCHLMSFPQSAPHGVVFLHVTYVPAQEKNFTTAPAICHDGKAHFPREGVFVSNGTHWFVTQRNFYEPQIITTDNTFVSGNCDVVIGIVNNTVYDPLQPELDSFKEELDKYFKNHTSPDVDLGDIPGINASVVNIQKEIDRLNEVAKNLNESLIDLQELGKYEQYIKGGGGSDIIKLLNEQVNKEMQSSNLYMSMSSWCYTHSLDGAGLFLFDHAAEEYEHAKKLIIFLNENNVPVQLTSISAPEHKFEGLTQIFQKAYEHEQHISESINNIVDHAIKSKDHATFNFLQWYVAEQHEEEVLFKDILDKIELIGNENHGLYLADQYVKGIAKSRKS

SEQ ID NO: 5279 - protein, 1379 aa, Artificial Sequence
  SARS-CoV-2/USA/WA-UW261/2020__EPI_ISL_418046 spike protein (1-1211)(I909C_Y1047C) Ferritin construct
MFVFLVLLPLVSSQCVNLTTRTQLPPAYTNSFTRGVYYPDKVFRSSVLHSTQDLFLPFFSNVTWFHAIHVSGTNGTKRFDNPVLPFNDGVYFASTEKSNIIRGWIFGTTLDSKTQSLLIVNNATNVVIKVCEFQFCNDPFLGVYYHKNNKSWMESEFRVYSSANNCTFEYVSQPFLMDLEGKQGNFKNLREFVFKNIDGYFKIYSKHTPINLVRDLPQGFSALEPLVDLPIGINITRFQTLLALHRSYLTPGDSSSGWTAGAAAYYVGYLQPRTFLLKYNENGTITDAVDCALDPLSETKCTLKSFTVEKGIYQTSNFRVQPTESIVRFPNITNLCPFGEVFNATRFTSVYAWNRKRISNCVADYSVLYNSASFSTFKCYGVSPTKLNDLCFTNVYADSFVIRGDEVRQIAPGQTGKIADYNYKLPDDFTGCVIAWNSNNLDSKVGGNYNYLYRLFRKSNLKPFERDISTEIYQAGSTPCNGVEGFNCYFPLQSYGFQPTNGVGYQPYRVVVLSFELLHAPATVCGPKKSTNLVKNKCVNFNFNGLTGTGVLTESNKKFLPFQQFGRDIADTTDAVRDPQTLEILDITPCSFGGVSVITPGTNTSNQVAVLYQDVNCTEVPVAIHADQLTPTWRVYSTGSNVFQTRAGCLIGAEHVNNSYECDIPIGAGICASYQTQTNSPRRARSVASQSIIAYTMSLGAENSVAYSNNSIAIPTNFTISVTTEILPVSMTKTSVDCTMYICGDSTECSNLLLQYGSFCTQLNRALTGIAVEQDKNTQEVFAQVKQIYKTPPIKDFGGFNFSQILPDPSKPSKRSFIEDLLFNKVTLADAGFIKQYGDCLGDIAARDLICAQKFNGLTVLPPLLTDEMIAQYTSALLAGTITSGWTFGAGAALQIPFAMQMAYRFNGCGVTQNVLYENQKLIANQFNSAIGKIQDSLSSTASALGKLQDVVNQNAQALNTLVKQLSSNFGAISSVLNDILSRLDKVEAEVQIDRLITGRLQSLQTYVTQQLIRAAEIRASANLAATKMSECVLGQSKRVDFCGKGCHLMSFPQSAPHGVVFLHVTYVPAQEKNFTTAPAICHDGKAHFPREGVFVSNGTHWFVTQRNFYEPQIITTDNTFVSGNCDVVIGIVNNTVYDPLQPELDSFKEELDKYFKNHTSPDVDLGDISGINASVVNIQKEIDRLNEVAKNLNESLIDLQELGKYEQYIKGGGGSDIIKLLNEQVNKEMQSSNLYMSMSSWCYTHSLDGAGLFLFDHAAEEYEHAKKLIIFLNENNVPVQLTSISAPEHKFEGLTQIFQKAYEHEQHISESINNIVDHAIKSKDHATFNFLQWYVAEQHEEEVLFKDILDKIELIGNENHGLYLADQYVKGIAKSRKS

SEQ ID NO: 5280 - protein, 1379 aa, Artificial Sequence
  SARS-CoV-2/Portugal/PT0035/2020__EPI_ISL_418020 spike protein (1-1211)(I909C_Y1047C) Ferritin construct
MFVFLVLLPLVSSQCVNLTTRTQLPPAYTNSFTRGVYYPDKVFRSSVLHSTQDLFLPFFSNVTWFHAIHVSGTNGTKRFDNPVLPFNDGVYFASTEKSNIIRGWIFGTTLDSKTQSLLIVNNATNVVIKVCEFQFCNDPFLGVYYHKNNKSWMESEFRVYSSANNCTFEYVSQPFLMDLEGKQGNFKNLREFVFKNIDGYFKIYSKHTPINLVRDLPQGFSALEPLVDLPIGINITRFQTLLALHRSYLTPGDSSSGWTAGAAAYYVGYLQPRTFLLKYNENGTITDAVDCALDPLSETKCTLKSFTVEKGIYQTSNFRVQPTESIVRFPNITNLCPFGEVFNATRFASVYAWNRKRISNCVADYSVLYNSASFSTFKCYGVSPTKLNDLCFTNVYADSFVIRGDEVRQIAPGQTGKIADYNYKLPDDFTGCVIAWNSNNLDSKVGGNYNYLYRLFRKSNLKPFERDISTEIYQAGSTPCNGVEGFNCYFPLQSYGFQPTNGVGYQPYRVVVLSFELLHAPATVCGPKKSTNLVKNKCVNFNFNGLTGTGVLTESNKKFLPFQQFGRDIADTTDAVRDPQTLEILDITPCSFGGVSVITPGTNTSNQVAVLYQDVNCTEVPVAIHADQLTPTWRVYSTGSNVFQTRAGCLIGAEHVNNSYECDIPIGAGICASYQTQTNSPRRARSVASQSIIAYTMSLGAENSVAYSNNSIAIPTNFTISVTTEILPVSMTKTSVDCTMYICGDSTECSNLLLQYGSFCTQLNRALTGIAVEQDKNTQEVFAQVKQIYKTPPIKDFGGFNFSQILPDPSKPSKRSFIEDLLFNKVTLADAGFIKQYGDCLGDISARDLICAQKFNGLTVLPPLLTDEMIAQYTSALLAGTITSGWTFGAGAALQIPFAMQMAYRFNGCGVTQNVLYENQKLIANQFNSAIGKIQDSLSSTASALGKLQDVVNQNAQALNTLVKQLSSNFGAISSVLNDILSRLDKVEAEVQIDRLITGRLQSLQTYVTQQLIRAAEIRASANLAATKMSECVLGQSKRVDFCGKGCHLMSFPQSAPHGVVFLHVTYVPAQEKNFTTAPAICHDGKAHFPREGVFVSNGTHWFVTQRNFYEPQIITTDNTFVSGNCDVVIGIVNNTVYDPLQPELDSFKEELDKYFKNHTSPDVDLGDISGINASVVNIQKEIDRLNEVAKNLNESLIDLQELGKYEQYIKGGGGSDIIKLLNEQVNKEMQSSNLYMSMSSWCYTHSLDGAGLFLFDHAAEEYEHAKKLIIFLNENNVPVQLTSISAPEHKFEGLTQIFQKAYEHEQHISESINNIVDHAIKSKDHATFNFLQWYVAEQHEEEVLFKDILDKIELIGNENHGLYLADQYVKGIAKSRKS

SEQ ID NO: 5281 - protein, 1379 aa, Artificial Sequence
  SARS-CoV-2/USA/NY-NYUMC7/2020__EPI_ISL_418192 spike protein (1-1211)(I909C_Y1047C) Ferritin construct
MFVFLVLLPLVSSQCVNLTTRTQLPPAYTNSFTRGVYYPDKVFRSSVLHSTQDLFLPFFSNVTWFHAIHVSGTNGTKRFDNPVLPFNDGVYFASTEKSNIIRGWIFGTTLDSKTQSLLIVNNATNVVIKVCEFQFCNDPFLGVYHHKNNKSWMESEFRVYSSANNCTFEYVSQPFLMDLEGKQGNFKNLREFVFKNIDGYFKIYSKHTPINLVRDLPQGFSALEPLVDLPIGINITRFQTLLALHRSYLTPGDSSSGWTAGAAAYYVGYLQPRTFLLKYNENGTITDAVDCALDPLSETKCTLKSFTVEKGIYQTSNFRVQPTESIVRFPNITNLCPFGEVFNATRFASVYAWNRKRISNCVADYSVLYNSASFSTFKCYGVSPTKLNDLCFTNVYADSFVIRGDEVRQIAPGQTGKIADYNYKLPDDFTGCVIAWNSNNLDSKVGGNYNYLYRLFRKSNLKPFERDISTEIYQAGSTPCNGVEGFNCYFPLQSYGFQPTNGVGYQPYRVVVLSFELLHAPATVCGPKKSTNLVKNKCVNFNFNGLTGTGVLTESNKKFLPFQQFGRDIADTTDAVRDPQTLEILDITPCSFGGVSVITPGTNTSNQVAVLYQGVNCTEVPVAIHADQLTPTWRVYSTGSNVFQTRAGCLIGAEHVNNSYECDIPIGAGICASYQTQTNSPRRARSVASQSIIAYTMSLGAENSVAYSNNSIAIPTNFTISVTTEILPVSMTKTSVDCTMYICGDSTECSNLLLQYGSFCTQLNRALTGIAVEQDKNTQEVFAQVKQIYKTPPIKDFGGFNFSQILPDPSKPSKRSFIEDLLFNKVTLADAGFIKQYGDCLGDIAARDLICAQKFNGLTVLPPLLTDEMIAQYTSALLAGTITSGWTFGAGAALQIPFAMQMAYRFNGCGVTQNVLYENQKLIANQFNSAIGKIQDSLSSTASALGKLQDVVNQNAQALNTLVKQLSSNFGAISSVLNDILSRLDKVEAEVQIDRLITGRLQSLQTYVTQQLIRAAEIRASANLAATKMSECVLGQSKRVDFCGKGCHLMSFPQSAPHGVVFLHVTYVPAQEKNFTTAPAICHDGKAHFPREGVFVSNGTHWFVTQRNFYEPQIITTDNTFVSGNCDVVIGIVNNTVYDPLQPELDSFKEELDKYFKNHTSPDVDLGDISGINASVVNIQKEIDRLNEVAKNLNESLIDLQELGKYEQYIKGGGGSDIIKLLNEQVNKEMQSSNLYMSMSSWCYTHSLDGAGLFLFDHAAEEYEHAKKLIIFLNENNVPVQLTSISAPEHKFEGLTQIFQKAYEHEQHISESINNIVDHAIKSKDHATFNFLQWYVAEQHEEEVLFKDILDKIELIGNENHGLYLADQYVKGIAKSRKS

SEQ ID NO: 5282 - protein, 1379 aa, Artificial Sequence
  SARS-CoV-2/Iceland/189/2020__EPI_ISL_417709 spike protein (1-1211)(I909C_Y1047C) Ferritin construct
MFVFLVLLPLVSSQCVNLTTRTQLPPAYTNSFTRGVYYPDKVFRSSVLHSTQDLFLPFFSNVTWFHAIHVSGTNGTKRFDNPVLPFNDGVYFASTEKSNIIRGWIFGTTLDSKTQSLLIVNNATNVVIKVCEFQFCNDPFLGVYYHKNNKSWMESEFRVYSSANNCTFEYVSQPFLMDLEGKQGNFKNLREFVFKNIDGYFKIYSKHTPINLVRDLPQGFSALEPLVDLPIGINITRFQTLLALHRSYLTPGDSSSGWTAGAAAYYVGYLQPRTFLLKYNENGTITDAVDCALDPLSETKCTLKSFTVEKGIYQTSNFRVQPTESIVRFPNITNLCPFGEVFNATRFASVYAWNRKRISNCVADYSVLYNSASFSTFKCYGVSPTKLNDLCFTNVYADSFVIRGDEVRQIAPGQTGKIADYNYKLPDDFTGCVIAWNSNNLDSKVGGNYNYLYRLFRKSNLKPFERDISTEIYQAGSTPCNGVEGFNCYFPLQSYGFQPTNGVGYQPYRVVVLSFELLHAPATVCGPKKSTNLVKNKCVNFNFNGLTGTGVLTESNKKFLPFQQFGRDIADTTDAVRDPQTLEILDITPCSFGGVSVITPGTNTSNQVAVLYQGVNCTEVPVAIHADQLTPTWRVYSTGSNVFQTRAGCLIGAEHVNNSYECDIPIGAGICASYQTQTNSPRRARSVASQSIIAYTMSLGAENSVAYSNNSIAIPTNFTISVTTEILPVSMTKTSVDCTMYICGDSTECSNLLLQYGSFCTQLNRALTGIAVEQDKNTQEVFAQVKQIYKTPPIKDFGGFNFSQILPDPSKPSKRSFIEDLLFNKVTLADAGFTKQYGDCLGDIAARDLICAQKFNGLTVLPPLLTDEMIAQYTSALLAGTITSGWTFGAGAALQIPFAMQMAYRFNGCGVTQNVLYENQKLIANQFNSAIGKIQDSLSSTASALGKLQDVVNQNAQALNTLVKQLSSNFGAISSVLNDILSRLDKVEAEVQIDRLITGRLQSLQTYVTQQLIRAAEIRASANLAATKMSECVLGQSKRVDFCGKGCHLMSFPQSAPHGVVFLHVTYVPAQEKNFTTAPAICHDGKAHFPREGVFVSNGTHWFVTQRNFYEPQIITTDNTFVSGNCDVVIGIVNNTVYDPLQPELDSFKEELDKYFKNHTSPDVDLGDISGINASVVNIQKEIDRLNEVAKNLNESLIDLQELGKYEQYIKGGGGSDIIKLLNEQVNKEMQSSNLYMSMSSWCYTHSLDGAGLFLFDHAAEEYEHAKKLIIFLNENNVPVQLTSISAPEHKFEGLTQIFQKAYEHEQHISESINNIVDHAIKSKDHATFNFLQWYVAEQHEEEVLFKDILDKIELIGNENHGLYLADQYVKGIAKSRKS

SEQ ID NO: 5283 - protein, 1379 aa, Artificial Sequence
  SARS-CoV-2/Australia/NSW56/2020__EPI_ISL_417408 spike protein (1-1211)(I909C_Y1047C) Ferritin construct
MFVFLVLLPLVSSQCVNLTTRTQLPPAYTNSFTRGVYYPDKVFRSSVLHSTQDLFLPFFSNVTWFHAIHVSGTNGTKRFDNPVLPFNDGVYFASTEKSNIIRGWIFGTTLDSKTQSLLIVNNATNVVIKVCEFQFCNDPFLGVYYHKNNKSWMESEFRVYSSANNCTFEYVSQPFLMDLEGKQGNFKNLREFVFKNIDGYFKIYSKHTPINLVRDLPQGFSALEPLVDLPIGINITRFQTLLALHRSYLTPGDSSSGWTAGAAAYYVGYLQPRTFLLKYNENGTITDAVDCALDPLSETKCTLKSFTVEKGIYQTSNFRVQPTESIVRFPNITNLCPFGEVFNATRFASVYAWNRKRISNCVADYSVLYNSASFSTFKCYGVSPTKLNDLCFTNVYADSFVIRGDEVRQIAPGQTGKIADYNYKLPDDFTGCVIAWNSNNLDSKVGGNYNYLYRLFRKSNLKPFERDISTEIYQAGSTPCNGVEGFNCYFPLQSYGFQPTNGVGYQPYRVVVLSFELLHAPATVCGPKKSTNLVKNKCVNFNFNGLTGTGVLTESNKKFLPFQQFGRDIADTTDAVRDPQTLEILDITPCSFGGVSVITPGTNTSNQVAVLYQDVNCTEVPVAIHADQLTPTWRVYSTGSNVFQTRAGCLIGAEHVNNSYECDIPIGAGICASYQTQTNSPRRARSVASQSIIAYTMSLGAENSVAYSNNSIAIPTNFTISVTTEILPVSMTKTSVDCTMYICGDSTECSNLLLQYGSFCTQLNRALTGIAVEQDKNTQEVFAQVKQIYKTPPIKDFGGFNFSQILPDSSKPSKRSFIEDLLFNKVTLADAGFIKQYGDCLGDIAARDLICAQKFNGLTVLPPLLTDEMIAQYTSALLAGTITSGWTFGAGAALQIPFAMQMAYRFNGCGVTQNVLYENQKLIANQFNSAIGKIQDSLSSTASALGKLQDVVNQNAQALNTLVKQLSSNFGAISSVLNDILSRLDKVEAEVQIDRLITGRLQSLQTYVTQQLIRAAEIRASANLAATKMSECVLGQSKRVDFCGKGCHLMSFPQSAPHGVVFLHVTYVPAQEKNFTTAPAICHDGKAHFPREGVFVSNGTHWFVTQRNFYEPQIITTDNTFVSGNCDVVIGIVNNTVYDPLQPELDSFKEELDKYFKNHTSPDVDLGDISGINASVVNIQKEIDRLNEVAKNLNESLIDLQELGKYEQYIKGGGGSDIIKLLNEQVNKEMQSSNLYMSMSSWCYTHSLDGAGLFLFDHAAEEYEHAKKLIIFLNENNVPVQLTSISAPEHKFEGLTQIFQKAYEHEQHISESINNIVDHAIKSKDHATFNFLQWYVAEQHEEEVLFKDILDKIELIGNENHGLYLADQYVKGIAKSRKS

SEQ ID NO: 5284 - protein, 1379 aa, Artificial Sequence
  SARS-CoV-2/Iceland/280/2020__EPI_ISL_417608 spike protein (1-1211)(I909C_Y1047C) Ferritin construct
MFVFLVLLPLVSSQCVNLTTRTQLPPAYTNSFTRGVYYPDKVFRSSVLHSTQDLFLPFFSNVTWFHAIHVSGTNGTKRFDNPVLPFNDGVYFASTEKSNIIRGWIFGTTLDSKTQSLLIVNNATNVVIKVCEFQFCNDPFLGVYYHKNNKSWMESEFRVYSSANNCTFEYVSQPFLMDLEGKQGNFKNLREFVFKNIDGYFKIYSKHTPINLVRDLPQGFSALEPLVDLPIGINITRFQTLLALHRSYLTPGDSSSGWTAGAAAYYVGYLQPRTFLLKYNENGTITDAVDCALDPLSETKCTLKSFTVEKGIYQTSNFRVQPTESIVRFPNITNLCPFGEVFNATRFASVYAWNRKRISNCVADYSVLYNSASFSTFKCYGVSPTKLNDLCFTNVYADSFVIRGDEVRQIAPGQTGKIADYNYKLPDDFTGCVIAWNSNNLDSKVGGNYNYLYRLFRKSNLKPFERDISTEIYQAGSTPCNGVEGFNCYFPLQSYGFQPTNGVGYQPYRVVVLSFELLHAPATVCGPKKSTNLVKNKCVNFNFNGLTGTGVLTESNKKFLPFQQFGRDIADTTDAVRDPQTLEILDITPCSFGGVSVITPGTNTSNQVAVLYQGVNCTEVPVAIHADQLTPTWRVYSTGSNVFQTRAGCLIGAEHVNNSYECDIPIGAGICASYHTQTNSPRRARSVASQSIIAYTMSLGAENSVAYSNNSIAIPTNFTISVTTEILPVSMTKTSVDCTMYICGDSTECSNLLLQYGSFCTQLNRALTGIAVEQDKNTQEVFAQVKQIYKTPPIKDFGGFNFSQILPDPSKPSKRSFIEDLLFNKVTLADAGFIKQYGDCLGDIAARDLICAQKFNGLTVLPPLLTDEMIAQYTSALLAGTITSGWTFGAGAALQIPFAMQMAYRFNGCGVTQNVLYENQKLIANQFNSAIGKIQDSLSSTASALGKLQDVVNQNAQALNTLVKQLSSNFGAISSVLNDILSRLDKVEAEVQIDRLITGRLQSLQTYVTQQLIRAAEIRASANLAATKMSECVLGQSKRVDFCGKGCHLMSFPQSAPHGVVFLHVTYVPAQEKNFTTAPAICHDGKAHFPREGVFVSNGTHWFVTQRNFYEPQIITTDNTFVSGNCDVVIGIVNNTVYDPLQPELDSFKEELDKYFKNHTSPDVDLGDISGINASVVNIQKEIDRLNEVAKNLNESLIDLQELGKYEQYIKGGGGSDIIKLLNEQVNKEMQSSNLYMSMSSWCYTHSLDGAGLFLFDHAAEEYEHAKKLIIFLNENNVPVQLTSISAPEHKFEGLTQIFQKAYEHEQHISESINNIVDHAIKSKDHATFNFLQWYVAEQHEEEVLFKDILDKIELIGNENHGLYLADQYVKGIAKSRKS

SEQ ID NO: 5285 - protein, 1379 aa, Artificial Sequence; identical to SEQ ID NO: 5240
  SARS-CoV-2/Iceland/247/2020__EPI_ISL_417575 spike protein (1-1211)(I909C_Y1047C) Ferritin construct

SEQ ID NO: 5286 - protein, 1379 aa, Artificial Sequence
  SARS-CoV-2/Iceland/238/2020__EPI_ISL_417566 spike protein (1-1211)(I909C_Y1047C) Ferritin construct
MFVFLVLLPLVSSQCVNLTTRTQLPPAYTNSFTRGVYYPDKVFRSSVLHSTQDLFLPFFSNVTWFHAIHVSGTNGTKRFDNPVLPFNDGVYFASTEKSNIIRGWIFGTTLDSKTQSLLIVNNATNVVIKVCEFQFCNDPFLGVYYHKNNKSWMESEFRVYSSANNCTFEYVSQPFLMDLEGKQGNFKNLREFVFKNIDGYFKIYSKHTPINLVRDLPQGFSALEPLVDLPIGINITRFQTLLALHRSYLTPGDSSSGWTAGAAAYYVGYLQPRTFLLKYNENGTITDAVDCALDPLSETKCTLKSFTVEKGIYQTSNFRVQPTESIVRFPNITNLCPFGEVFNATRFASVYAWNRKRISNCVADYSVLYNSASFSTFKCYGVSPTKLNDLCFTNVYADSFVIRGDEVRQIAPGQTGKIADYNYKLPDDFTGCVIAWNSNNLDSKVGGNYNYLYRLFRKSNLKPFERDISTEIYQAGSTPCNGVEGFNCYFPLQSYGFQPTNGVGYQPYRVVVLSFELLHAPATVCGPKKSTNLVKNKCVNFNFNGLTGTGVLTESNKKFLPFQQFGRDIADTTDAVRDPQTLEILDITPCSFGGVSVITPGTNTSNQVAVLYQGVNCTEVPVAIHADQLTPTWRVYSTGSNVFQTRAGCLIGAEHVNNSYECDIPIGAGICASYQTQTNSPRRARSVASQSIIAYTMSLGAENSVAYSNNSIAIPTNFTISVTTEILPVSMTKTSVDCTMYICGDSTECSNLLLQYGSFCTQLNRALTGIAVEQDKNTQEVFAQVKQIYKTPPIKDFGGFNFSQILPDPSKPSKRSFIEDLLFNKVTLADVGFIKQYGDCLGDIAARDLICAQKFNGLTVLPPLLTDEMIAQYTSALLAGTITSGWTFGAGAALQIPFAMQMAYRFNGCGVTQNVLYENQKLIANQFNSAIGKIQDSLSSTASALGKLQDVVNQNAQALNTLVKQLSSNFGAISSVLNDILSRLDKVEAEVQIDRLITGRLQSLQTYVTQQLIRAAEIRASANLAATKMSECVLGQSKRVDFCGKGCHLMSFPQSAPHGVVFLHVTYVPAQEKNFTTAPAICHDGKAHFPREGVFVSNGTHWFVTQRNFYEPQIITTDNTFVSGNCDVVIGIVNNTVYDPLQPELDSFKEELDKYFKNHTSPDVDLGDISGINASVVNIQKEIDRLNEVAKNLNESLIDLQELGKYEQYIKGGGGSDIIKLLNEQVNKEMQSSNLYMSMSSWCYTHSLDGAGLFLFDHAAEEYEHAKKLIIFLNENNVPVQLTSISAPEHKFEGLTQIFQKAYEHEQHISESINNIVDHAIKSKDHATFNFLQWYVAEQHEEEVLFKDILDKIELIGNENHGLYLADQYVKGIAKSRKS

SEQ ID NO: 5287 - protein, 1379 aa, Artificial Sequence
  SARS-CoV-2/Greece/16/2020__EPI_ISL_418265 spike protein (1-1211)(I909C_Y1047C) Ferritin construct
MFVFLVLLPLVSSQCVNLTTRTQLPPAYTNSFTRGVYYPDKVFRSSVLHSTQDLFLPFFSNVTWFHAIHVSGTNGTKRFDNPVLPFNDGVYFASTEKSNIIRGWIFGTTLDSKTQSLLIVNNATNVVIKVCEFQFCNDPFLGVYYHKNNKSWMESEFRVYSSANNCTFEYVSQPFLMDLEGKQGNFKNLREFVFKNVDGYFKIYSKHTPINLVRDLPQGFSALEPLVDLPIGINITRFQTLLALHRSYLTPGDSSSGWTAGAAAYYVGYLQPRTFLLKYNENGTITDAVDCALDPLSETKCTLKSFTVEKGIYQTSNFRVQPTESIVRFPNITNLCPFGEVFNATRFASVYAWNRKRISNCVADYSVLYNSASFSTFKCYGVSPTKLNDLCFTNVYADSFVIRGDEVRQIAPGQTGKIADYNYKLPDDFTGCVIAWNSNNLDSKVGGNYNYLYRLFRKSNLKPFERDISTEIYQAGSTPCNGVEGFNCYFPLQSYGFQPTNGVGYQPYRVVVLSFELLHAPATVCGPKKSTNLVKNKCVNFNFNGLTGTGVLTESNKKFLPFQQFGRDIADTTDAVRDPQTLEILDITPCSFGGVSVITPGTNTSNQVAVLYQDVNCTEVPVAIHADQLTPTWRVYSTGSNVFQTRAGCLIGAEHVNNSYECDIPIGAGICASYQTQTNSPRRARSVASQSIIAYTMSLGAENSVAYSNNSIAIPTNFTISVTTEILPVSMTKTSVDCTMYICGDSTECSNLLLQYGSFCTQLNRALTGIAVEQDKNTQEVFAQVKQIYKTPPIKDFGGFNFSQILPDPSKPSKRSFIEDLLFNKVTLADAGFIKQYGDCLGDIAARDLICAQKFNGLTVLPPLLTDEMIAQYTSALLAGTITSGWTFGAGAALQIPFAMQMAYRFNGCGVTQNVLYENQKLIANQFNSAIGKIQDSLSSTASALGKLQDVVNQNAQALNTLVKQLSSNFGAISSVLNDILSRLDKVEAEVQIDRLITGRLQSLQTYVTQQLIRAAEIRASANLAATKMSECVLGQSKRVDFCGKGCHLMSFPQSAPHGVVFLHVTYVPAQEKNFTTAPAICHDGKAHFPREGVFVSNGTHWFVTQRNFYEPQIITTDNTFVSGNCDVVIGIVNNTVYDPLQPELDSFKEELDKYFKNHTSPDVDLGDISGINASVVNIQKEIDRLNEVAKNLNESLIDLQELGKYEQYIKGGGGSDIIKLLNEQVNKEMQSSNLYMSMSSWCYTHSLDGAGLFLFDHAAEEYEHAKKLIIFLNENNVPVQLTSISAPEHKFEGLTQIFQKAYEHEQHISESINNIVDHAIKSKDHATFNFLQWYVAEQHEEEVLFKDILDKIELIGNENHGLYLADQYVKGIAKSRKS

SEQ ID NO: 5288 - protein, 1379 aa, Artificial Sequence
  SARS-CoV-2/Iceland/319/2020__EPI_ISL_417648 spike protein (1-1211)(I909C_Y1047C) Ferritin construct
MFVFLVLLPLVSSQCVNLTTRTQLPPAYTNSFTRGVYYPDKVFRSSVLHSTQDLFLPFFSNVTWFHAIHVSGTNGTKRFDNPVLPFNDGVYFASTEKSNIIRGWIFGTTLDSKTQSLLIVNNATNVVIKVCEFQFCNDPFLGVYYHKNNKSWMESEFRVYSSANNCTFEYVSQPFLIDLEGKQGNFKNLREFVFKNIDGYFKIYSKHTPINLVRDLPQGFSALEPLVDLPIGINITRFQTLLALHRSYLTPGDSSSGWTAGAAAYYVGYLQPRTFLLKYNENGTITDAVDCALDPLSETKCTLKSFTVEKGIYQTSNFRVQPTESIVRFPNITNLCPFGEVFNATRFASVYAWNRKRISNCVADYSVLYNSASFSTFKCYGVSPTKLNDLCFTNVYADSFVIRGDEVRQIAPGQTGKIADYNYKLPDDFTGCVIAWNSNNLDSKVGGNYNYLYRLFRKSNLKPFERDISTEIYQAGSTPCNGVEGFNCYFPLQSYGFQPTNGVGYQPYRVVVLSFELLHAPATVCGPKKSTNLVKNKCVNFNFNGLTGTGVLTESNKKFLPFQQFGRDIADTTDAVRDPQTLEILDITPCSFGGVSVITPGTNTSNQVAVLYQGVNCTEVPVAIHADQLTPTWRVYSTGSNVFQTRAGCLIGAEHVNNSYECDIPIGAGICASYQTQTNSPRRARSVASQSIIAYTMSLGAENSVAYSNNSIAIPTNFTISVTTEILPVSMTKTSVDCTMYICGDSTECSNLLLQYGSFCTQLNRALTGIAVEQDKNTQEVFAQVKQIYKTPPIKDFGGFNFSQILPDPSKPSKRSFIEDLLFNKVTLADAGFIKQYGDCLGDIAARDLICAQKFNGLTVLPPLLTDEMIAQYTSALLAGTITSGWTFGAGAALQIPFAMQMAYRFNGCGVTQNVLYENQKLIANQFNSAIGKIQDSLSSTASALGKLQDVVNQNAQALNTLVKQLSSNFGAISSVLNDILSRLDKVEAEVQIDRLITGRLQSLQTYVTQQLIRAAEIRASANLAATKMSECVLGQSKRVDFCGKGCHLMSFPQSAPHGVVFLHVTYVPAQEKNFTTAPAICHDGKAHFPREGVFVSNGTHWFVTQRNFYEPQIITTDNTFVSGNCDVVIGIVNNTVYDPLQPELDSFKEELDKYFKNHTSPDVDLGDISGINASVVNIQKEIDRLNEVAKNLNESLIDLQELGKYEQYIKGGGGSDIIKLLNEQVNKEMQSSNLYMSMSSWCYTHSLDGAGLFLFDHAAEEYEHAKKLIIFLNENNVPVQLTSISAPEHKFEGLTQIFQKAYEHEQHISESINNIVDHAIKSKDHATFNFLQWYVAEQHEEEVLFKDILDKIELIGNENHGLYLADQYVKGIAKSRKS

SEQ ID NO: 5289 - protein, 1379 aa, Artificial Sequence
  SARS-CoV-2/Congo/94/2020__EPI_ISL_417947 spike protein (1-1211)(I909C_Y1047C) Ferritin construct
MFVFLVLLPLVSSQCVNLTTRTQLPPAYTNSFTRGVYYPDKVFRSSVLHSTQDLFLPFFSNVTWFHAIHVSGTNGTKRFDNPVLPFNDGVYFASTEKSNIIRGWIFGTTLDSKTQSLLIVNNATNVVIKVCEFQFCNDPFLGVYYHKNNKSWMESEFRVYSSANNCTFEYVSQPFLMDLEGKQGNFKNLREFVFKNIDGYFKIYSKHTPINLVRDLPQGFSALEPLVDLPIGINITRFQTLLALHRSYLTPGDSSSGWTAGAAAYYVGYLQPRTFLLKYNENGTITDAVDCALDPLSETKCTLKSFTVEKGIYQTSNFRVQPTESIVRFPNITNLCPFGEVFNATRFASVYAWNRKRISNCVADYSVLYNSASFSTFKCYGVSPTKLNDLCFTNVYADSFVIRGDEVRQIAPGQTGKIADYNYKLPDDFTGCVIAWNSNNLDSKVGGNYNYLYRLFRKSNLKPFERDISTEIYQAGSTPCNGVEGFNCYFPLQSYGFQPTNGVGYQPYRVVVLSFELLHAPATVCGPKKSTNLVKNKCVNFNFNGLTGTGVLTESNKKFLPFQQFGRDIADTTDAVRDPQTLEILDITPCSFGGVSVITPGTNTSNQVAVLYQGVNCTEVPVAIHADQLTPTWRVYSTGSNVFQTRAGCLIGAEHVNNSYECDIPIGAGICASYQTQTNSPRRARSVASQSIIAYTMSLGAENSVAYSNNSIAIPTNFTISVTTEILPVSMTKTSVDCTMYICGDSTECSNLLLQYGSFCTQLNRALTGIAVEQDKNTQEVFAQVKQIYKTPPIKDFGGFNFSQILPDPSKPSKRSFIEDILFNKVTLADAGFIKQYGDCLGDIAARDLICAQKFNGLTVLPPLLTDEMIAQYTSALLAGTITSGWTFGAGAALQIPFAMQMAYRFNGCGVTQNVLYENQKLIANQFNSAIGKIQDSLSSTASALGKLQDVVNQNAQALNTLVKQLSSNFGAISSVLNDILSRLDKVEAEVQIDRLITGRLQSLQTYVTQQLIRAAEIRASANLAATKMSECVLGQSKRVDFCGKGCHLMSFPQSAPHGVVFLHVTYVPAQEKNFTTAPAICHDGKAHFPREGVFVSNGTHWFVTQRNFYEPQIITTDNTFVSGNCDVVIGIVNNTVYDPLQPELDSFKEELDKYFKNHTSPDVDLGDISGINASVVNIQKEIDRLNEVAKNLNESLIDLQELGKYEQYIKGGGGSDIIKLLNEQVNKEMQSSNLYMSMSSWCYTHSLDGAGLFLFDHAAEEYEHAKKLIIFLNENNVPVQLTSISAPEHKFEGLTQIFQKAYEHEQHISESINNIVDHAIKSKDHATFNFLQWYVAEQHEEEVLFKDILDKIELIGNENHGLYLADQYVKGIAKSRKS

SEQ ID NO: 5290 - protein, 1379 aa, Artificial Sequence
  SARS-CoV-2/Congo/158/2020__EPI_ISL_417950 spike protein (1-1211)(I909C_Y1047C) Ferritin construct
MFVFLVLLPLVSSQCVNLTTRTQLPPAYTNSFTRGVYYPDKVFRSSVLHSTQDLFLPFFSNVTWFHAIHVSGTNGTKRFDNPVLPFNDGVYFASTEKSNIIRGWIFGTTLDSKTQSLLIVNNATNVVIKVCEFQFCNDPFLGVYYHKNNKSWMESEFRVYSSANNCTFEYVSQPFLMDLEGKQGNFKNLREFVFKNIDGYFKIYSKHTPINLVRDLPQGFSALEPLVDLPIGINITRFQTLLALHRSYLTPGDSSSGWTAGAAAYYVGYLQPRTFLLKYNENGTITDAVDCALDPLSETKCTLKSFTVEKGIYQTSNFRVQPTESIVRFPNITNLCPFGEVFNATRFASVYAWNRKRISNCVADYSVLYNSASFSTFKCYGVSPTKLNDLCFTNVYADSFVIRGDEVRQIAPGQTGKIADYNYKLPDDFTGCVIAWNSNNLDSKVGGNYNYLYRLFRKSNLKPFERDISTEIYQAGSTPCNGVEGFNCYFPLQSYGFQPTNGVGYQPYRVVVLSFELLHAPATVCGPKKSTNLVKNKCVNFNFNGLTGTGVLTESNKKFLPFQQFGRDIADTTDAVRDPQTLEILDITPCSFGGVSVITPGTNTSNQVAVLYQDVNCTEVPVAIHADQLTPTWRVYSTGSNVFQTRAGCLIGAEHVNNSYECDIPIGAGICASYQTQTNSPRRARSVASQSIIAYTMSLGAENSVAYSNNSIAIPTNFTISVTTEILPVSMTKTSVDCTMYICGDSTECSNLLLQYGSFCTQLNRALTGIAVEQDKNTQEVFAQVKQIYKTPPIKDFGGFNFSQILPDPSKPSKRSFIEDLLFNKVTLADAGFIKQYGDCLGDIAARDLICAQKFNGLTVLPPLLTDEMIAQYTSALLAGTITSGWTFGAGAALQIPFAMQMAYRFNGCGVTQNVLYENQKLIANQFNSAIGKIQDSLSSTASALGKLQDVVNQNAQALNTLVKQLSSNFGAISSVLNDILSRLDKVEAEVQIDRLITGRLQSLQTYVTQQLIRAAEIRASANLAATKMSECVLGQSKRVDFCGKGCHLMSFPQSAPHGVVFLHVTYVPAQEKNFTTAPAICHDGKAHFPREGVFVSNGTHWFVTQRNFYEPQIITTDNTFLSGNCDVVIGIVNNTVYDPLQPELDSFKEELDKYFKNHTSPDVDLGDISGINASVVNIQKEIDRLNEVAKNLNESLIDLQELGKYEQYIKGGGGSDIIKLLNEQVNKEMQSSNLYMSMSSWCYTHSLDGAGLFLFDHAAEEYEHAKKLIIFLNENNVPVQLTSISAPEHKFEGLTQIFQKAYEHEQHISESINNIVDHAIKSKDHATFNFLQWYVAEQHEEEVLFKDILDKIELIGNENHGLYLADQYVKGIAKSRKS

SEQ ID NO: 5291 - protein, 1379 aa, Artificial Sequence
  SARS-CoV-2/USA/UT-00034/2020__EPI_ISL_417977 spike protein (1-1211)(I909C_Y1047C) Ferritin construct
MFVFLVLLPLVSSQCVNLTTRTQLPPAYTNSFTRGVYYPDKVFRSSVLHSTQDLFLPFFSNVTWFHAIHVSGTNGTKRFDNPVLPFNDGVYFASTEKSNIIRGWIFGTTLDSKTQSLLIVNNATNVVIKVCEFQFCNDPFLGVYYYKNNKSWMESEFRVYSSANNCTFEYVSQPFLMDLEGKQGNFKNLREFVFKNIDGYFKIYSKHTPINLVRDLPQGFSALEPLVDLPIGINITRFQTLLALHRSYLTPGDSSSGWTAGAAAYYVGYLQPRTFLLKYNENGTITDAVDCALDPLSETKCTLKSFTVEKGIYQTSNFRVQPTESIVRFPNITNLCPFGEVFNATRFASVYAWNRKRISNCVADYSVLYNSASFSTFKCYGVSPTKLNDLCFTNVYADSFVIRGDEVRQIAPGQTGKIADYNYKLPDDFTGCVIAWNSNNLDSKVGGNYNYLYRLFRKSNLKPFERDISTEIYQAGSTPCNGVEGFNCYFPLQSYGFQPTNGVGYQPYRVVVLSFELLHAPATVCGPKKSTNLVKNKCVNFNFNGLTGTGVLTESNKKFLPFQQFGRDIADTTDAVRDPQTLEILDITPCSFGGVSVITPGTNTSNQVAVLYQGVNCTEVPVAIHADQLTPTWRVYSTGSNVFQTRAGCLIGAEHVNNSYECDIPIGAGICASYQTQTNSPRRARSVASQSIIAYTMSLGAENSVAYSNNSIAIPTNFTISVTTEILPVSMTKTSVDCTMYICGDSTECSNLLLQYGSFCTQLNRALTGIAVEQDKNTQEVFAQVKQIYKTPPIKDFGGFNFSQILPDPSKPSKRSFIEDLLFNKVTLADAGFIKQYGDCLGDIAARDLICAQKFNGLTVLPPLLTDEMIAQYTSALLAGTITSGWTFGAGAALQIPFAMQMAYRFNGCGVTQNVLYENQKLIANQFNSAIGKIQDSLSSTASALGKLQDVVNQNAQALNTLVKQLSSNFGAISSVLNDILSRLDKVEAEVQIDRLITGRLQSLQTYVTQQLIRAAEIRASANLAATKMSECVLGQSKRVDFCGKGCHLMSFPQSAPHGVVFLHVTYVPAQEKNFTTAPAICHDGKAHFPREGVFVSNGTHWFVTQRNFYEPQIITTDNTFVSGNCDVVIGIVNNTVYDPLQPELDSFKEELDKYFKNHTSPDVDLGDISGINASVVNIQKEIDRLNEVAKNLNESLIDLQELGKYEQYIKGGGGSDIIKLLNEQVNKEMQSSNLYMSMSSWCYTHSLDGAGLFLFDHAAEEYEHAKKLIIFLNENNVPVQLTSISAPEHKFEGLTQIFQKAYEHEQHISESINNIVDHAIKSKDHATFNFLQWYVAEQHEEEVLFKDILDKIELIGNENHGLYLADQYVKGIAKSRKS

SEQ ID NO: 5292 - protein, 1379 aa, Artificial Sequence
  SARS-CoV-2/USA/UT-00033/2020__EPI_ISL_417976 spike protein (1-1211)(I909C_Y1047C) Ferritin construct
MFVFLVLLPLVSSQCVNLTTRTQLPPAYTNSFTRGVYYPDKVFRSSVLHSTQDLFLPFFSNVTWFHAIHVSGTNGTKRFDNPVLPFNDGVYFASTEKSNIIRGWIFGTTLDSKTQSLLIVNNATNVVIKVCEFQFCNDPFLGVYYHKNNKSWMESEFRVYSSANNCTFEYVSQPFLMDLEGKQGNFKNLREFVFKNIDGYFKIYSKHTPINLVRDLPQGFSALEPLVDLPIGINITRFQTLLALHRSYLTPGDSSSGLTAGAAAYYVGYLQPRTFLLKYNENGTITDAVDCALDPLSETKCTLKSFTVEKGIYQTSNFRVQPTESIVRFPNITNLCPFGEVFNATRFASVYAWNRKRISNCVADYSVLYNSASFSTFKCYGVSPTKLNDLCFTNVYADSFVIRGDEVRQIAPGQTGKIADYNYKLPDDFTGCVIAWNSNNLDSKVGGNYNYLYRLFRKSNLKPFERDISTEIYQAGSTPCNGVEGFNCYFPLQSYGFQPTNGVGYQPYRVVVLSFELLHAPATVCGPKKSTNLVKNKCVNFNFNGLTGTGVLTESNKKFLPFQQFGRDIADTTDAVRDPQTLEILDITPCSFGGVSVITPGTNTSNQVAVLYQGVNCTEVPVAIHADQLTPTWRVYSTGSNVFQTRAGCLIGAEHVNNSYECDIPIGAGICASYQTQTNSPRRARSVASQSIIAYTMSLGAENSVAYSNNSIAIPTNFTISVTTEILPVSMTKTSVDCTMYICGDSTECSNLLLQYGSFCTQLNRALTGIAVEQDKNTQEVFAQVKQIYKTPPIKDFGGFNFSQILPDPSKPSKRSFIEDLLFNKVTLADAGFIKQYGDCLGDIAARDLICAQKFNGLTVLPPLLTDEMIAQYTSALLAGTITSGWTFGAGAALQIPFAMQMAYRFNGCGVTQNVLYENQKLIANQFNSAIGKIQDSLSSTASALGKLQDVVNQNAQALNTLVKQLSSNFGAISSVLNDILSRLDKVEAEVQIDRLITGRLQSLQTYVTQQLIRAAEIRASANLAATKMSECVLGQSKRVDFCGKGCHLMSFPQSAPHGVVFLHVTYVPAQEKNFTTAPAICHDGKAHFPREGVFVSNGTHWFVTQRNFYEPQIITTDNTFVSGNCDVVIGIVNNTVYDPLQPELDSFKEELDKYFKNHTSPDVDLGDISGINASVVNIQKEIDRLNEVAKNLNESLIDLQELGKYEQYIKGGGGSDIIKLLNEQVNKEMQSSNLYMSMSSWCYTHSLDGAGLFLFDHAAEEYEHAKKLIIFLNENNVPVQLTSISAPEHKFEGLTQIFQKAYEHEQHISESINNIVDHAIKSKDHATFNFLQWYVAEQHEEEVLFKDILDKIELIGNENHGLYLADQYVKGIAKSRKS

SEQ ID NO: 5293 - protein, 1379 aa, Artificial Sequence
  SARS-CoV-2/USA/WI-13/2020__EPI_ISL_417516 spike protein (1-1211)(I909C_Y1047C) Ferritin construct
MFVFLVLLPLVSSQCVNLTTRTQLPPAYTNSFTRGVYYPDKVFRSSVLHSTQDLFLPFFSNVTWFHAIHVSGTNGTKRFDNPVLPFNDGVYFASTEKSNIIRGWIFGTTLDSKTQSLLIVNNATNVVIKVCEFQFCNDPFLGVYYHKNNKSWMESEFRVYSSANNCTFEYVSQPFLMDLEGKQGNFKNLREFVFKNIDGYFKIYSKHTPINLVRDLPQGFSALEPLVDLPIGINITRFQTLLALHRSYLTPGDSSSGWTAGAAAYYVGYLQPRTFLLKYNENGTITDAVDCALDPLSETKCTLKSFTVEKGIYQTSNFRVLPTESIVRFPNITNLCPFGEVFNATRFASVYAWNRKRISNCVADYSVLYNSASFSTFKCYGVSPTKLNDLCFTNVYADSFVIRGDEVRQIAPGQTGKIADYNYKLPDDFTGCVIAWNSNNLDSKVGGNYNYLYRLFRKSNLKPFERDISTEIYQAGSTPCNGVEGFNCYFPLQSYGFQPTNGVGYQPYRVVVLSFELLHAPATVCGPKKSTNLVKNKCVNFNFNGLTGTGVLTESNKKFLPFQQFGRDIADTTDAVRDPQTLEILDITPCSFGGVSVITPGTNTSNQVAVLYQGVNCTEVPVAIHADQLTPTWRVYSTGSNVFQTRAGCLIGAEHVNNSYECDIPIGAGICASYQTQTNSPRRARSVASQSIIAYTMSLGAENSVAYSNNSIAIPTNFTISVTTEILPVSMTKTSVDCTMYICGDSTECSNLLLQYGSFCTQLNRALTGIAVEQDKNTQEVFAQVKQIYKTPPIKDFGGFNFSQILPDPSKPSKRSFIEDLLFNKVTLADAGFIKQYGDCLGDIAARDLICAQKFNGLTVLPPLLTDEMIAQYTSALLAGTITSGWTFGAGAALQIPFAMQMAYRFNGCGVTQNVLYENQKLIANQFNSAIGKIQDSLSSTASALGKLQDVVNQNAQALNTLVKQLSSNFGAISSVLNDILSRLDKVEAEVQIDRLITGRLQSLQTYVTQQLIRAAEIRASANLAATKMSECVLGQSKRVDFCGKGCHLMSFPQSAPHGVVFLHVTYVPAQEKNFTTAPAICHDGKAHFPREGVFVSNGTHWFVTQRNFYEPQIITTDNTFVSGNCDVVIGIVNNTVYDPLQPELDSFKEELDKYFKNHTSPDVDLGDISGINASVVNIQKEIDRLNEVAKNLNESLIDLQELGKYEQYIKGGGGSDIIKLLNEQVNKEMQSSNLYMSMSSWCYTHSLDGAGLFLFDHAAEEYEHAKKLIIFLNENNVPVQLTSISAPEHKFEGLTQIFQKAYEHEQHISESINNIVDHAIKSKDHATFNFLQWYVAEQHEEEVLFKDILDKIELIGNENHGLYLADQYVKGIAKSRKS

SEQ ID NO: 5294 - protein, 1378 aa, Artificial Sequence
  SARS-CoV-2/India/1-27/2020__EPI_ISL_413522 spike protein (1-1210)(I908C_Y1046C) Ferritin construct
MFVFLVLLPLVSSQCVNLTTRTQLPPAYTNSFTRGVYYPDKVFRSSVLHSTQDLFLPFFSNVTWFHAIHVSGTNGTKRFDNPVLPFNDGVYFASTEKSNIIRGWIFGTTLDSKTQSLLIVNNATNVVIKVCEFQFCNDPFLGVYHKNNKSWMESEFRVYSSANNCTFEYVSQPFLMDLEGKQGNFKNLREFVFKNIDGYFKIYSKHTPINLVRDLPQGFSALEPLVDLPIGINITRFQTLLALHRSYLTPGDSSSGWTAGAAAYYVGYLQPRTFLLKYNENGTITDAVDCALDPLSETKCTLKSFTVEKGIYQTSNFRVQPTESIVRFPNITNLCPFGEVFNATRFASVYAWNRKRISNCVADYSVLYNSASFSTFKCYGVSPTKLNDLCFTNVYADSFVIRGDEVIQIAPGQTGKIADYNYKLPDDFTGCVIAWNSNNLDSKVGGNYNYLYRLFRKSNLKPFERDISTEIYQAGSTPCNGVEGFNCYFPLQSYGFQPTNGVGYQPYRVVVLSFELLHAPATVCGPKKSTNLVKNKCVNFNFNGLTGTGVLTESNKKFLPFQQFGRDIADTTDAVRDPQTLEILDITPCSFGGVSVITPGTNTSNQVAVLYQDVNCTEVPVAIHADQLTPTWRVYSTGSNVFQTRAGCLIGAEHVNNSYECDIPIGAGICASYQTQTNSPRRARSVASQSIIAYTMSLGAENSVAYSNNSIAIPTNFTISVTTEILPVSMTKTSVDCTMYICGDSTECSNLLLQYGSFCTQLNRALTGIAVEQDKNTQEVFAQVKQIYKTPPIKDFGGFNFSQILPDPSKPSKRSFIEDLLFNKVTLADAGFIKQYGDCLGDIAARDLICAQKFNGLTVLPPLLTDEMIAQYTSALLAGTITSGWTFGAGAALQIPFAMQMAYRFNGCGVTQNVLYENQKLIANQFNSAIGKIQDSLSSTASALGKLQDVVNQNAQALNTLVKQLSSNFGAISSVLNDILSRLDKVEAEVQIDRLITGRLQSLQTYVTQQLIRAAEIRASANLAATKMSECVLGQSKRVDFCGKGCHLMSFPQSAPHGVVFLHVTYVPAQEKNFTTAPAICHDGKAHFPREGVFVSNGTHWFVTQRNFYEPQIITTDNTFVSGNCDVVIGIVNNTVYDPLQPELDSFKEELDKYFKNHTSPDVDLGDISGINASVVNIQKEIDRLNEVAKNLNESLIDLQELGKYEQYIKGGGGSDIIKLLNEQVNKEMQSSNLYMSMSSWCYTHSLDGAGLFLFDHAAEEYEHAKKLIIFLNENNVPVQLTSISAPEHKFEGLTQIFQKAYEHEQHISESINNIVDHAIKSKDHATFNFLQWYVAEQHEEEVLFKDILDKIELIGNENHGLYLADQYVKGIAKSRKS

SEQ ID NO: 5295 - protein, 1373 aa, Artificial Sequence
  SARS-CoV-2/pangolin/Guangxi/P4L/2017__EPI_ISL_410538 spike protein (1-1205)(I903C_Y1041C) Ferritin construct
MFVFLFVLPLVSSQCVNLTTRTGIPPGYTNSSTRGVYYPDKVFRSSILHLTQDLFLPFFSNVTWFNTINYQGGFKKFDNPVLPFNDGVYFASTEKSNIIRGWIFGTTLDARTQSLLIVNNATNVVIKVCEFQFCTDPFLGVYYHNNNKTWVENEFRVYSSANNCTFEYISQPFLMDLEGKQGNFKNLREFVFKNVDGYFKIYSKHTPIDLVRDLPRGFAALEPLVDLPIGINITRFQTLLALHRSYLTPGNLESGWTTGAAAYYVGYLQQRTFLLSYNQNGTITDAVDCSLDPLSETKCTLKSLTVEKGIYQTSNFRVQPTISIVRFPNITNLCPFGEVFNASKFASVYAWNRKRISNCVADYSVLYNSTSFSTFKCYGVSPTKLNDLCFTNVYADSFVVKGDEVRQIAPGQTGVIADYNYKLPDDFTGCVIAWNSVKQDALTGGNYGYLYRLFRKSKLKPFERDISTEIYQAGSTPCNGQVGLNCYYPLERYGFHPTTGVNYQPFRVVVLSFELLNGPATVCGPKLSTTLVKDKCVNFNFNGLTGTGVLTTSKKQFLPFQQFGRDISDTTDAVRDPQTLEILDITPCSFGGVSVITPGTNTSNQVAVLYQDVNCTEVPMAIHAEQLTPAWRVYSAGANVFQTRAGCLVGAEHVNNSYECDIPVGAGICASYHSMSSLRSVNQRSIIAYTMSLGAENSVAYSNNSIAIPTNFTISVTTEILPVSMTKTSVDCTMYICGDSIECSNLLLQYGSFCTQLNRALTGIAVEQDKNTQEVFAQVKQIYKTPPIKDFGGFNFSQILPDPSKPSKRSFIEDLLFNKVTLADAGFIKQYGDCLGDIAARDLICAQKFNGLTVLPPLLTDEMIAQYTSALLAGTITSGWTFGAGAALQIPFAMQMAYRFNGCGVTQNVLYENQKLIANQFNSAIGKIQDSLSSTASALGKLQDVVNQNAQALNTLVKQLSSNFGAISSVLNDILSRLDKVEAEVQIDRLITGRLQSLQTYVTQQLIRAAEIRASANLAATKMSECVLGQSKRVDFCGKGCHLMSFPQSAPHGVVFLHVTYVPAQEKNFTTAPAICHEGKAHFPREGVFVSNGTHWFITQRNFYEPQIITTDNTFVSGSCDVVIGIVNNTVYDPLQPELDSFKEELDKYFKNHTSPDVDLGDISGINASVVNIQKEIDRLNEVAKNLNESPIDLQELGKYEQYIKGGGGSDIIKLLNEQVNKEMQSSNLYMSMSSWCYTHSLDGAGLFLFDHAAEEYEHAKKLIIFLNENNVPVQLTSISAPEHKFEGLTQIFQKAYEHEQHISESINNIVDHAIKSKDHATFNFLQWYVAEQHEEEVLFKDILDKIELIGNENHGLYLADQYVKGIAKSRKS

SEQ ID NO: 5296 - protein, 1373 aa, Artificial Sequence
  SARS-CoV-2/pangolin/Guangxi/P5L/2017__EPI_ISL_410540 spike protein (1-1205)(I903C_Y1041C) Ferritin construct
MFVFLFVLPLVSSQCVNLTTRTGIPPGYTNSSTRGVYYPDKVFRSSILHLTQDLFLPFFSNVTWFNTINYQGGFKKFDNPVLPFNDGVYFASTEKSNIIRGWIFGTTLDARTQSLLIVNNATNVVIKVCEFQFCTDPFLGVYYHNNNKTWVENEFRVYSSANNCTFEYISQPFLMDLEGKQGNFKNLREFVFKNVDGYFKIYSKHTPIDLVRDLPRGFAALEPLVDLPIGINITRFQTLLALHRSYLTPGKLESGWTTGAAAYYVGYLQQRTFLLSYNQNGTITDAVDCSLDPLSETKCTLKSLTVEKGIYQTSNFRVQPTISIVRFPNITNLCPFGEVFNASKFASVYAWNRKRISNCVADYSVLYNSTSFSTFKCYGVSPTKLNDLCFTNVYADSFVVKGDEVRQIAPGQTGVIADYNYKLPDDFTGCVIAWNSVKQDALTGGNYGYLYRLFRKSKLKPFERDISTEIYQAGSTPCNGQVGLNCYYPLERYGFHPTTGVNYQPFRVVVLSFELLNGPATVCGPKLSTTLVKDKCVNFNFNGLTGTGVLTTSKKQFLPFQQFGRDISDTTDAVRDPQTLEILDITPCSFGGVSVITPGTNTSNQVAVLYQDVNCTEVPMAIHAEQLTPAWRVYSAGANVFQTRAGCLVGAEHVNNSYECDIPVGAGICASYHSMSSFRSVNQRSIIAYTMSLGAENSVAYSNNSIAIPTNFTISVTTEILPVSMTKTSVDCTMYICGDSIECSNLLLQYGSFCTQLNRALTGIAVEQDKNTQEVFAQVKQIYKTPPIKDFGGFNFSQILPDPSKPSKRSFIEDLLFNKVTLADAGFIKQYGDCLGDIAARDLICAQKFNGLTVLPPLLTDEMIAQYTSALLAGTITSGWTFGAGAALQIPFAMQMAYRFNGCGVTQNVLYENQKLIANQFNSAIGKIQDSLSSTASALGKLQDVVNQNAQALNTLVKQLSSNFGAISSVLNDILSRLDKVEAEVQIDRLITGRLQSLQTYVTQQLIRAAEIRASANLAATKMSECVLGQSKRVDFCGKGCHLMSFPQSAPHGVVFLHVTYVPAQEKNFTTAPAICHEGKAHFPREGVFVSNGTHWFITQRNFYEPQIITTDNTFVSGSCDVVIGIVNNTVYDPLQPELDSFKEELDKYFKNHTSPDVDLGDISGINASVVNIQKEIDRLNEVAKNLNESLIDLQELGKYEQYIKGGGGSDIIKLLNEQVNKEMQSSNLYMSMSSWCYTHSLDGAGLFLFDHAAEEYEHAKKLIIFLNENNVPVQLTSISAPEHKFEGLTQIFQKAYEHEQHISESINNIVDHAIKSKDHATFNFLQWYVAEQHEEEVLFKDILDKIELIGNENHGLYLADQYVKGIAKSRKS

SEQ ID NO: 5297 - protein, 1373 aa, Artificial Sequence
  SARS-CoV-2/pangolin/Guangxi/P5E/2017__EPI_ISL_410541 spike protein (1-1205)(I903C_Y1041C) Ferritin construct
MFVFLFVLPLVSSQCVNLTTRTGIPPGYTNSSTRGVYYPDKVFRSSILHLTQDLFLPFFSNVTWFNTITYQGGSKKFDNPVLPFNDGVYFASTEKSNIIRGWIFGTTLDARTQSLLIVNNATNVVIKVCEFQFCTDPFLGVYYHNNNKTWVENEFRVYSSANNCTFEYISQPFLMDLEGKQGNFKNLREFVFKNVDGYFKIYSKHTPIDLVRDLPRGFAALEPLVDLPIGINITRFQTLLALHRSYLTPGKLESGWTTGAAAYYVGYLQQRTFLLSYNQNGTITDAVDCSLDPLSETKCTLKSLTVEKGIYQTSNFRVQPTISIVRFPNITNLCPFGEVFNASKFASVYAWNRKRISNCVADYSVLYNSTSFSTFKCYGVSPTKLNDLCFTNVYADSFVVKGDEVRQIAPGQTGVIADYNYKLPDDFTGCVIAWNSVKQDALTGDNYGYLYRLFRKSKLKPFERDISTEIYQAGSTPCNGQVGLNCYYPLERYGFHPTTGVNYQPFRVVVLSFELLNGPATVCGPKLSTTLVKDKCVNFNFNGLTGTGVLTTSKKQFLPFQQFGRDISDTTDAVRDPQTLEILDITPCSFGGVSVITPGTNTSNQVAVLYQDVNCTEVPMAIHAEQLTPAWRVYSAGANVFQTRAGCLVGAEHVNNSYECDIPVGAGICASYHSMSSFRSVNQRSIIAYTMSLGAENSVAYSNNSIAIPTNFTISVTTEILPVSMTKTSVDCTMYICGDSIECSNLLLQYGSFCTQLNRALTGIAVEQDKNTQEVFAQVKQIYKTPPIKDFGGFNFSQILPDPSKPSKRSFIEDLLFNKVTLADAGFIKQYGDCLGDIAARDLICAQKFNGLTVLPPLLTDEMIAQYTSALLAGTITSGWTFGAGAALQIPFAMQMAYRFNGCGVTQNVLYENQKLIANQFNSAIGKIQDSLSSTASALGKLQDVVNQNAQALNTLVKQLSSNFGAISSVLNDILSRLDKVEAEVQIDRLITGRLQSLQTYVTQQLIRAAEIRASANLAATKMSECVLGQSKRVDFCGKGCHLMSFPQSAPHGVVFLHVTYVPAQEKNFTTAPAICHEGKAHFPREGVFVSNGTHWFITQRNFYEPQIITTDNTFVSGSCDVVIGIVNNTVYDPLQPELDSFKEELDKYFKNHTSPDVDLGDISGINASVVNIQKEIDRLNEVAKNLNESLIDLQELGKYEQYIKGGGGSDIIKLLNEQVNKEMQSSNLYMSMSSWCYTHSLDGAGLFLFDHAAEEYEHAKKLIIFLNENNVPVQLTSISAPEHKFEGLTQIFQKAYEHEQHISESINNIVDHAIKSKDHATFNFLQWYVAEQHEEEVLFKDILDKIELIGNENHGLYLADQYVKGIAKSRKS

SEQ ID NO: 5298 - protein, 1371 aa, Artificial Sequence
  SARS-CoV-2/pangolin/Guangxi/P1E/2017__EPI_ISL_410539 spike protein (1-1203)(I901C_Y1039C) Ferritin construct
MFVFLFVLPLVSSQCVNLTTRTGIQPGYTNSSTRGVYYPDKVFRSSILHLTQDLFLPFFSNVTWFNTINYQGGFKKFDNPVLPFNDGVYFASTEKSNIIRGWIFGTTLDARTQSLLIVNNATNVVIKVCEFQFCTDPFLGVYYHNNNKTWVENEFRVYSSANNCTFEYISQPFLMDLEGKQGNFKNLREFVFKNVDGYFKIYSKHTPIDLVRDLPRGFAALEPLVDLPIGINITRFQTLLALHRSYLTPGKLESGWTTGAAAYYVGYLQQRTFLLSYNQNGTITDAVDCSLDPLSETKCTLKSLTVEKGIYQTSNFRVQPTISIVRFPNITNLCPFGEVFNASKFASVYAWNRKRISNCVADYSVLYNSTSFSTFKCYGVSPTKLNDLCFTNVYADSFVVKGDEVRQIAPGQTGVIADYNYKLPDDFTGCVIAWNSVKQDALTGGNYLYRLFRKSKLKPFERDISTEIYQAGSTPCNGQVGLNCYYPLERYGFHPTTGVNYQPFRVVVLSFELLNGPATVCGPKLSTTLVKDKCVNFNFNGLTGTGVLTTSKKQFLPFQQFGRDISDTTDAVRDPQTLEILDITPCSFGGVSVITPGTNTSNQVAVLYQDVNCTEVPMAIHAEQLTPAWRVYSAGANVFQTRAGCLVGAEHVNNSYECDIPVGAGICASYHSMSSLRSVNQRSIIAYTMSLGAENSVAYSNNSIAIPTNFTISVTTEILPVSMTKTSVDCTMYICGDSIECSNLLLQYGSFCTQLNRALTGIAVEQDKNTQEVFAQVKQIYKTPPIKDFGGFNFSQILPDPSKPSKRSFIEDLLFNKVTLADAGFIKQYGDCLGDIAARDLICAQKFNGLTVLPPLLTDEMIAQYTSALLAGTITSGWTFGAGAALQIPFAMQMAYRFNGCGVTQNVLYENQKLIANQFNSAIGKIQDSLSSTASALGKLQDVVNQNAQALNTLVKQLSSNFGAISSVLNDILSRLDKVEAEVQIDRLITGRLQSLQTYVTQQLIRAAEIRASANLAATKMSECVLGQSKRVDFCGKGCHLMSFPQSAPHGVVFLHVTYVPAQEKNFTTAPAICHEGKAHFPREGVFVSNGTHWFITQRNFYEPQIITTDNTFVSGSCDVVIGIVNNTVYDPLQPELDSFKEELDKYFKNHTSPDVDLGDISGINASVVNIQKEIDRLNEVAKNLNESLIDLQELGKYEQYIKGGGGSDIIKLLNEQVNKEMQSSNLYMSMSSWCYTHSLDGAGLFLFDHAAEEYEHAKKLIIFLNENNVPVQLTSISAPEHKFEGLTQIFQKAYEHEQHISESINNIVDHAIKSKDHATFNFLQWYVAEQHEEEVLFKDILDKIELIGNENHGLYLADQYVKGIAKSRKS

SEQ ID NO: 5299 - protein, 1379 aa, Artificial Sequence
  SARS-CoV-2/Wuhan/WIV05/2019__EPI_ISL_402128 spike protein (1-1211)(Q965C_S1003C) Ferritin construct
MFVFLVLLPLVSSQCVNLTTRTQLPPAYTNSFTRGVYYPDKVFRSSVLHSTQDLFLPFFSNVTWFHAIHVSGTNGTKRFDNPVLPFNDGVYFASTEKSNIIRGWIFGTTLDSKTQSLLIVNNATNVVIKVCEFQFCNDPFLGVYYHKNNKSWMESEFRVYSSANNCTFEYVSQPFLMDLEGKQGNFKNLREFVFKNIDGYFKIYSKHTPINLVRDLPQGFSALEPLVDLPIGINITRFQTLLALHRSYLTPGDSSSGWTAGAAAYYVGYLQPRTFLLKYNENGTITDAVDCALDPLSETKCTLKSFTVEKGIYQTSNFRVQPTESIVRFPNITNLCPFGEVFNATRFASVYAWNRKRISNCVADYSVLYNSASFSTFKCYGVSPTKLNDLCFTNVYADSFVIRGDEVRQIAPGQTGKIADYNYKLPDDFTGCVIAWNSNNLDSKVGGNYNYLYRLFRKSNLKPFERDISTEIYQAGSTPCNGVEGFNCYFPLQSYGFQPTNGVGYQPYRVVVLSFELLHAPATVCGPKKSTNLVKNKCVNFNFNGLTGTGVLTESNKKFLPFQQFGRDIADTTDAVRDPQTLEILDITPCSFGGVSVITPGTNTSNQVAVLYQDVNCTEVPVAIHADQLTPTWRVYSTGSNVFQTRAGCLIGAEHVNNSYECDIPIGAGICASYQTQTNSPRRARSVASQSIIAYTMSLGAENSVAYSNNSIAIPTNFTISVTTEILPVSMTKTSVDCTMYICGDSTECSNLLLQYGSFCTQLNRALTGIAVEQDKNTQEVFAQVKQIYKTPPIKDFGGFNFSQILPDPSKPSKRSFIEDLLFNKVTLADAGFIKQYGDCLGDIAARDLICAQKFNGLTVLPPLLTDEMIAQYTSALLAGTITSGWTFGAGAALQIPFAMQMAYRFNGIGVTQNVLYENQKLIANQFNSAIGKIQDSLSSTASALGKLQDVVNQNAQALNTLVKCLSSNFGAISSVLNDILSRLDKVEAEVQIDRLITGRLQCLQTYVTQQLIRAAEIRASANLAATKMSECVLGQSKRVDFCGKGYHLMSFPQSAPHGVVFLHVTYVPAQEKNFTTAPAICHDGKAHFPREGVFVSNGTHWFVTQRNFYEPQIITTDNTFVSGNCDVVIGIVNNTVYDPLQPELDSFKEELDKYFKNHTSPDVDLGDISGINASVVNIQKEIDRLNEVAKNLNESLIDLQELGKYEQYIKGGGGSDIIKLLNEQVNKEMQSSNLYMSMSSWCYTHSLDGAGLFLFDHAAEEYEHAKKLIIFLNENNVPVQLTSISAPEHKFEGLTQIFQKAYEHEQHISESINNIVDHAIKSKDHATFNFLQWYVAEQHEEEVLFKDILDKIELIGNENHGLYLADQYVKGIAKSRKS

SEQ ID NO: 5300 - protein, 1375 aa, Artificial Sequence
  SARS-CoV-2/bat/Yunnan/RaTG13/2013__EPI_ISL_402131 spike protein (1-1207)(Q961C_S999C) Ferritin construct
MFVFLVLLPLVSSQCVNLTTRTQLPPAYTNSSTRGVYYPDKVFRSSVLHLTQDLFLPFFSNVTWFHAIHVSGTNGIKRFDNPVLPFNDGVYFASTEKSNIIRGWIFGTTLDSKTQSLLIVNNATNVVIKVCEFQFCNDPFLGVYYHKNNKSWMESEFRVYSSANNCTFEYVSQPFLMDLEGKQGNFKNLREFVFKNIDGYFKIYSKHTPINLVRDLPPGFSALEPLVDLPIGINITRFQTLLALHRSYLTPGDSSSGWTAGAAAYYVGYLQPRTFLLKYNENGTITDAVDCALDPLSETKCTLKSFTVEKGIYQTSNFRVQPTDSIVRFPNITNLCPFGEVFNATTFASVYAWNRKRISNCVADYSVLYNSTSFSTFKCYGVSPTKLNDLCFTNVYADSFVITGDEVRQIAPGQTGKIADYNYKLPDDFTGCVIAWNSKHIDAKEGGNFNYLYRLFRKANLKPFERDISTEIYQAGSKPCNGQTGLNCYYPLYRYGFYPTDGVGHQPYRVVVLSFELLNAPATVCGPKKSTNLVKNKCVNFNFNGLTGTGVLTESNKKFLPFQQFGRDIADTTDAVRDPQTLEILDITPCSFGGVSVITPGTNASNQVAVLYQDVNCTEVPVAIHADQLTPTWRVYSTGSNVFQTRAGCLIGAEHVNNSYECDIPIGAGICASYQTQTNSRSVASQSIIAYTMSLGAENSVAYSNNSIAIPTNFTISVTTEILPVSMTKTSVDCTMYICGDSTECSNLLLQYGSFCTQLNRALTGIAVEQDKNTQEVFAQVKQIYKTPPIKDFGGFNFSQILPDPSKPSKRSFIEDLLFNKVTLADAGFIKQYGDCLGDIAARDLICAQKFNGLTVLPPLLTDEMIAQYTSALLAGTITSGWTFGAGAALQIPFAMQMAYRFNGIGVTQNVLYENQKLIANQFNSAIGKIQDSLSSTASALGKLQDVVNQNAQALNTLVKCLSSNFGAISSVLNDILSRLDKVEAEVQIDRLITGRLQCLQTYVTQQLIRAAEIRASANLAATKMSECVLGQSKRVDFCGKGYHLMSFPQSAPHGVVFLHVTYVPAQEKNFTTAPAICHDGKAHFPREGVFVSNGTHWFVTQRNFYEPQIITTDNTFVSGSCDVVIGIVNNTVYDPLQPELDSFKEELDKYFKNHTSPDVDLGDISGINASVVNIQKEIDRLNEVAKNLNESLIDLQELGKYEQYIKGGGGSDIIKLLNEQVNKEMQSSNLYMSMSSWCYTHSLDGAGLFLFDHAAEEYEHAKKLIIFLNENNVPVQLTSISAPEHKFEGLTQIFQKAYEHEQHISESINNIVDHAIKSKDHATFNFLQWYVAEQHEEEVLFKDILDKIELIGNENHGLYLADQYVKGIAKSRKS

SEQ ID NO: 5301 - protein, 1379 aa, Artificial Sequence
  SARS-CoV-2/Wuhan/HBCDC-HB-01/2019__EPI_ISL_402132 spike protein (1-1211)(Q965C_S1003C) Ferritin construct
MFVFLVLLPLVSSQCVNLTTRTQLPPAYTNSITRGVYYPDKVFRSSVLHSTQDLFLPFFSNVTWFHAIHVSGTNGTKRFDNPVLPFNDGVYFASTEKSNIIRGWIFGTTLDSKTQSLLIVNNATNVVIKVCEFQFCNDPFLGVYYHKNNKSWMESEFRVYSSANNCTFEYVSQPFLMDLEGKQGNFKNLREFVFKNIDGYFKIYSKHTPINLVRDLPQGFSALEPLVDLPIGINITRFQTLLALHRSYLTPGDSSSGWTAGAAAYYVGYLQPRTFLLKYNENGTITDAVDCALDPLSETKCTLKSFTVEKGIYQTSNFRVQPTESIVRFPNITNLCPFGEVFNATRFASVYAWNRKRISNCVADYSVLYNSASFSTFKCYGVSPTKLNDLCFTNVYADSFVIRGDEVRQIAPGQTGKIADYNYKLPDDFTGCVIAWNSNNLDSKVGGNYNYLYRLFRKSNLKPFERDISTEIYQAGSTPCNGVEGFNCYFPLQSYGFQPTNGVGYQPYRVVVLSFELLHAPATVCGPKKSTNLVKNKCVNFNFNGLTGTGVLTESNKKFLPFQQFGRDIADTTDAVRDPQTLEILDITPCSFGGVSVITPGTNTSNQVAVLYQDVNCTEVPVAIHADQLTPTWRVYSTGSNVFQTRAGCLIGAEHVNNSYECDIPIGAGICASYQTQTNSPRRARSVASQSIIAYTMSLGAENSVAYSNNSIAIPTNFTISVTTEILPVSMTKTSVDCTMYICGDSTECSNLLLQYGSFCTQLNRALTGIAVEQDKNTQEVFAQVKQIYKTPPIKDFGGFNFSQILPDPSKPSKRSFIEDLLFNKVTLADAGFIKQYGDCLGDIAARDLICAQKFNGLTVLPPLLTDEMIAQYTSALLAGTITSGWTFGAGAALQIPFAMQMAYRFNGIGVTQNVLYENQKLIANQFNSAIGKIQDSLSSTASALGKLQDVVNQNAQALNTLVKCLSSNFGAISSVLNDILSRLDKVEAEVQIDRLITGRLQCLQTYVTQQLIRAAEIRASANLAATKMSECVLGQSKRVDFCGKGYHLMSFPQSAPHGVVFLHVTYVPAQEKNFTTAPAICHDGKAHFPREGVFVSNGTHWFVTQRNFYEPQIITTDNTFVSGNCDVVIGIVNNTVYDPLQPELDSFKEELDKYFKNHTSPDVDLGDISGINASVVNIQKEIDRLNEVAKNLNESLIDLQELGKYEQYIKGGGGSDIIKLLNEQVNKEMQSSNLYMSMSSWCYTHSLDGAGLFLFDHAAEEYEHAKKLIIFLNENNVPVQLTSISAPEHKFEGLTQIFQKAYEHEQHISESINNIVDHAIKSKDHATFNFLQWYVAEQHEEEVLFKDILDKIELIGNENHGLYLADQYVKGIAKSRKS

SEQ ID NO: 5302 - protein, 1379 aa, Artificial Sequence
  SARS-CoV-2/Guangdong/20SF028/2020__EPI_ISL_403936 spike protein (1-1211)(Q965C_S1003C) Ferritin construct
MFVFLVLLPLVSSQCVNLTTRTQLPPAYTNSFTRGVYYPDKVFRSSVLYSTQDLFLPFFSNVTWFHAIHVSGTNGTKRFDNPVLPFNDGVYFASTEKSNIIRGWIFGTTLDSKTQSLLIVNNATNVVIKVCEFQFCNDPFLGVYYHKNNKSWMESEFRVYSSANNCTFEYVSQPFLMDLEGKQGNFKNLREFVFKNIDGYFKIYSKHTPINLVRDLPQGFSALEPLVDLPIGINITRFQTLLALHRSYLTPGDSSSGWTAGAAAYYVGYLQPRTFLLKYNENGTITDAVDCALDPLSETKCTLKSFTVEKGIYQTSNFRVQPTESIVRFPNITNLCPFGEVFNATRFASVYAWNRKRISNCVADYSVLYNSASFSTFKCYGVSPTKLNDLCFTNVYADSFVIRGDEVRQIAPGQTGKIADYNYKLPDDFTGCVIAWNSNNLDSKVGGNYNYLYRLFRKSNLKPFERDISTEIYQAGSTPCNGVEGFNCYFPLQSYGFQPTNGVGYQPYRVVVLSFELLHAPATVCGPKKSTNLVKNKCVNFNFNGLTGTGVLTESNKKFLPFQQFGRDIADTTDAVRDPQTLEILDITPCSFGGVSVITPGTNTSNQVAVLYQDVNCTEVPVAIHADQLTPTWRVYSTGSNVFQTRAGCLIGAEHVNNSYECDIPIGAGICASYQTQTNSPRRARSVASQSIIAYTMSLGAENSVAYSNNSIAIPTNFTISVTTEILPVSMTKTSVDCTMYICGDSTECSNLLLQYGSFCTQLNRALTGIAVEQDKNTQEVFAQVKQIYKTPPIKDFGGFNFSQILPDPSKPSKRSFIEDLLFNKVTLADAGFIKQYGDCLGDIAARDLICAQKFNGLTVLPPLLTDEMIAQYTSALLAGTITSGWTFGAGAALQIPFAMQMAYRFNGIGVTQNVLYENQKLIANQFNSAIGKIQDSLSSTASALGKLQDVVNQNAQALNTLVKCLSSNFGAISSVLNDILSRLDKVEAEVQIDRLITGRLQCLQTYVTQQLIRAAEIRASANLAATKMSECVLGQSKRVDFCGKGYHLMSFPQSAPHGVVFLHVTYVPAQEKNFTTAPAICHDGKAHFPREGVFVSNGTHWFVTQRNFYEPQIITTDNTFVSGNCDVVIGIVNNTVYDPLQPELDSFKEELDKYFKNHTSPDVDLGDISGINASVVNIQKEIDRLNEVAKNLNESLIDLQELGKYEQYIKGGGGSDIIKLLNEQVNKEMQSSNLYMSMSSWCYTHSLDGAGLFLFDHAAEEYEHAKKLIIFLNENNVPVQLTSISAPEHKFEGLTQIFQKAYEHEQHISESINNIVDHAIKSKDHATFNFLQWYVAEQHEEEVLFKDILDKIELIGNENHGLYLADQYVKGIAKSRKS

SEQ ID NO: 5303 - protein, 1379 aa, Artificial Sequence
  SARS-CoV-2/Shenzhen/SZTH-001/2020__EPI_ISL_406592 spike protein (1-1211)(Q965C_S1003C) Ferritin construct
MFVFLVLLPLVSSQCVNLTTRTQLPPAYTNSFTRGVYYPDKVFRSSVLHSTQDLFLPFFSNVTWFHAIHVSGTNGTKRFDNPVLPFNDGVYFASTEKSNIIRGWIFGTTLDSKTQSLLIVNNATNVVIKVCEFQFCNDPFLGVYYHKNNKSWMESEFRVYSSANNCTFEYVSQPFLMDLEGKQGNFKNLREFVFKNIDGYFKIYSKHTPINLVRDLPQGFSALEPLVDLPIGINITRFQTLLALHRSYLTPGDSSSGWTAGAAAYYVGYLQPRTFLLKYNENGTITDAVDCALDPLSETKCTLKSFTVEKGIYQTSNFRVQPTESIVRFPNITNLCPFGEVFNATRFASVYAWNRKRISNCVADYSVLYNSASFSTFKCYGVSPTKLNDLCFTNVYADSFVIRGDEVRQIAPGQTGKIADYNYKLPDDFTGCVIAWNSNNLDSKVGGNYNYLYRLFRKSNLKPFERDISTEIYQAGSTPCNGVEGFNCYFPLQSYGFQPTNGVGYQPYRVVVLSFELLHAPATVCGPKKSTNLVKNKCVNFNFNGLTGTGVLTESNKKFLPFQQFGRDIADTTDAVRDPQTLEILDITPCSFGGVSVITPGTNTSNQVAVLYQDVNCTEVPVAIHADQLTPTWRVYSTGSNVFQTRAGCLIGAEHVNNSYECDIPIGAGICASYQTQTNSPRRARSVASQSIIAYTMSLGAENSVAYSNNSIAIPTNFTISVTTEILPVSMTKTSVDCTMYICGDSTECSNLLLQYGSFCTQLNRALTGIAVEQDKNTQEVFAQVKQIYKTPPIKDFGGFNFSQILPDPSKPSKRSFIEDLLFNKVTLADAGFIKQYGDCLGDIAARDLICAQKFNGLTVLPPLLTDEMIAQYTSALLAGTITSGWTFGAGAALQIPFAMQMAYRFNGIGVTQNVLYENQKLIANQFNSAIGKIQDSLSSTASALGKLQDVVNQNAQALNTLVKCLSSNFGAISSVLNDILSRLDKVEAEVQIDRLITGRLQCLQTYVTQQLIRAAEIRASANLAATKMSECVLGQSKRVDFCGKGYHLMSFPQSAPHGVVFLHVTYVPAQEKNFTTAPAICHDGKAHFPREGVFVSNGTHWFVTQRNFYEPQIITTDNTFVSGNCDVLIGIVNNTVYDPLQPELDSFKEELDKYFKNHTSPDVDLGDISGINASVVNIQKEIDRLNEVAKNLNESLIDLQELGKYEQYIKGGGGSDIIKLLNEQVNKEMQSSNLYMSMSSWCYTHSLDGAGLFLFDHAAEEYEHAKKLIIFLNENNVPVQLTSISAPEHKFEGLTQIFQKAYEHEQHISESINNIVDHAIKSKDHATFNFLQWYVAEQHEEEVLFKDILDKIELIGNENHGLYLADQYVKGIAKSRKS

SEQ ID NO: 5304 - protein, 1379 aa, Artificial Sequence
  SARS-CoV-2/Shenzhen/SZTH-004/2020__EPI_ISL_406595 spike protein (1-1211)(Q965C_S1003C) Ferritin construct
MFVFLVLLPLVSSQCVNLTTRTQLPPAYTNSFTRGVYYPDKVFRSSVLHSTQDLFLPFFSNVTWFHAIHVSGTNGTKRFDNPVLPFNDGVYFASTEKSNIIRGWIFGTTLDSKTQSLLIVNNATNVVIKVCEFQFCNDPFLGVYYHKNNKSWMESEFRVYSSANNCTFEYVSQPFLMDLEGKQGNFKNLREFVFKNIDGYFKIYSKHTPINLVRDLPQGFSALEPLVDLPIGINITRFQTLLALHRSYLTPGDSSSGWTAGAAAYYVGYLQPRTFLLKYNENGTITDAVDCALDPLSETKCTLKSFTVEKGIYQTSNFRVQPTESIVRFPNITNLCPFGEVFNATRFASVYAWDRKRISNCVAYYSVLYNSASFSTFKCYGVSPTKLNDLCFTNVYADSFVIRGDEVRQIAPGQTGKIADYNYKLPDDFTGCVIAWNSNNLDSKVGGNYNYLYRLFRKSNLKPFERDISTEIYQAGSTPCNGVEGFNCYFPLQSYGFQPTNGVGYQPYRVVVLSFELLHAPATVCGPKKSTNLVKNKCVNFNFNGLTGTGVLTESNKKFLPFQQFGRDIADTTDAVRDPQTLEILDITPCSFGGVSVITPGTNTSNQVAVLYQDVNCTEVPVAIHADQLTPTWRVYSTGSNVFQTRAGCLIGAEHVNNSYECDIPIGAGICASYQTQTNSPRRARSVASQSIIAYTMSLGAENSVAYSNNSIAIPTNFTISVTTEILPVSMTKTSVDCTMYICGDSTECSNLLLQYGSFCTQLNRALTGIAVEQDKNTQEVFAQVKQIYKTPPIKDFGGFNFSQILPDPSKPSKRSFIEDLLFNKVTLADAGFIKQYGDCLGDIAARDLICAQKFNGLTVLPPLLTDEMIAQYTSALLAGTITSGWTFGAGAALQIPFAMQMAYRFNGIGVTQNVLYENQKLIANQFNSAIGKIQDSLSSTASALGKLQDVVNQNAQALNTLVKCLSSNFGAISSVLNDILSRLDKVEAEVQIDRLITGRLQCLQTYVTQQLIRAAEIRASANLAATKMSECVLGQSKRVDFCGKGYHLMSFPQSAPHGVVFLHVTYVPAQEKNFTTAPAICHDGKAHFPREGVFVSNGTHWFVTQRNFYEPQIITTDNTFVSGNCDVVIGIVNNTVYDPLQPELDSFKEELDKYFKNHTSPDVDLGDISGINASVVNIQKEIDRLNEVAKNLNESLIDLQELGKYEQYIKGGGGSDIIKLLNEQVNKEMQSSNLYMSMSSWCYTHSLDGAGLFLFDHAAEEYEHAKKLIIFLNENNVPVQLTSISAPEHKFEGLTQIFQKAYEHEQHISESINNIVDHAIKSKDHATFNFLQWYVAEQHEEEVLFKDILDKIELIGNENHGLYLADQYVKGIAKSRKS

SEQ ID NO: 5305 - protein, 1379 aa, Artificial Sequence
  SARS-CoV-2/France/IDF0372/2020__EPI_ISL_406596 spike protein (1-1211)(Q965C_S1003C) Ferritin construct
MFVFLVLLPLVSSQCVNLTTRTQLPPAYTNSFTRGVYYPDKVFRSSVLHSTQDLFLPFFSNVTWFHAIHVSGTNGTKRFDNPVLPFNDGVYFASTEKSNIIRGWIFGTTLDSKTQSLLIVNNATNVVIKVCEFQFCNDPFLGVYYHKNNKSWMESEFRVYSSANNCTFEYVSQPFLMDLEGKQGNFKNLREFVFKNIDGYFKIYSKHTPINLVRDLPQGFSALEPLVDLPIGINITRFQTLLALHRSYLTPGDSSSGWTAGAAAYYVGYLQPRTFLLKYNENGTITDAVDCALDPLSETKCTLKSFTVEKGIYQTSNFRVQPTESIVRFPNITNLCPFGEVFNATRFASVYAWNRKRISNCVADYSFLYNSASFSTFKCYGVSPTKLNDLCFTNVYADSFVIRGDEVRQIAPGQTGKIADYNYKLPDDFTGCVIAWNSNNLDSKVGGNYNYLYRLFRKSNLKPFERDISTEIYQAGSTPCNGVEGFNCYFPLQSYGFQPTNGVGYQPYRVVVLSFELLHAPATVCGPKKSTNLVKNKCVNFNFNGLTGTGVLTESNKKFLPFQQFGRDIADTTDAVRDPQTLEILDITPCSFGGVSVITPGTNTSNQVAVLYQDVNCTEVPVAIHADQLTPTWRVYSTGSNVFQTRAGCLIGAEHVNNSYECDIPIGAGICASYQTQTNSPRRARSVASQSIIAYTMSLGAENSVAYSNNSIAIPTNFTISVTTEILPVSMTKTSVDCTMYICGDSTECSNLLLQYGSFCTQLNRALTGIAVEQDKNTQEVFAQVKQIYKTPPIKDFGGFNFSQILPDPSKPSKRSFIEDLLFNKVTLADAGFIKQYGDCLGDIAARDLICAQKFNGLTVLPPLLTDEMIAQYTSALLAGTITSGWTFGAGAALQIPFAMQMAYRFNGIGVTQNVLYENQKLIANQFNSAIGKIQDSLSSTASALGKLQDVVNQNAQALNTLVKCLSSNFGAISSVLNDILSRLDKVEAEVQIDRLITGRLQCLQTYVTQQLIRAAEIRASANLAATKMSECVLGQSKRVDFCGKGYHLMSFPQSAPHGVVFLHVTYVPAQEKNFTTAPAICHDGKAHFPREGVFVSNGTHWFVTQRNFYEPQIITTDNTFVSGNCDVVIGIVNNTVYDPLQPELDSFKEELDKYFKNHTSPDVDLGDISGINASVVNIQKEIDRLNEVAKNLNESLIDLQELGKYEQYIKGGGGSDIIKLLNEQVNKEMQSSNLYMSMSSWCYTHSLDGAGLFLFDHAAEEYEHAKKLIIFLNENNVPVQLTSISAPEHKFEGLTQIFQKAYEHEQHISESINNIVDHAIKSKDHATFNFLQWYVAEQHEEEVLFKDILDKIELIGNENHGLYLADQYVKGIAKSRKS

SEQ ID NO: 5306 - protein, 1379 aa, Artificial Sequence
  SARS-CoV-2/Australia/VIC01/2020__EPI_ISL_406844 spike protein (1-1211)(Q965C_S1003C) Ferritin construct
MFVFLVLLPLVSSQCVNLTTRTQLPPAYTNSFTRGVYYPDKVFRSSVLHSTQDLFLPFFSNVTWFHAIHVSGTNGTKRFDNPVLPFNDGVYFASTEKSNIIRGWIFGTTLDSKTQSLLIVNNATNVVIKVCEFQFCNDPFLGVYYHKNNKSWMESEFRVYSSANNCTFEYVSQPFLMDLEGKQGNFKNLREFVFKNIDGYFKIYSKHTPINLVRDLPQGFSALEPLVDLPIGINITRFQTLLALHRRYLTPGDSSSGWTAGAAAYYVGYLQPRTFLLKYNENGTITDAVDCALDPLSETKCTLKSFTVEKGIYQTSNFRVQPTESIVRFPNITNLCPFGEVFNATRFASVYAWNRKRISNCVADYSVLYNSASFSTFKCYGVSPTKLNDLCFTNVYADSFVIRGDEVRQIAPGQTGKIADYNYKLPDDFTGCVIAWNSNNLDSKVGGNYNYLYRLFRKSNLKPFERDISTEIYQAGSTPCNGVEGFNCYFPLQSYGFQPTNGVGYQPYRVVVLSFELLHAPATVCGPKKSTNLVKNKCVNFNFNGLTGTGVLTESNKKFLPFQQFGRDIADTTDAVRDPQTLEILDITPCSFGGVSVITPGTNTSNQVAVLYQDVNCTEVPVAIHADQLTPTWRVYSTGSNVFQTRAGCLIGAEHVNNSYECDIPIGAGICASYQTQTNSPRRARSVASQSIIAYTMSLGAENSVAYSNNSIAIPTNFTISVTTEILPVSMTKTSVDCTMYICGDSTECSNLLLQYGSFCTQLNRALTGIAVEQDKNTQEVFAQVKQIYKTPPIKDFGGFNFSQILPDPSKPSKRSFIEDLLFNKVTLADAGFIKQYGDCLGDIAARDLICAQKFNGLTVLPPLLTDEMIAQYTSALLAGTITSGWTFGAGAALQIPFAMQMAYRFNGIGVTQNVLYENQKLIANQFNSAIGKIQDSLSSTASALGKLQDVVNQNAQALNTLVKCLSSNFGAISSVLNDILSRLDKVEAEVQIDRLITGRLQCLQTYVTQQLIRAAEIRASANLAATKMSECVLGQSKRVDFCGKGYHLMSFPQSAPHGVVFLHVTYVPAQEKNFTTAPAICHDGKAHFPREGVFVSNGTHWFVTQRNFYEPQIITTDNTFVSGNCDVVIGIVNNTVYDPLQPELDSFKEELDKYFKNHTSPDVDLGDISGINASVVNIQKEIDRLNEVAKNLNESLIDLQELGKYEQYIKGGGGSDIIKLLNEQVNKEMQSSNLYMSMSSWCYTHSLDGAGLFLFDHAAEEYEHAKKLIIFLNENNVPVQLTSISAPEHKFEGLTQIFQKAYEHEQHISESINNIVDHAIKSKDHATFNFLQWYVAEQHEEEVLFKDILDKIELIGNENHGLYLADQYVKGIAKSRKS

SEQ ID NO: 5307 - protein, 1379 aa, Artificial Sequence
  SARS-CoV-2/Germany/BavPat1/2020__EPI_ISL_406862 spike protein (1-1211)(Q965C_S1003C) Ferritin construct
MFVFLVLLPLVSSQCVNLTTRTQLPPAYTNSFTRGVYYPDKVFRSSVLHSTQDLFLPFFSNVTWFHAIHVSGTNGTKRFDNPVLPFNDGVYFASTEKSNIIRGWIFGTTLDSKTQSLLIVNNATNVVIKVCEFQFCNDPFLGVYYHKNNKSWMESEFRVYSSANNCTFEYVSQPFLMDLEGKQGNFKNLREFVFKNIDGYFKIYSKHTPINLVRDLPQGFSALEPLVDLPIGINITRFQTLLALHRSYLTPGDSSSGWTAGAAAYYVGYLQPRTFLLKYNENGTITDAVDCALDPLSETKCTLKSFTVEKGIYQTSNFRVQPTESIVRFPNITNLCPFGEVFNATRFASVYAWNRKRISNCVADYSVLYNSASFSTFKCYGVSPTKLNDLCFTNVYADSFVIRGDEVRQIAPGQTGKIADYNYKLPDDFTGCVIAWNSNNLDSKVGGNYNYLYRLFRKSNLKPFERDISTEIYQAGSTPCNGVEGFNCYFPLQSYGFQPTNGVGYQPYRVVVLSFELLHAPATVCGPKKSTNLVKNKCVNFNFNGLTGTGVLTESNKKFLPFQQFGRDIADTTDAVRDPQTLEILDITPCSFGGVSVITPGTNTSNQVAVLYQGVNCTEVPVAIHADQLTPTWRVYSTGSNVFQTRAGCLIGAEHVNNSYECDIPIGAGICASYQTQTNSPRRARSVASQSIIAYTMSLGAENSVAYSNNSIAIPTNFTISVTTEILPVSMTKTSVDCTMYICGDSTECSNLLLQYGSFCTQLNRALTGIAVEQDKNTQEVFAQVKQIYKTPPIKDFGGFNFSQILPDPSKPSKRSFIEDLLFNKVTLADAGFIKQYGDCLGDIAARDLICAQKFNGLTVLPPLLTDEMIAQYTSALLAGTITSGWTFGAGAALQIPFAMQMAYRFNGIGVTQNVLYENQKLIANQFNSAIGKIQDSLSSTASALGKLQDVVNQNAQALNTLVKCLSSNFGAISSVLNDILSRLDKVEAEVQIDRLITGRLQCLQTYVTQQLIRAAEIRASANLAATKMSECVLGQSKRVDFCGKGYHLMSFPQSAPHGVVFLHVTYVPAQEKNFTTAPAICHDGKAHFPREGVFVSNGTHWFVTQRNFYEPQIITTDNTFVSGNCDVVIGIVNNTVYDPLQPELDSFKEELDKYFKNHTSPDVDLGDISGINASVVNIQKEIDRLNEVAKNLNESLIDLQELGKYEQYIKGGGGSDIIKLLNEQVNKEMQSSNLYMSMSSWCYTHSLDGAGLFLFDHAAEEYEHAKKLIIFLNENNVPVQLTSISAPEHKFEGLTQIFQKAYEHEQHISESINNIVDHAIKSKDHATFNFLQWYVAEQHEEEVLFKDILDKIELIGNENHGLYLADQYVKGIAKSRKS

SEQ ID NO: 5308 - protein, 1379 aa, Artificial Sequence
  SARS-CoV-2/Wuhan/HBCDC-HB-02/2020__EPI_ISL_412978 spike protein (1-1211)(Q965C_S1003C) Ferritin construct
MFVFLVLLPLVSSQCVNLTTRTQLPPAYTNSFTRGVYYPDKVFRSSVLHSTQDLFLPFFSNVTWFHAIHVSGTNGTKRFDNPVLPFNDGVYFASTEKSNIIRGWIFGTTLDSKTQSLLIVNNATNVVIKVCEFQFCNDPFLGVYYHKNNKSWMESEFRVYSSANNCTFEYVSQPFLMDLEGKQGNFKNLREFVFKNIDGYFKIYSKHTPINLVRDLPQGFSALEPLVDLPIGINITRFQTLLALHRSYLTPGDSSSGWTAGAAAYYVGYLQPRTFLLKYNENGTITDAVDCALDPLSETKCTLKSFTVEKGIYQTSNFRVQPTESIVRFPNITNLCPFGEVFNATRFASVYAWNRKRISNCVADYSVLYNSASFSTFKCYGVSPTKLNDLCFTNVYADSFVIRGDEVRQIAPGQTGKIADYNYKLPDDFTGCVIAWNSNNLDSKVGGNYNYLYRLFRKSNLKPFERDISTEIYQAGSTPCNGVEGFNCYFPLQSYGFQPTNGVGYQPYRVVVLSFELLHAPATVCGPKKSTNLVKNKCVNFNFNGLTGTGVLTESNKKFLPFQQFGRDIADTTDAVRDPQTLEILDITPCSFGGVSVITPGTNTSNQVAVLYQDVNCTEVPVAIHADQLTPTWRVYSTGSNVFQTRAGCLIGAEHVNNSYECDIPIGAGICASYQTQTNSPRRARSVASQSIIAYTMSLGAENSVAYSNNSIAIPTNFTISVTTEILPVSMTKTSVDCTMYICGDSTECSNFLLQYGSFCTQLNRALTGIAVEQDKNTQEVFAQVKQIYKTPPIKDFGGFNFSQILPDPSKPSKRSFIEDLLFNKVTLADAGFIKQYGDCLGDIAARDLICAQKFNGLTVLPPLLTDEMIAQYTSALLAGTITSGWTFGAGAALQIPFAMQMAYRFNGIGVTQNVLYENQKLIANQFNSAIGKIQDSLSSTASALGKLQDVVNQNAQALNTLVKCLSSNFGAISSVLNDILSRLDKVEAEVQIDRLITGRLQCLQTYVTQQLIRAAEIRASANLAATKMSECVLGQSKRVDFCGKGYHLMSFPQSAPHGVVFLHVTYVPAQEKNFTTAPAICHDGKAHFPREGVFVSNGTHWFVTQRNFYEPQIITTDNTFVSGNCDVVIGIVNNTVYDPLQPELDSFKEELDKYFKNHTSPDVDLGDISGINASVVNIQKEIDRLNEVAKNLNESLIDLQELGKYEQYIKGGGGSDIIKLLNEQVNKEMQSSNLYMSMSSWCYTHSLDGAGLFLFDHAAEEYEHAKKLIIFLNENNVPVQLTSISAPEHKFEGLTQIFQKAYEHEQHISESINNIVDHAIKSKDHATFNFLQWYVAEQHEEEVLFKDILDKIELIGNENHGLYLADQYVKGIAKSRKS

SEQ ID NO: 5309 - protein, 1379 aa, Artificial Sequence
  SARS-CoV-2/Australia/QLD02/2020__EPI_ISL_407896 spike protein (1-1211)(Q965C_S1003C) Ferritin construct
MFVFLVLLPLVSSQCVNLTTRTQLPPAYTNSFTRGVYYPDKVFRSSVLHSTQDLFLPFFSNVTWFHAIHVSGTNGTKRFDNPVLPFNDGVYFASTEKSNIIRGWIFGTTLDSKTQSLLIVNNATNVVIKVCEFQFCNDPFLGVYYHKNNKSWMESEFRVYSSANNCTFEYVSQPFLMDLEGKQGNFKNLREFVFKNIDGYFKIYSKHTPINLVRDLPQGFSALEPLVDLPIGINITRFQTLLALHRSYLTPGDSSSGWTAGAAAYYVGYLQPRTFLLKYNENGTITDAVDCALDPLSETKCTLKSFTVEKGIYQTSNFRVQPTESIVRFPNITNLCPFGEVFNATRFASVYAWNRKRISNCVADYSVLYNSASFSTFKCYGVSPTKLNDLCFTNVYADSFVIRGDEVRQIAPGQTGKIADYNYKLPDDFTGCVIAWNSNNLDSKVGGNYNYLYRLFRKSNLKPFERDISTEIYQAGSTPCNGVEGFNCYFPLQSYGFQPTNGVGYQPYRVVVLSFELLHAPATVCGPKKSTNLVKNKCVNFNFNGLTGTGVLTESNKKFLPFQQFGRDIADTTDAVRDPQTLEILDITPCSFGGVSVITPGTNTSNQVAVLYQDVNCTEVPVAIHADQLTPTWRVYSTGSNVFQTRAGCLIGAEHVNNSYECDIPIGAGICASYQTQTNSPRRARSVASQSIIAYTMSLGAENSVAYSNNSIAIPTNFTISVTTEILPVSMTKTSVDCTMYICGDSTECSNLLLQYGSFCTQLNRALTGIAVEQDKNTQEVFAQVKQIYKTPPIKDFGGFNFSQILPDPSKPSKRSFIEDLLFNKVTLADAGFIKQYGDCLGDIAARDLICAQKFNGLTVLPPLLTDEMIAQYTSALLAGTITSGWTFGAGAALQIPFAMQMAYRFNGIGVTQNVLYENQKLIANQFNSAIGKIQDSLSSTASALGKLQDVVNQNAQALNTLVKCLSSNFGAISSVLNDILSRLDKVEAEVQIDRLITGRLQCLQTYVTQQLIRAAEIRASANLAATKMSECVLGQSKRVDFCGKGYHLMSFPQSAPHGVVFLHVTYVPAQEKNFTTAPAICHDGKAHFPREGVFVSNGTHWFVTQRNFYEPQIITTDNTFVSGNCDVVIGIVNNTVYDPLQLELDSFKEELDKYFKNHTSPDVDLGDISGINASVVNIQKEIDRLNEVAKNLNESLIDLQELGKYEQYIKGGGGSDIIKLLNEQVNKEMQSSNLYMSMSSWCYTHSLDGAGLFLFDHAAEEYEHAKKLIIFLNENNVPVQLTSISAPEHKFEGLTQIFQKAYEHEQHISESINNIVDHAIKSKDHATFNFLQWYVAEQHEEEVLFKDILDKIELIGNENHGLYLADQYVKGIAKSRKS

SEQ ID NO: 5310 - protein, 1379 aa, Artificial Sequence
  SARS-CoV-2/India/1-31/2020__EPI_ISL_413523 spike protein (1-1211)(Q965C_S1003C) Ferritin construct
MFVFLVLLPLVSSQCVNLTTRTQLPPAYTNSFTRGVYYPDKVFRSSVLHSTQDLFLPFFSNVTWFHAIHVSGTNGTKRFDNPVLPFNDGVYFASTEKSNIIRGWIFGTTLDSKTQSLLIVNNATNVVIKVCEFQFCNDPFLGVYYHKNNKSWMESEFRVYSSANNCTFEYVSQPFLMDLEGKQGNFKNLREFVFKNIDGYFKIYSKHTPINLVRDLPQGFSALEPLVDLPIGINITRFQTLLALHRSYLTPGDSSSGWTAGAAAYYVGYLQPRTFLLKYNENGTITDAVDCALDPLSETKCTLKSFTVEKGIYQTSNFRVQPTESIVRFPNITNLCPFGEVFNATRFASVYAWNRKRISNCVADYSVLYNSASFSTFKCYGVSPTKLNDLCFTNVYADSFVIRGDEVRQIAPGQTGKIADYNYKLPDDFTGCVIAWNSNNLDSKVGGNYNYLYRLFRKSNLKPFERDISTEIYQAGSTPCNGVEGFNCYFPLQSYGFQPTNGVGYQPYRVVVLSFELLHAPATVCGPKKSTNLVKNKCVNFNFNGLTGTGVLTESNKKFLPFQQFGRDIADTTDAVRDPQTLEILDITPCSFGGVSVITPGTNTSNQVAVLYQDVNCTEVPVAIHADQLTPTWRVYSTGSNVFQTRAGCLIGAEHVNNSYECDIPIGAGICASYQTQTNSPRRARSVASQSIIAYTMSLGAENSVAYSNNSIAIPTNFTISVTTEILPVSMTKTSVDCTMYICGDSTECSNLLLQYGSFCTQLNRALTGIAVEQDKNTQEVFAQVKQIYKTPPIKDFGGFNFSQILPDPSKPSKRSFIEDLLFNKVTLADAGFIKQYGDCLGDIAARDLICAQKFNGLTVLPPLLTDEMIAQYTSALLAGTITSGWTFGAGAALQIPFAMQMAYRFNGIGVTQNVLYENQKLIANQFNSVIGKIQDSLSSTASALGKLQDVVNQNAQALNTLVKCLSSNFGAISSVLNDILSRLDKVEAEVQIDRLITGRLQCLQTYVTQQLIRAAEIRASANLAATKMSECVLGQSKRVDFCGKGYHLMSFPQSAPHGVVFLHVTYVPAQEKNFTTAPAICHDGKAHFPREGVFVSNGTHWFVTQRNFYEPQIITTDNTFVSGNCDVVIGIVNNTVYDPLQPELDSFKEELDKYFKNHTSPDVDLGDISGINASVVNIQKEIDRLNEVAKNLNESLIDLQELGKYEQYIKGGGGSDIIKLLNEQVNKEMQSSNLYMSMSSWCYTHSLDGAGLFLFDHAAEEYEHAKKLIIFLNENNVPVQLTSISAPEHKFEGLTQIFQKAYEHEQHISESINNIVDHAIKSKDHATFNFLQWYVAEQHEEEVLFKDILDKIELIGNENHGLYLADQYVKGIAKSRKS

SEQ ID NO: 5311 - protein, 1379 aa, Artificial Sequence
  SARS-CoV-2/Guangdong/GD2020087-P0008/2020__EPI_ISL_413863 spike protein (1-1211)(Q965C_S1003C) Ferritin construct
MFVFLVLLPLVSSQCVNLTTRTQLPPAYTNSFTRGVYYPDKVFRSSVLHSTQDLFLPFFSNVTWFHAIHVSGTNGTKRFDNPVLPFNDGVYFASTEKSNIIRGWIFGTTLDSKTQSLLIVNNATNVVIKVCEFQFCNDPFLGVYYHKNNKSWMESEFRVYSSANNCTFEYVSQPFLMDLEGKQGNFKNLREFVFKNIDGYFKIYSKHTPINLVRDLPQGFSALEPLVDLPIGINITRFQTLLALHRSYLTPGDSSSGWTAGAAAYYVGYLQPRTFLLKYNENGTITDAVDCALDPLSETKCTLKSFTVEKGIYQTSNFRVQPTESIVRFPNITNLCPFGEVFNATRFASVYAWNRKRISNCVADYSVLYNSASFSTFKCYGVSPTKLNDLCFTNVYADSFVIRGDEVREIAPGQTGKIADYNYKLPDDFTGCVIAWNSNNLDSKVGGNYNYLYRLFRKSNLKPFERDISTEIYQAGSTPCNGVEGFNCYFPLQSYGFQPTNGVGYQPYRVVVLSFELLHAPATVCGPKKSTNLVKNKCVNFNFNGLTGTGVLTESNKKFLPFQQFGRDIADTTDAVRDPQTLEILDITPCSFGGVSVITPGTNTSNQVAVLYQDVNCTEVPVAIHADQLTPTWRVYSTGSNVFQTRAGCLIGAEHVNNSYECDIPIGAGICASYQTQTNSPRRARSVASQSIIAYTMSLGAENSVAYSNNSIAIPTNFTISVTTEILPVSMTKTSVDCTMYICGDSTECSNLLLQYGSFCTQLNRALTGIAVEQDKNTQEVFAQVKQIYKTPPIKDFGGFNFSQILPDPSKPSKRSFIEDLLFNKVTLADAGFIKQYGDCLGDIAARDLICAQKFNGLTVLPPLLTDEMIAQYTSALLAGTITSGWTFGAGAALQIPFAMQMAYRFNGIGVTQNVLYENQKLIANQFNSAIGKIQDSLSSTASALGKLQDVVNQNAQALNTLVKCLSSNFGAISSVLNDILSRLDKVEAEVQIDRLITGRLQCLQTYVTQQLIRAAEIRASANLAATKMSECVLGQSKRVDFCGKGYHLMSFPQSAPHGVVFLHVTYVPAQEKNFTTAPAICHDGKAHFPREGVFVSNGTHWFVTQRNFYEPQIITTDNTFVSGNCDVVIGIVNNTVYDPLQPELDSFKEELDKYFKNHTSPDVDLGDISGINASVVNIQKEIDRLNEVAKNLNESLIDLQELGKYEQYIKGGGGSDIIKLLNEQVNKEMQSSNLYMSMSSWCYTHSLDGAGLFLFDHAAEEYEHAKKLIIFLNENNVPVQLTSISAPEHKFEGLTQIFQKAYEHEQHISESINNIVDHAIKSKDHATFNFLQWYVAEQHEEEVLFKDILDKIELIGNENHGLYLADQYVKGIAKSRKS

SEQ ID NO: 5312 - protein, 1379 aa, Artificial Sequence
  SARS-CoV-2/Sweden/01/2020__EPI_ISL_411951 spike protein (1-1211)(Q965C_S1003C) Ferritin construct
MFVFLVLLPLVSSQCVNLTTRTQLPPAYTNSFTRGVYYPDKVFRSSVLHSTQDLFLPFFSNVTWFHAIHVSGTNGTKRFDNPVLPFNDGVYFASTEKSNIIRGWIFGTTLDSKTQSLLIVNNATNVVIKVCEFQFCNDPFLGVYYHKNNKSWMESEFRVYSSANNCTFEYVSQPFLMDLEGKQGNFKNLREFVFKNIDGYFKIYSKHTPINLVRDLPQGFSALEPLVDLPIGINITRFQTLLALHRSYLTPGDSSSGWTAGAAAYYVGYLQPRTFLLKYNENGTITDAVDCALDPLSETKCTLKSFTVEKGIYQTSNFRVQPTESIVRFPNITNLCPFGEVFNATRFASVYAWNRKRISNCVADYSVLYNSASFSTFKCYGVSPTKLNDLCFTNVYADSFVIRGDEVRQIAPGQTGKIADYNYKLPDDFTGCVIAWNSNNLDSKVGGNYNYLYRLFRKSNLKPFERDISTEIYQAGSTPCNGVEGFNCYFPLQSYGFQPTNGVGYQPYRVVVLSFELLHAPATVCGPKKSTNLVKNKCVNFNFNGLTGTGVLTESNKKFLPFQQFGRDIADTTDAVRDPQTLEILDITPCSFGGVSVITPGTNTSNQVAVLYQDVNCTEVPVAIHADQLTPTWRVYSTGSNVFQTRAGCLIGAEHVNNSYECDIPIGAGICASYQTQTNSPRRARSVASQSIIAYTMSLGAENSVAYSNNSIAIPTNFTISVTTEILPVSMTKTSVDCTMYICGDSTECSNLLLQYGSFCTQLNRALTGIAVEQDKNTQEVFAQVKQIYKTPPIKDCGGFNFSQILPDPSKPSKRSFIEDLLFNKVTLADAGFIKQYGDCLGDIAARDLICAQKFNGLTVLPPLLTDEMIAQYTSALLAGTITSGWTFGAGAALQIPFAMQMAYRFNGIGVTQNVLYENQKLIANQFNSAIGKIQDSLSSTASALGKLQDVVNQNAQALNTLVKCLSSNFGAISSVLNDILSRLDKVEAEVQIDRLITGRLQCLQTYVTQQLIRAAEIRASANLAATKMSECVLGQSKRVDFCGKGYHLMSFPQSAPHGVVFLHVTYVPAQEKNFTTAPAICHDGKAHFPREGVFVSNGTHWFVTQRNFYEPQIITTDNTFVSGNCDVVIGIVNNTVYDPLQPELDSFKEELDKYFKNHTSPDVDLGDISGINASVVNIQKEIDRLNEVAKNLNESLIDLQELGKYEQYIKGGGGSDIIKLLNEQVNKEMQSSNLYMSMSSWCYTHSLDGAGLFLFDHAAEEYEHAKKLIIFLNENNVPVQLTSISAPEHKFEGLTQIFQKAYEHEQHISESINNIVDHAIKSKDHATFNFLQWYVAEQHEEEVLFKDILDKIELIGNENHGLYLADQYVKGIAKSRKS

SEQ ID NO: 5313 - protein, 1379 aa, Artificial Sequence
  SARS-CoV-2/Tianmen/HBCDC-HB-07/2020__EPI_ISL_412983 spike protein (1-1211)(Q965C_S1003C) Ferritin construct
MFVFLVLLPLVSSQCVNLTTRTQLPPAYTNSFTRGVYYPDKVFRSSVLHSTQDLFLPFFSNVTWFHAIHVSGTNGTKRFDNPVLPFNDGVYFASTEKSNIIRGWIFGTTLDSKTQSLLIVNNATNVVIKVCEFQFCNDPFLGVYYHKNNKSWMESEFRVYSSANNCTFEYVSQPFLMDLEGKQGNFKNLREFVFKNIDGYFKIYSKHTPINLVRDLPQGFSALEPLVDLPIGINITRFQTLLALHRSYLTPGDSSSGWTAGAAAYYVGYLQPRTFLLKYNENGTITDAVDCALDPLSETKCTLKSFTVEKGIYQTSNFRVQPTESIVRFPNITNLCPFGEVFNATRFASVYAWNRKRISNCVADYSVLYNSASFSTFKCYGVSPTKLNDLCFTNVYADSFVIRGDEVRQIAPGQTGKIADYNYKLPDDFTGCVIAWNSNNLDSKVGGNYNYLYRLFRKSNLKPFERDISTEIYQAGSTPCNGVEGFNCYFPLQSYGFQPTNGVGYQPYRVVVLSFELLHAPATVCGPKKSTNLVKNKCVNFNFNGLTGTGVLTESNKKFLPFQQFGRDIADTTDAVRDPQTLEILDITPCSFGGVSVITPGTNTSNQVAVLYQDLNCTEVPVAIHADQLTPTWRVYSTGSNVFQTRAGCLIGAEHVNNSYECDIPIGAGICASYQTQTNSPRRARSVASQSIIAYTMSLGAENSVAYSNNSIAIPTNFTISVTTEILPVSMTKTSVDCTMYICGDSTECSNLLLQYGSFCTQLNRALTGIAVEQDKNTQEVFAQVKQIYKTPPIKDFGGFNFSQILPDPSKPSKRSFIEDLLFNKVTLADAGFIKQYGDCLGDIAARDLICAQKFNGLTVLPPLLTDEMIAQYTSALLAGTITSGWTFGAGAALQIPFAMQMAYRFNGIGVTQNVLYENQKLIANQFNSAIGKIQDSLSSTASALGKLQDVVNQNAQALNTLVKCLSSNFGAISSVLNDILSRLDKVEAEVQIDRLITGRLQCLQTYVTQQLIRAAEIRASANLAATKMSECVLGQSKRVDFCGKGYHLMSFPQSAPHGVVFLHVTYVPAQEKNFTTAPAICHDGKAHFPREGVFVSNGTHWFVTQRNFYEPQIITTDNTFVSGNCDVVIGIVNNTVYDPLQPELDSFKEELDKYFKNHTSPDVDLGDISGINASVVNIQKEIDRLNEVAKNLNESLIDLQELGKYEQYIKGGGGSDIIKLLNEQVNKEMQSSNLYMSMSSWCYTHSLDGAGLFLFDHAAEEYEHAKKLIIFLNENNVPVQLTSISAPEHKFEGLTQIFQKAYEHEQHISESINNIVDHAIKSKDHATFNFLQWYVAEQHEEEVLFKDILDKIELIGNENHGLYLADQYVKGIAKSRKS

SEQ ID NO: 5314 - protein, 1379 aa, Artificial Sequence
  SARS-CoV-2/Hong Kong/case42_VM20002493/2020__EPI_ISL_414527 spike protein (1-1211)(Q965C_S1003C) Ferritin construct
MFVFLVLLPLVSSQCVNLTTRTQLPPAYTNSFTRGVYYPDKVFRSSVLHSTQDLFLPFFSNVTWFHAIHVSGTNGTKRFDNPVLPFNDGVYFASTEKSNIIRGWIFGTTLDSKTQSLLIVNNATNVVIKVCEFQFCNDPFLGVYYHKNNKSWMESEFRVYSSANNCTFEYVSQPFLMDLEGKQGNFKNLREFVFKNIDGYFKIYSKHTPINLVRDLPQGFSALEPLVDLPIGINITRFQTLLALHRSYLTPGDSSSGWTAGAAAYYVGYLQPRTFLLKYNENGTITDAVDCALDPLSETKCTLKSFTVEKGIYQTSNFRVQPTESIVRFPNITNLCPFGEVFNATRFASVYAWNRKRISNCVADYSVLYNSASFSTFKCYGVSPTKLNDLCFTNVYADSFVIRGDEVRQIAPGQTGKIADYNYKLPDDFTGCVIAWNSNNLDSKVGGNYNYLYRLFRKSNLKPFERDISTEIYQAGSTPCNGVEGFNCYFPLQSYGFQPTNGVGYQPYRVVVLSFELLHAPATVCGPKKSTNLVKNKCVNFNFNGLTGTGVLTESNKKFLPFQQFGRDIADTTDAVRDPQTLEILDITPCSFGGVSVITPGTNTSNQVAVLYQDVNCTEVPVAIHADQLTPTWRVYSTGSNVFQTRAGCLIGAEHVNNSYECDIPIGAGICASYQTQTNSPRRARSVASQSIIAYTMSLGAENSVAYSNNSIAIPTNFAISVTTEILPVSMTKTSVDCTMYICGDSTECSNLLLQYGSFCTQLNRALTGIAVEQDKNTQEVFAQVKQIYKTPPIKDFGGFNFSQILPDPSKPSKRSFIEDLLFNKVTLADAGFIKQYGDCLGDIAARDLICAQKFNGLTVLPPLLTDEMIAQYTSALLAGTITSGWTFGAGAALQIPFAMQMAYRFNGIGVTQNVLYENQKLIANQFNSAIGKIQDSLSSTASALGKLQDVVNQNAQALNTLVKCLSSNFGAISSVLNDILSRLDKVEAEVQIDRLITGRLQCLQTYVTQQLIRAAEIRASANLAATKMSECVLGQSKRVDFCGKGYHLMSFPQSAPHGVVFLHVTYVPAQEKNFTTAPAICHDGKAHFPREGVFVSNGTHWFVTQRNFYEPQIITTDNTFVSGNCDVVIGIVNNTVYDPLQPELDSFKEELDKYFKNHTSPDVDLGDISGINASVVNIQKEIDRLNEVAKNLNESLIDLQELGKYEQYIKGGGGSDIIKLLNEQVNKEMQSSNLYMSMSSWCYTHSLDGAGLFLFDHAAEEYEHAKKLIIFLNENNVPVQLTSISAPEHKFEGLTQIFQKAYEHEQHISESINNIVDHAIKSKDHATFNFLQWYVAEQHEEEVLFKDILDKIELIGNENHGLYLADQYVKGIAKSRKS

SEQ ID NO: 5315 - protein, 1379 aa, Artificial Sequence
  SARS-CoV-2/USA/CruiseA-23/2020__EPI_ISL_414482 spike protein (1-1211)(Q965C_S1003C) Ferritin construct
MFVFLVLLPLVSSQCVNLTTRTQLPPAYTNSFTRGVYYPDKVFRSSVLHSTQDLFLPFFSNVTWFHAIHVSGTNGTKRFDNPVLPFNDGVYFASTEKSNIIRGWIFGTTLDSKTQSLLIVNNATNVVIKVCEFQFCNDPFLGVYYHKNNKSWMESEFRVYSSANNCTFEYVSQPFLMDLEVKQGNFKNLREFVFKNIDGYFKIYSKHTPINLVRDLPQGFSALEPLVDLPIGINITRFQTLLALHRSYLTPGDSSSGWTAGAAAYYVGYLQPRTFLLKYNENGTITDAVDCALDPLSETKCTLKSFTVEKGIYQTSNFRVQPTESIVRFPNITNLCPFGEVFNATRFASVYAWNRKRISNCVADYSVLYNSASFSTFKCYGVSPTKLNDLCFTNVYADSFVIRGDEVRQIAPGQTGKIADYNYKLPDDFTGCVIAWNSNNLDSKVGGNYNYLYRLFRKSNLKPFERDISTEIYQAGSTPCNGVEGFNCYFPLQSYGFQPTNGVGYQPYRVVVLSFELLHAPATVCGPKKSTNLVKNKCVNFNFNGLTGTGVLTESNKKFLPFQQFGRDIADTTDAVRDPQTLEILDITPCSFGGVSVITPGTNTSNQVAVLYQDVNCTEVPVAIHADQLTPTWRVYSTGSNVFQTRAGCLIGAEHVNNSYECDIPIGAGICASYQTQTNSPRRARSVASQSIIAYTMSLGAENSVAYSNNSIAIPTNFTISVTTEILPVSMTKTSVDCTMYICGDSTECSNLLLQYGSFCTQLNRALTGIAVEQDKNTQEVFAQVKQIYKTPPIKDFGGFNFSQILPDPSKPSKRSFIEDLLFNKVTLADAGFIKQYGDCLGDIAARDLICAQKFNGLTVLPPLLTDEMIAQYTSALLAGTITSGWTFGAGAALQIPFAMQMAYRFNGIGVTQNVLYENQKLIANQFNSAIGKIQDSLSSTASALGKLQDVVNQNAQALNTLVKCLSSNFGAISSVLNDILSRLDKVEAEVQIDRLITGRLQCLQTYVTQQLIRAAEIRASANLAATKMSECVLGQSKRVDFCGKGYHLMSFPQSAPHGVVFLHVTYVPAQEKNFTTAPAICHDGKAHFPREGVFVSNGTHWFVTQRNFYEPQIITTDNTFVSGNCDVVIGIVNNTVYDPLQPELDSFKEELDKYFKNHTSPDVDLGDISGINASVVNIQKEIDRLNEVAKNLNESLIDLQELGKYEQYIKGGGGSDIIKLLNEQVNKEMQSSNLYMSMSSWCYTHSLDGAGLFLFDHAAEEYEHAKKLIIFLNENNVPVQLTSISAPEHKFEGLTQIFQKAYEHEQHISESINNIVDHAIKSKDHATFNFLQWYVAEQHEEEVLFKDILDKIELIGNENHGLYLADQYVKGIAKSRKS

SEQ ID NO: 5316 - protein, 1379 aa, Artificial Sequence
  SARS-CoV-2/Hong Kong/case85_VM20002868/2020__EPI_ISL_414519 spike protein (1-1211)(Q965C_S1003C) Ferritin construct
MFVFLVLVPLVSSQCVNLTTRTQLPPAYTNSFTRGVYYPDKVFRSSVLHSTQDLFLPFFSNVTWFHAIHVSGTNGTKRFDNPVLPFNDGVYFASTEKSNIIRGWIFGTTLDSKTQSLLIVNNATNVVIKVCEFQFCNDPFLGVYYHKNNKSWMESEFRVYSSANNCTFEYVSQPFLMDLEGKQGNFKNLREFVFKNIDGYFKIYSKHTPINLVRDLPQGFSALEPLVDLPIGINITRFQTLLALHRSYLTPGDSSSGWTAGAAAYYVGYLQPRTFLLKYNENGTITDAVDCALDPLSETKCTLKSFTVEKGIYQTSNFRVQPTESIVRFPNITNLCPFGEVFNATRFASVYAWNRKRISNCVADYSVLYNSASFSTFKCYGVSPTKLNDLCFTNVYADSFVIRGDEVRQIAPGQTGKIADYNYKLPDDFTGCVIAWNSNNLDSKVGGNYNYLYRLFRKSNLKPFERDISTEIYQAGSTPCNGVEGFNCYFPLQSYGFQPTNGVGYQPYRVVVLSFELLHAPATVCGPKKSTNLVKNKCVNFNFNGLTGTGVLTESNKKFLPFQQFGRDIADTTDAVRDPQTLEILDITPCSFGGVSVITPGTNTSNQVAVLYQDVNCTEVPVAIHADQLTPTWRVYSTGSNVFQTRAGCLIGAEHVNNSYECDIPIGAGICASYQTQTNSPRRARSVASQSIIAYTMSLGAENSVAYSNNSIAIPTNFTISVTTEILPVSMTKTSVDCTMYICGDSTECSNLLLQYGSFCTQLNRALTGIAVEQDKNTQEVFAQVKQIYKTPPIKDFGGFNFSQILPDPSKPSKRSFIEDLLFNKVTLADAGFIKQYGDCLGDIAARDLICAQKFNGLTVLPPLLTDEMIAQYTSALLAGTITSGWTFGAGAALQIPFAMQMAYRFNGIGVTQNVLYENQKLIANQFNSAIGKIQDSLSSTASALGKLQDVVNQNAQALNTLVKCLSSNFGAISSVLNDILSRLDKVEAEVQIDRLITGRLQCLQTYVTQQLIRAAEIRASANLAATKMSECVLGQSKRVDFCGKGYHLMSFPQSAPHGVVFLHVTYVPAQEKNFTTAPAICHDGKAHFPREGVFVSNGTHWFVTQRNFYEPQIITTDNTFVSGNCDVVIGIVNNTVYDPLQPELDSFKEELDKYFKNHTSPDVDLGDISGINASVVNIQKEIDRLNEVAKNLNESLIDLQELGKYEQYIKGGGGSDIIKLLNEQVNKEMQSSNLYMSMSSWCYTHSLDGAGLFLFDHAAEEYEHAKKLIIFLNENNVPVQLTSISAPEHKFEGLTQIFQKAYEHEQHISESINNIVDHAIKSKDHATFNFLQWYVAEQHEEEVLFKDILDKIELIGNENHGLYLADQYVKGIAKSRKS

SEQ ID NO: 5317 - protein, 1379 aa, Artificial Sequence; identical to SEQ ID NO: 5307
  SARS-CoV-2/England/200990660/2020__EPI_ISL_414523 spike protein (1-1211)(Q965C_S1003C) Ferritin construct

SEQ ID NO: 5318 - protein, 1379 aa, Artificial Sequence
  SARS-CoV-2/Australia/NSW09/2020__EPI_ISL_413595 spike protein (1-1211)(Q965C_S1003C) Ferritin construct
MFVFLVLLPLVSSQCVNLTTRTQLPPAYTNSFTRGVYYPDKVFRSSVLHSTQDLFLPFFSNVTWFHAIHVSGTNGTKRFDNPVLPFNDGVYFASTEKSNIIRGWIFGTTLDSKTQSLLIVNNATNVVIKVCEFQFCNDPFLGVYYHKNNKSWMESEFRVYSSANNCTFEYVSQPFLMDLEGKQGNFKNLREFVFKNIDGYFKIYSKHTPINLVRDLPQGFSALEPLVDLPIGINITRFQTLLALHRSYLTPGDSSSGWTAGAAAYYVGYLQPRTFLLKYNENGTITDAVDCALDPLSETKCTLKSFTVEKGIYQTSNFRVQPTESIVRFPNITNLCPFGEVFNATRFASVYAWNRKRISNCVADYSVLYNSASFSTFKCYGVSPTKLNDLCFTNVYADSFVIRGDEVRQIAPGQTGKIADYNYKLPDDFTGCVIAWNSNNLDSKVGGNYNYLYRLFRKSNLKPFERDISTEIYQAGSTPCNGVEGFNCYFPLQSYGFQPTNGVGYQPYRVVVLSFELLHAPATVCGPKKSTNLVKNKCVNFNFNGLTGTGVLTESNKKFLPFQQFGRDIADTTDAVRDPQTLEILDITPCSFGGVSVITPGTNTSNQVAVLYQDVNCTEVPVAIHADQLTPTWRVYSTGSNVFQTRAGCLIGAEHVNNSYECDIPIGAGICASYQTQTNSPRRARSVASQSIIAYTMSLGAENSVAYSNNSIAIPTNFTISVTTEILPVSMTKTSVDCTMYICGDSTECSNLLLQYGSFCTQLNRALTGIAVEQDKNTQEVFAQVKQIYKTPPIKDFGGFNFSQILPDPSKPSKRSFIEDLLFNKVTLADAGFIKQYGDCLGDIAARDLICAQKFNGLTVLPPLLTDEMIAQYTSALLAGTITSGWTFGAGAALQIPFAMQMAYRFNGIGVTQNVLYENQKLIANQFNSAIGKIQDSLSFTASALGKLQDVVNQNAQALNTLVKCLSSNFGAISSVLNDILSRLDKVEAEVQIDRLITGRLQCLQTYVTQQLIRAAEIRASANLAATKMSECVLGQSKRVDFCGKGYHLMSFPQSAPHGVVFLHVTYVPAQEKNFTTAPAICHDGKAHFPREGVFVSNGTHWFVTQRNFYEPQIITTDNTFVSGNCDVVIGIVNNTVYDPLQPELDSFKEELDKYFKNHTSPDVDLGDISGINASVVNIQKEIDRLNEVAKNLNESLIDLQELGKYEQYIKGGGGSDIIKLLNEQVNKEMQSSNLYMSMSSWCYTHSLDGAGLFLFDHAAEEYEHAKKLIIFLNENNVPVQLTSISAPEHKFEGLTQIFQKAYEHEQHISESINNIVDHAIKSKDHATFNFLQWYVAEQHEEEVLFKDILDKIELIGNENHGLYLADQYVKGIAKSRKS

SEQ ID NO: 5319 - protein, 1379 aa, Artificial Sequence; identical to SEQ ID NO: 5299
  SARS-CoV-2/Australia/NSW10/2020__EPI_ISL_413596 spike protein (1-1211)(Q965C_S1003C) Ferritin construct

SEQ ID NO: 5320 - protein, 1379 aa, Artificial Sequence
  SARS-CoV-2/Switzerland/1000477797/2020__EPI_ISL_413023 spike protein (1-1211)(Q965C_S1003C) Ferritin construct
MFVFLVLLPLVSSQCVNLTTRTQLPPAYTNSFTRGVYYPDKVFRSSVLHSTQDLFLPFFSNVTWFHAIHVSGTNGTKRFDNPVLPFNDGVYFASTEKSNIIRGWIFGTTLDSKTQSLLIVNNATNVVIKVCEFQFCNDPFLGVYYHKNNKSWMESEFRVYSSANNCTFEYVSQPFLMDLEGKQGNFKNLREFVFKNIDGYFNIYSKHTPINLVRDLPQGFSALEPLVDLPIGINITRFQTLLALHRSYLTPGDSSSGWTAGAAAYYVGYLQPRTFLLKYNENGTITDAVDCALDPLSETKCTLKSFTVEKGIYQTSNFRVQPTESIVRFPNITNLCPFGEVFNATRFASVYAWNRKRISNCVADYSVLYNSASFSTFKCYGVSPTKLNDLCFTNVYADSFVIRGDEVRQIAPGQTGKIADYNYKLPDDFTGCVIAWNSNNLDSKVGGNYNYLYRLFRKSNLKPFERDISTEIYQAGSTPCNGVEGFNCYFPLQSYGFQPTNGVGYQPYRVVVLSFELLHAPATVCGPKKSTNLVKNKCVNFNFNGLTGTGVLTESNKKFLPFQQFGRDIADTTDAVRDPQTLEILDITPCSFGGVSVITPGTNTSNQVAVLYQGVNCTEVPVAIHADQLTPTWRVYSTGSNVFQTRAGCLIGAEHVNNSYECDIPIGAGICASYQTQTNSPRRARSVASQSIIAYTMSLGAENSVAYSNNSIAIPTNFTISVTTEILPVSMTKTSVDCTMYICGDSTECSNLLLQYGSFCTQLNRALTGIAVEQDKNTQEVFAQVKQIYKTPPIKDFGGFNFSQILPDPSKPSKRSFIEDLLFNKVTLADAGFIKQYGDCLGDIAARDLICAQKFNGLTVLPPLLTDEMIAQYTSALLAGTITSGWTFGAGAALQIPFAMQMAYRFNGIGVTQNVLYENQKLIANQFNSAIGKIQDSLSSTASALGKLQDVVNQNAQALNTLVKCLSSNFGAISSVLNDILSRLDKVEAEVQIDRLITGRLQCLQTYVTQQLIRAAEIRASANLAATKMSECVLGQSKRVDFCGKGYHLMSFPQSAPHGVVFLHVTYVPAQEKNFTTAPAICHDGKAHFPREGVFVSNGTHWFVTQRNFYEPQIITTDNTFVSGNCDVVIGIVNNTVYDPLQPELDSFKEELDKYFKNHTSPDVDLGDISGINASVVNIQKEIDRLNEVAKNLNESLIDLQELGKYEQYIKGGGGSDIIKLLNEQVNKEMQSSNLYMSMSSWCYTHSLDGAGLFLFDHAAEEYEHAKKLIIFLNENNVPVQLTSISAPEHKFEGLTQIFQKAYEHEQHISESINNIVDHAIKSKDHATFNFLQWYVAEQHEEEVLFKDILDKIELIGNENHGLYLADQYVKGIAKSRKS

SEQ ID NO: 5321 - protein, 1379 aa, Artificial Sequence
  SARS-CoV-2/Belgium/BA-02291/2020__EPI_ISL_415159 spike protein (1-1211)(Q965C_S1003C) Ferritin construct
MFVFLVLLPLVSSQCVNLTTRTQLPPAYTNSFTRGVYYPDKVFRSSVLHSTQDLFLPFFSNVTWFHAIHVSGTNGTKRFDNPVLPFNDGVYFASTEKSNIIRGWIFGTTLDSKTQSLLIVNNATNVVIKVCEFQFCNDPFLGVYYHKNNKSWMESEFRVYSSANNCTFEYVSQPFLMDLEGKQGNFKNLREFVFKNIDGYFKIYSKHTPINLVRDLPQGFSALEPLVDLPIGINITRFQTLLALHRSYLTPGDSSSGWTAGAAAYYVGYLQPRTFLLKYNENGTITDAVDCALDPLSETKCTLKSFTVEKGIYQTSNFRVQPTESIVRFPNITNLCPFGEVFNATRFASVYAWNRKRISNCVADYSVLYNSASFSTFKCYGVSPTKLNDLCFTNVYADSFVIRGDEVRQIAPGQTGKIADYNYKLPDDFTGCVIAWNSNNLDSKVGGNYNYLYRLFRRSNLKPFERDISTEIYQAGSTPCNGVEGFNCYFPLQSYGFQPTNGVGYQPYRVVVLSFELLPAPATVCGPKKSTNLVKNKCVNFNFNGLTGTGVLTESNKKFLPFQQFGRDIADTTDAVRDPQTLEILDITPCSFGGVSVITPGTNTSNQVAVLYQGVNCTEVPVAIHADQLTPTWRVYSTGSNVFQTRAGCLIGAEHVNNSYECDIPIGAGICASYQTQTNSPRRARSVASQSIIAYTMSLGAENSVAYSNNSIAIPTNFTISVTTEILPVSMTKTSVDCTMYICGDSTECSNLLLQYGSFCTQLNRALTGIAVEQDKNTQEVFAQVKQIYKTPPIKDFGGFNFSQILPDPSKPSKRSFIEDLLFNKVTLADAGFIKQYGDCLGDIAARDLICAQKFNGLTVLPPLLTDEMIAQYTSALLAGTITSGWTFGAGAALQIPFAMQMAYRFNGIGVTQNVLYENQKLIANQFNSAIGKIQDSLSSAAPALGKLQDVVNQNAQALNTLVKCLSSNFGAISSVLNDILSRLDKVEAEVQIDRLITGRLQCLQTYVTQQLIRAAEIRASANLAATKMSECVLGQSKRVDFCGKGYHLMSFPQSAPHGVVFLHVTYVPAQEKNFTTAPAICHDGKAHFPREGVFVSNGTHWFVTQRNFYEPQIITTDNTFVSGNCDVVIGIVNNTVYDPLQPELDSFKEELDKYFKNHTSPDVDLGDISGINASVVNIQKEIDRLNEVAKNLNESLIDLQELGKYEQYIKGGGGSDIIKLLNEQVNKEMQSSNLYMSMSSWCYTHSLDGAGLFLFDHAAEEYEHAKKLIIFLNENNVPVQLTSISAPEHKFEGLTQIFQKAYEHEQHISESINNIVDHAIKSKDHATFNFLQWYVAEQHEEEVLFKDILDKIELIGNENHGLYLADQYVKGIAKSRKS

SEQ ID NO: 5322 - protein, 1379 aa, Artificial Sequence
  SARS-CoV-2/USA/WA8-UW5/2020__EPI_ISL_413486 spike protein (1-1211)(Q965C_S1003C) Ferritin construct
MFVFLVLLPLVSSQCVNLTTRTQLPPAYTNSFTRGVYYPDKVFRSSVLHSTQDLFLPFFSNVTWFHAIHVSGTNGTKRFDNPVLPFNDGVYFASTEKSNIIRGWIFGTTLDSKTQSLLIVNNATNVVIKVCEFQFCNDPFLGVYYHKNNKSWMESEFRVYSSANNCTFEYVSQPFLMDLEGKQGNFKNLREFVFKNIDGYFKIYSKHTPINLVRDLPQGFSALEPLVDLPIGINITRFQTLLALHRSYLTPGDSSSGWTAGAAAYYVGYLQPRTFLLKYNENGTITDAVDCALDPLSETKCTLKSFTVEKGIYQTSNFRVQPTESIVRFPNITNLCPFGEVFNATRFASVYAWNRKRISNCVADYSVLYNSASFSTFKCYGVSPTKLNDLCFTNVYADSFVIRGDEVRQIAPGQTGKIADYNYKLPDDFTGCVIAWNSNNLDSKVGGNYNYLYRLFRKSNLKPFERDISTEIYQAGSTPCNGVEGFNCYFPLQSYGFQPTNGVGYQPYRVVVLSFELLHAPATVCGPKKSTNLVKNKCVNFNFNGLTGTGVLTESNKKFLPFQQFGRDIADTTDAVRDPQTLEILDITPCSFGGVSVITPGTNTSNQVAVLYQDVNCTEVPVAIHADQLTPTWRVYSTGSNVFQTRAGCLIGAEYVNNSYECDIPIGAGICASYQTQTNSPRRARSVASQSIIAYTMSLGAENSVAYSNNSIAIPTNFTISVTTEILPVSMTKTSVDCTMYICGDSTECSNLLLQYGSFCTQLNRALTGIAVEQDKNTQEVFAQVKQIYKTPPIKDFGGFNFSQILPDPSKPSKRSFIEDLLFNKVTLADAGFIKQYGDCLGDIAARDLICAQKFNGLTVLPPLLTDEMIAQYTSALLAGTITSGWTFGAGAALQIPFAMQMAYRFNGIGVTQNVLYENQKLIANQFNSAIGKIQDSLSSTASALGKLQDVVNQNAQALNTLVKCLSSNFGAISSVLNDILSRLDKVEAEVQIDRLITGRLQCLQTYVTQQLIRAAEIRASANLAATKMSECVLGQSKRVDFCGKGYHLMSFPQSAPHGVVFLHVTYVPAQEKNFTTAPAICHDGKAHFPREGVFVSNGTHWFVTQRNFYEPQIITTDNTFVSGNCDVVIGIVNNTVYDPLQPELDSFKEELDKYFKNHTSPDVDLGDISGINASVVNIQKEIDRLNEVAKNLNESLIDLQELGKYEQYIKGGGGSDIIKLLNEQVNKEMQSSNLYMSMSSWCYTHSLDGAGLFLFDHAAEEYEHAKKLIIFLNENNVPVQLTSISAPEHKFEGLTQIFQKAYEHEQHISESINNIVDHAIKSKDHATFNFLQWYVAEQHEEEVLFKDILDKIELIGNENHGLYLADQYVKGIAKSRKS

SEQ ID NO: 5323 - protein, 1379 aa, Artificial Sequence
  SARS-CoV-2/England/20102000506/2020__EPI_ISL_415147 spike protein (1-1211)(Q965C_S1003C) Ferritin construct
MFVFLVLLPLVSSQCVNLTTRTQLPPAYTNSFTRGVYYPDKVFRSSVLHSTQDLFLPFFSNVTWFHAIHVSGTNGTKRFDNPVLPFNDGVYFASTEKSNIIRGWIFGTTLDSKTQSLLIVNNATNVVIKVCEFQFCNDPFLGVYYHKNNKSWMESEFRVYSSANNCTFEYVSQPFLMDLEGKQGNFKNLREFVFKNIDGYFKIYSKHTPINLVRDLPQGFSALEPLVDLPIGINITRFQTLLALHRSYLTPGDSSSGWTAGAAAYYVGYLQPRTFLLKYNENGTITDAVDCALDPLSETKCTLKSFTVEKGIYQTSNFRVQPTESIVRFPNITNLCPFGEVFNATRFASVYAWNRKRISNCVADYSVLYNSASFSTFKCYGVSPTKLNDLCFTNVYADSFVIRGDEVRQIAPGQTGKIADYNYKLPDDFTGCVIAWNSNNLDSKVGGNYNYLYRLFRKSNLKPFERDISTEIYQAGSTPCNGVEGFNCYFPLQSYGFQPTNGVGYQPYRVVVLSFELLHAPATVCGPKKSTNLVKNKCVNFNFNGLTGTGVLTESNKKFLPFQQFGRDIADTTDAVRDPQTLEILDITPCSFGGVSVITPGTNTSNQVAVLYQGVNCTEVPVAIHADQLTPTWRVYSTGSNVFQTRAGCLIGAEHVNNSYECDIPIGAGICASYQTQTNSPRRARSVASQSIIAYTMSLGAENSVAYSNNSIAIPTNFTISVTTEILPVSMTKTSVDCTMYICGDSTECSNLLLQYGSFCTQLNRALTGIAVEQDKNTQEVFAQVKQIYKTPPIKDFGGFNFSQILPDPSKPSKRSFIEDLLFNKVTLADAGFIKQYGYCLGDIAARDLICAQKFNGLTVLPPLLTDEMIAQYTSALLAGTITSGWTFGAGAALQIPFAMQMAYRFNGIGVTQNVLYENQKLIANQFNSAIGKIQDSLSSTASALGKLQDVVNQNAQALNTLVKCLSSNFGAISSVLNDILSRLDKVEAEVQIDRLITGRLQCLQTYVTQQLIRAAEIRASANLAATKMSECVLGQSKRVDFCGKGYHLMSFPQSAPHGVVFLHVTYVPAQEKNFTTAPAICHDGKAHFPREGVFVSNGTHWFVTQRNFYEPQIITTDNTFVSGNCDVVIGIVNNTVYDPLQPELDSFKEELDKYFKNHTSPDVDLGDISGINASVVNIQKEIDRLNEVAKNLNESLIDLQELGKYEQYIKGGGGSDIIKLLNEQVNKEMQSSNLYMSMSSWCYTHSLDGAGLFLFDHAAEEYEHAKKLIIFLNENNVPVQLTSISAPEHKFEGLTQIFQKAYEHEQHISESINNIVDHAIKSKDHATFNFLQWYVAEQHEEEVLFKDILDKIELIGNENHGLYLADQYVKGIAKSRKS

SEQ ID NO: 5324 - protein, 1379 aa, Artificial Sequence
  SARS-CoV-2/Belgium/VAG-03013/2020__EPI_ISL_415155 spike protein (1-1211)(Q965C_S1003C) Ferritin construct
MFVFLVLLPLVSSQCVNLTTRTQLPPAYTNSFTRGVYYPDKVFRSSVLHSTQDLFLPFFSNVTWFHAIHVSGTNGTKRFDNPVLPFNDGVYFASTEKSNIIRGWIFGTTLDSKTQSLLIVNNATNVVIKVCEFQFCNDPFLGVYYHKNNKSWMESEFRVYSSANNCTFEYVSQPFLMDLEGKQGNFKNLREFVFKNIDGYFKIYSKHTPINLVRDLPQGFSALEPLVDLPIGINITRFQTLLALHRSYLTPGDSSSGWTAGAAAYYVGYLQPRTFLLKYNENGTITDAVDCALDPLSETKCTLKSFTVEKGIYQTSNFRVQPTESIVRFPNITNLCPFGEVFNATRFASVYAWNRKRISNCVADYSVLYNSASFSTFKCYGVSPTKLNDLCFTNVYADSFVIRGDEVRQIAPGQTGKIADYNYKLPDDFTGCVIAWNSNNLDSKVGGNYNYLYRLFRKSNLKPFERDISTEIYQAGSTPCNGVEGFNCYFPLQSYGFQPTNGVGYQPYRVVVLSFELLHAPATVCGPKKSTNLVKNKCVNFNFNGLTGTGVLTESNKKFLPFQQFGRDIADTTDAVRDPQTLEILDITPCSFGGVSVITPGTNTSNQVAVLYQGVNCTEVPVAIHADQLTPTWRVYSTGSNVFQTRAGCLIGAEHVNNSYECDIPIGAGICASYQTQTNSPRRARSVASQSIIAYTMSLGAENSVAYSNNSIAIPTNFTISVTTEILPVSMTKTSVDCTMYICGDSTECSNLLLQYGSFCTQLNRALTGIAVEQDKNTQEVFAQVKQIYKTPPIKDFGGFNFSQILPDPSKPSKRSFIEDLLFNKVTLADAGFIKQYGDCLGDIAARDLICAQKFNGLTVLPPLLTDEMIAQYTSALLAGTITSGWTFGAGAALQIPFAMQMAYRFNGIGVTQNVLYENQKLIANQFNSAIGKIQDSLSSTATALGKLQDVVNQNAQALNTLVKCLSSNFGAISSVLNDILSRLDKVEAEVQIDRLITGRLQCLQTYVTQQLIRAAEIRASANLAATKMSECVLGQSKRVDFCGKGYHLMSFPQSAPHGVVFLHVTYVPAQEKNFTTAPAICHDGKAHFPREGVFVSNGTHWFVTQRNFYEPQIITTDNTFVSGNCDVVIGIVNNTVYDPLQPELDSFKEELDKYFKNHTSPDVDLGDISGINASVVNIQKEIDRLNEVAKNLNESLIDLQELGKYEQYIKGGGGSDIIKLLNEQVNKEMQSSNLYMSMSSWCYTHSLDGAGLFLFDHAAEEYEHAKKLIIFLNENNVPVQLTSISAPEHKFEGLTQIFQKAYEHEQHISESINNIVDHAIKSKDHATFNFLQWYVAEQHEEEVLFKDILDKIELIGNENHGLYLADQYVKGIAKSRKS

SEQ ID NO: 5325 - protein, 1379 aa, Artificial Sequence
  SARS-CoV-2/Belgium/BC-03016/2020__EPI_ISL_415157 spike protein (1-1211)(Q965C_S1003C) Ferritin construct
MFVFLVLLPLVSSQCVNLTTRTQLPPAYTNSFTRGVYYPDKVFRSSVLHSTQDLFLPFFSNVTWFHAIHVSGTNGTKRFDNPVLPFNDGVYFASTEKSNIIRGWIFGTTLDSKTQSLLIVNNATNVVIKVCEFQFCNDPFLGVYYHKNNKSWMESEFRVYSSANNCTFEYVSQPFLMDLEGKQGNFKNLREFVFKNIDGYFKIYSKHTPINLVRDLPQGFSALEPLVDLPIGINITRFQTLLALHRSYLTPGDSSSGWTAGAAAYYVGYLQPRTFLLKYNENGTITDAVDCALDPLSETKCTLKSFTVEKGIYQTSNFRVQPTESIVRFPNITNLCPFGEVFNATRFASVYAWNRKRISNCVADYSVLYNSASFSTFKCYGVSPTKLNDLCFTNVYADSFVIRGDEVRQIAPGQTGKIADYNYKLPDDFTGCVIAWNSNNLDSKVGGNYNYLYRLFRKSNLKPFERDISTEIYQAGSTPCNGVEGFNCYFPLQSYGFQPTNGVGYQPYRVVVLSFELLHAPATVCGPKKSTNLVKNKCVNFNFNGLTGTGVLTESNKKFLPFQQFGRDIADTTDAVRDPQTLEILDITPCSFGGVSVITPGTNTSNQVAVLYQGVNCTEVPVAIHADQLTPTWRVYSTGSNVFQTRAGCLIGAEHVNNSYECDIPIGAGICASYQTQTNSPRRARSVASQSIIAYTMSLGAENSVAYSNNSIAIPTNFTISVTTEILPVSMTKTSVDCTMYICGDSTECSNLLLQYGSFCTQLNRALTGIAVEQDKNTQEVFAQVKQIYKTPPIKDFGGFNFSQILPDPSKPSKRSFIEDLLFNKVTLADAGFIKQYGDCLGDIAARDLICAQKFNGLTVLPPLLTDEMIAQYTSALLAGTITSGWTFGAGAALQIPFAMQMAYRFNGIGVTQNVLYENQKLIANQFNSAIGKIQDSLSSTAPALGKLQDVVNQNAQALNTLVKCLSSNFGAISSVLNDILSRLDKVEAEVQIDRLITGRLQCLQTYVTQQLIRAAEIRASANLAATKMSECVLGQSKRVDFCGKGYHLMSFPQSAPHGVVFLHVTYVPAQEKNFTTAPAICHDGKAHFPREGVFVSNGTHWFVTQRNFYEPQIITTDNTFVSGNCDVVIGIVNNTVYDPLQPELDSFKEELDKYFKNHTSPDVDLGDISGINASVVNIQKEIDRLNEVAKNLNESLIDLQELGKYEQYIKGGGGSDIIKLLNEQVNKEMQSSNLYMSMSSWCYTHSLDGAGLFLFDHAAEEYEHAKKLIIFLNENNVPVQLTSISAPEHKFEGLTQIFQKAYEHEQHISESINNIVDHAIKSKDHATFNFLQWYVAEQHEEEVLFKDILDKIELIGNENHGLYLADQYVKGIAKSRKS

SEQ ID NO: 5326 - protein, 1379 aa, Artificial Sequence
  SARS-CoV-2/Germany/BavPat3/2020__EPI_ISL_414521 spike protein (1-1211)(Q965C_S1003C) Ferritin construct
MFVFLVLLPLVSSQCVNLTTRTQLPPAYTNSFTRGVYYPDKVFRSSVLHSTQDLFLPFFSNVTWFHAIHVSGTNGTKRFDNPVLPFNDGVYFASTEKSNIIRGWIFGTTLDSKTQSLLIVNNATNVVIKVCEFQFCNDPFLGVYYHKNNKSWMESEFRVYSSANNCTFEYVSQPFLMDLEGKQGNFKNLREFVFKNIDGYFKIYSKHTPINLVRDLPQGFSALEPLVDLPIGINITRFQTLLALHRSYLTPGDSSSGWTAGAAAYYVGYLQPRTFLLKYNENGTITDAVDCALDPLSETKCTLKSFTVEKGIYQTSNFRVQPTESIVRFPNITNLCPFGEVFNATRFASVYAWNRKRISNCVADYSVLYNSASFSTFKCYGVSPTKLNDLCFTNVYADSFVIRGDEVRQIAPGQTGKIADYNYKLPDDFTGCVIAWNSNNLDSKVGGNYNYLYRLFRKSNLKPFERDISTEIYQAGSTPCNGVEGFNCYFPLQSYGFQPTNGVGYQPYRVVVLSFELLHAPATVCGPKKSTNLVKNKCVNFNFNGLTGTGVLTESNKKFLPFQQFGRDIADTTDAVRDPQTLEILDITPCSFGGVSVITPGTNTSNQVAVLYQDVNCTEVPVAIHADQLTPTWRVYSTGSNVFQTRAGCLIGAEHVNNSYECDIPIGAGICASYQTQTNSPRRARSVASQSIIAYTMSLGAENSVAYSNNSIAIPTNFTISVTTEILPVSMTKTSVDCTMYICGDSTECSNLLLQYGSFCTQLNRALTGIAVEQDKNTQQVFAQVKQIYKTPPIKDFGGFNFSQILPDPSKPSKRSFIEDLLFNKVTLADAGFIKQYGDCLGDIAARDLICAQKFNGLTVLPPLLTDEMIAQYTSALLAGTITSGWTFGAGAALQIPFAMQMAYRFNGIGVTQNVLYENQKLIANQFNSAIGKIQDSLSSTASALGKLQDVVNQNAQALNTLVKCLSSNFGAISSVLNDILSRLDKVEAEVQIDRLITGRLQCLQTYVTQQLIRAAEIRASANLAATKMSECVLGQSKRVDFCGKGYHLMSFPQSAPHGVVFLHVTYVPAQEKNFTTAPAICHDGKAHFPREGVFVSNGTHWFVTQRNFYEPQIITTDNTFVSGNCDVVIGIVNNTVYDPLQPELDSFKEELDKYFKNHTSPDVDLGDISGINASVVNIQKEIDRLNEVAKNLNESLIDLQELGKYEQYIKGGGGSDIIKLLNEQVNKEMQSSNLYMSMSSWCYTHSLDGAGLFLFDHAAEEYEHAKKLIIFLNENNVPVQLTSISAPEHKFEGLTQIFQKAYEHEQHISESINNIVDHAIKSKDHATFNFLQWYVAEQHEEEVLFKDILDKIELIGNENHGLYLADQYVKGIAKSRKS

SEQ ID NO: 5327 - protein, 1379 aa, Artificial Sequence
  SARS-CoV-2/France/HF1805/2020__EPI_ISL_414628 spike protein (1-1211)(Q965C_S1003C) Ferritin construct
MFVFLVLLPLVSSQCVNLTTRTQLPPAYTNSFTRGVYYPDKVFRSSVLHSTQDLFLPFFSNVTWFHAIHVSGTNGTKRFDNPVLPFNDGVYFASTEKSNIIRGWIFGTTLDSKTQSLLIVNNATNVVIKVCEFQFCNDPFLGVYYHKNNKSWMESEFRVYSSANNCTFEYVSQPFLMDLEGKQGNFKNLREFVFKNIDGYFKIYSKHTPINLVRDLPQGFSALEPLVDLPIGINITRFQTLLALHRSYLTPGDSSSGWTAGAAAYYVGYLQPRTFLLKYNENGTITDAVDCALDPLSETKCTLKSFTVEKGIYQTSNFRVQPTESIVRFPNITNLCPFGEVFNATRFASVYAWNRKRISNCVADYSVLYNSASFSTFKCYGVSPTKLNDLCFTNVYADSFVIRGDEVRQIAPGQTGKIADYNYKLPDDFTGCVIAWNSNNLDSKVGGNYNYLYRLFRKSNLKPFERDISTEIYQAGSTPCNGVEGFNCYFPLQSYGFQPTNGVGYQPYRVVVLSFELLHAPATVCGPKKSTNLVKNKCVNFNFNGLTGTGVLTESNKKFLPFQQFGRDIADTTDAVRDPQTLEILDITPCSFGGVSVITPGTNTSNQVAVLYQGVNCTEVPVAIHADQLTPTWRVYSTGSNVFQTRAGCLIGAEHVNNSYECDIPIGAGICASYQTQTNSPRRARSVASQSIIAYTMSLGAENSVAYSNNSIAIPTNFTISVTTEILPVSMTKTSVDCTMYICGDSTECSNLLLQYGSFCTQLNRALTGIAVEQDKNTQEVFAQVKQIYKTPPIKDFGGFNFSQILPDPSKPSKRSFIEDLLFNKVTLADAGFIKQYGDCLGDIAARDLICAQKFNGLTVLPPLLTDEMIAQYTSALLAGTITSGWTFGAGAALQIPFAMQMAYRFNGIGVTQNVLYENQKLIANQFNSAIGKIQDSLSSTASALGKLQDVVNQNAQALNTLVKCLSSNFGAISSVLNDILSRLDKVEAEVQIDRLITGRLQCLQTYVTQQLIRAAEIRASANLAATKMSECVLGQSKRVDFCGKGYHLMSFPQSAPHGVVFLHVTYVPAQEKNFTTAPAICHDGKAHFPREGVFVSNGTHWFVTQRNFYEPQIITTDNTFVSGNCDVVIGVVNNTVYDPLQPELDSFKEELDKYFKNHTSPDVDLGDISGINASVVNIQKEIDRLNEVAKNLNESLIDLQELGKYEQYIKGGGGSDIIKLLNEQVNKEMQSSNLYMSMSSWCYTHSLDGAGLFLFDHAAEEYEHAKKLIIFLNENNVPVQLTSISAPEHKFEGLTQIFQKAYEHEQHISESINNIVDHAIKSKDHATFNFLQWYVAEQHEEEVLFKDILDKIELIGNENHGLYLADQYVKGIAKSRKS

SEQ ID NO: 5328 - protein, 1379 aa, Artificial Sequence
  SARS-CoV-2/Netherlands/ZuidHolland_9/2020__EPI_ISL_414445 spike protein (1-1211)(Q965C_S1003C) Ferritin construct
MFVFLVLLPLVSSQCVNLTTRTQLPPAYTNSFTRGVYYPDKVFRSSVLHSTQDLFLPFFSNVTWFHAIHVSGTNGTKRFDNPVLPFNDGVYFASTEKSNIIRGWIFGTTLDSKTQSLLIVNNATNVVIKVCEFQFCNDPFLGVYYHKNNKSWMESEFRVYSSANNCTFEYVSQPFLMDLEGKQGNFKNLREFVFKNIDGYFKIYSKHTPINLVRDLPQGFSALEPLVDLPIGINITRFQTLLALHRSYLTPGDSSSGWTAGAAAYYVGYLQPRTFLLKYNENGTITDAVDCALDPLSETKCTLKSFTVEKGIYQTSNFRVQPTESIVRFPNITNLCPFGEVFNATRFASVYAWNRKRISNCVADYSVLYNSASFSTFKCYGVSPTKLNDLCFTNVYADSFVIRGDEVRQIAPGQTGKIADYNYKLPDDFTGCVIAWNSNNLDSKVGGNYNYLYRLFRKSNLKPFERDISTEIYQAGSTPCNGVEGFNCYFPLQSYGFQPTNGVGYQPYRVVVLSFELLHAPATVCGPKKSTNLVKNKCVNFNFNGLTGTGVLTESNKKFLPFQQFGRDIADTTDAVRDPQTLEILDITPCSFGGVSVITPGTNTSNQVAVLYQGVNCTEVPVAIHADQLTPTWRVYSTGSNVFQTRAGCLIGAEHVNNSYECDIPIGAGICASYQTQTNSPRRARSVASQSIIAYTMSLGAENSVAYSNNSIAIPTNFTISVTTEILPVSMTKTSVDCTMYICGDSTECSNLLLQYGSFCTQLNRALTGIAVEQDKNTQEVFAQVKQIYKTPPIKDFGGFNFSQILPDPSKPSKRSFIEDLLFNKVTLADAGFIKQYGDCLGDIAARDLICVQKFNGLTVLPPLLTDEMIAQYTSALLAGTITSGWTFGAGAALQIPFAMQMAYRFNGIGVTQNVLYENQKLIANQFNSAIGKIQDSLSSTASALGKLQDVVNQNAQALNTLVKCLSSNFGAISSVLNDILSRLDKVEAEVQIDRLITGRLQCLQTYVTQQLIRAAEIRASANLAATKMSECVLGQSKRVDFCGKGYHLMSFPQSAPHGVVFLHVTYVPAQEKNFTTAPAICHDGKAHFPREGVFVSNGTHWFVTQRNFYEPQIITTDNTFVSGNCDVVIGIVNNTVYDPLQPELDSFKEELDKYFKNHTSPDVDLGDISGINASVVNIQKEIDRLNEVAKNLNESLIDLQELGKYEQYIKGGGGSDIIKLLNEQVNKEMQSSNLYMSMSSWCYTHSLDGAGLFLFDHAAEEYEHAKKLIIFLNENNVPVQLTSISAPEHKFEGLTQIFQKAYEHEQHISESINNIVDHAIKSKDHATFNFLQWYVAEQHEEEVLFKDILDKIELIGNENHGLYLADQYVKGIAKSRKS

SEQ ID NO: 5329 - protein, 1379 aa, Artificial Sequence
  SARS-CoV-2/Finland/FIN03032020A/2020__EPI_ISL_413602 spike protein (1-1211)(Q965C_S1003C) Ferritin construct
MFVFLVLLPLVSSQCVNLTTRTQLPPAYTNSFTRGVYYPDKVFRSSVLHSTQDLFLPFFSNVTWFHAIHVSGTNGTKRFDNPVLPFNDGVYFASTEKSNIIRGWIFGTTLDSKTQSLLIVNNATNVVIKVCEFQFCNDPFLGVYYHKNNKSWMESEFRVYSSANNCTFEYVSQPFLMDLEGKQGNFKNLREFVFKNIDGYFKIYSKHTPINLVRDLPQGFSALEPLVDLPIGINITRFQTLLALHRSYLTPGDSSSGWTAGAAAYYVGYLQPRTFLLKYNENGTITDAVDCALDPLSETKCTLKSFTVEKGIYQTSNFRVQPTESIVRFPNITNLCPFGEVFNATRFASVYAWNRKRISNCVADYSVLYNSASFSTFKCYGVSPTKLNDLCFTNVYADSFVIRGDEVRQIAPGQTGKIADYNYKLPDDFTGCVISWNSNNLDSKVGGNYNYLYRLFRKSNLKPFERDISTEIYQAGSTPCNGVEGFNCYFPLQSYGFQPTNGVGYQPYRVVVLSFELLHAPATVCGPKKSTNLVKNKCVNFNFNGLTGTGVLTESNKKFLPFQQFGRDIADTTDAVRDPQTLEILDITPCSFGGVSVITPGTNTSNQVAVLYQGVNCTEVPVAIHADQLTPTWRVYSTGSNVFQTRAGCLIGAEHVNNSYECDIPIGAGICASYQTQTNSPRRARSVASQSIIAYTMSLGAENSVAYSNNSIAIPTNFTISVTTEILPVSMTKTSVDCTMYICGDSTECSNLLLQYGSFCTQLNRALTGIAVEQDKNTQEVFAQVKQIYKTPPIKDFGGFNFSQILPDPSKPSKRSFIEDLLFNKVTLADAGFIKQYGDCLGDIAARDLICAQKFNGLTVLPPLLTDEMIAQYTSALLAGTITSGWTFGAGAALQIPFAMQMAYRFNGIGVTQNVLYENQKLIANQFNSAIGKIQDSLSSTASALGKLQDVVNQNAQALNTLVKCLSSNFGAISSVLNDILSRLDKVEAEVQIDRLITGRLQCLQTYVTQQLIRAAEIRASANLAATKMSECVLGQSKRVDFCGKGYHLMSFPQSAPHGVVFLHVTYVPAQEKNFTTAPAICHDGKAHFPREGVFVSNGTHWFVTQRNFYEPQIITTDNTFVSGNCDVVIGIVNNTVYDPLQPELDSFKEELDKYFKNHTSPDVDLGDISGINASVVNIQKEIDRLNEVAKNLNESLIDLQELGKYEQYIKGGGGSDIIKLLNEQVNKEMQSSNLYMSMSSWCYTHSLDGAGLFLFDHAAEEYEHAKKLIIFLNENNVPVQLTSISAPEHKFEGLTQIFQKAYEHEQHISESINNIVDHAIKSKDHATFNFLQWYVAEQHEEEVLFKDILDKIELIGNENHGLYLADQYVKGIAKSRKS

SEQ ID NO: 5330 - protein, 1379 aa, Artificial Sequence
  SARS-CoV-2/France/GE1977/2020__EPI_ISL_414632 spike protein (1-1211)(Q965C_S1003C) Ferritin construct
MFVFLVLLPLVSSQCVNLTTRTQLPPAYTNSFTRGVYYPDKVFRSSVLHSTQDLFLPFFSNVTWFHAIHVSGTNGTKRFDNPVLPFNDGVYFASTEKSNIIRGWIFGTTLDSKTQSLLIVNNATNVVIKVCEFQFCNDPFLGVYYHKNNKSWMESEFRVYSSANNCTFEYVSQPFLMDLEGKQGNFKNLREFVFKNIDGYFKIYSKHTPINLVRDLPQGFSALEPLVDLPIGINITRFQTLLALHRSYLTPGDSSSGWTAGAAAYYVGYLQPRTFLLKYNENGTITDAVDCALDPLSETKCTLKSFTVEKGIYQTSNFRVQPTESIVRFPNITNLCPFGEVFNATRFASVYAWNRKRISNCVADYSVLYNSASFSTFKCYGVSPTKLNDLCFTNVYADSFVIRGDEVRQIAPGQTGKIADYNYKLPDDFTGCVIAWNSNNLDSKVGGNYNYLYRLFRKSNLKPFERDISTEIYQAGSTPCNGVEGFNCYFPLQSYGFQPTNGVGYQPYRVVVLSFELLHAPATVCGPKKSTNLVKNKCVNFNFNGLTGTGVLTESNKKFLPFQQFGRDIADTTDAVRDPQTLEILDITPCSFGGVSVITPGTNTSNQVAVLYQGVNCTEVPVAIHADQLTPTWRVYSTGSNVFQTRAGCLIGAEHVNNSYECDIPIGAGICASYQTQTNSPRRARSVASQSIIAYTMSLGAENSVAYSNNSIAIPTNFTISVTTEILPVSMTKTSVDCTMYICGDSTECSNLLLQYGSFCTQLNRALTGIAVEQDKNTQEVFAQVKQIYKTPPIKDFGGFNFSQILPDPSKPSKRSFIEDLLFNKVTLADAGFIKQYGDCLGDIAARDLICAQKFNGLTVLPPLLTDEMIAQYTSALLAGTITSGWTFGAGAALQIPFAMQMAYRFNGIGVTQNVLYENQKLIANQFNSAIGKIQDSLFSTASALGKLQDVVNQNAQALNTLVKCLSSNFGAISSVLNDILSRLDKVEAEVQIDRLITGRLQCLQTYVTQQLIRAAEIRASANLAATKMSECVLGQSKRVDFCGKGYHLMSFPQSAPHGVVFLHVTYVPAQEKNFTTAPAICHDGKAHFPREGVFVSNGTHWFVTQRNFYEPQIITTDNTFVSGNCDVVIGIVNNTVYDPLQPELDSFKEELDKYFKNHTSPDVDLGDISGINASVVNIQKEIDRLNEVAKNLNESLIDLQELGKYEQYIKGGGGSDIIKLLNEQVNKEMQSSNLYMSMSSWCYTHSLDGAGLFLFDHAAEEYEHAKKLIIFLNENNVPVQLTSISAPEHKFEGLTQIFQKAYEHEQHISESINNIVDHAIKSKDHATFNFLQWYVAEQHEEEVLFKDILDKIELIGNENHGLYLADQYVKGIAKSRKS

SEQ ID NO: 5331 - protein, 1379 aa, Artificial Sequence
  SARS-CoV-2/Finland/FIN-313/2020__EPI_ISL_414641 spike protein (1-1211)(Q965C_S1003C) Ferritin construct
MFVFLVLLPLVSSQCVNLTTRTQLPPAYTNSFTRGVYYPDKVFRSSVLHSTQDLFLPFFSNVTWFHAIHVSGTNGTKRFDNPVLPFNDGVYFASTEKSNIIRGWIFGTTLDSKTQSLLIVNNATNVVIKVCEFQFCNDPFLGVYYHKNNKSWMESEFRVYSSANNCTFEYVSQPFLMDLEGKQGNFKNLREFVFKNIDGYFKIYSKHTPINLVRDLPQGFSALEPLVDLPIGINITRFKTLLALHRSYLTPGDSSSGWTAGAAAYYVGYLQPRTFLLKYNENGTITDAVDCALDPLSETKCTLKSFTVEKGIYQTSNFRVQPTESIVRFPNITNLCPFGEVFNATRFASVYAWNRKRISNCVADYSVLYNSASFSTFKCYGVSPTKLNDLCFTNVYADSFVIRGDEVRQIAPGQTGKIADYNYKLPDDFTGCVIAWNSNNLDSKVGGNYNYLYRLFRKSNLKPFERDISTEIYQAGSTPCNGVEGFNCYFPLQSYGFQPTNGVGYQPYRVVVLSFELLHAPATVCGPKKSTNLVKNKCVNFNFNGLTGTGVLTESNKKFLPFQQFGRDIADTTDAVRDPQTLEILDITPCSFGGVSVITPGTNTSNQVAVLYQGVNCTEVPVAIHADQLTPTWRVYSTGSNVFQTRAGCLIGAEHVNNSYECDIPIGAGICASYQTQTNSPRRARSVASQSIIAYTMSLGAENSVAYSNNSIAIPTNFTISVTTEILPVSMTKTSVDCTMYICGDSTECSNLLLQYGSFCTQLNRALTGIAVEQDKNTQEVFAQVKQIYKTPPIKDFGGFNFSQILPDPSKPSKRSFIEDLLFNKVTLADAGFIKQYGDCLGDIAARDLICAQKFNGLTVLPPLLTDEMIAQYTSALLAGTITSGWTFGAGAALQIPFAMQMAYRFNGIGVTQNVLYENQKLIANQFNSAIGKIQDSLSSTASALGKLQDVVNQNAQALNTLVKCLSSNFGAISSVLNDILSRLDKVEAEVQIDRLITGRLQCLQTYVTQQLIRAAEIRASANLAATKMSECVLGQSKRVDFCGKGYHLMSFPQSAPHGVVFLHVTYVPAQEKNFTTAPAICHDGKAHFPREGVFVSNGTHWFVTQRNFYEPQIITTDNTFVSGNCDVVIGIVNNTVYDPLQPELDSFKEELDKYFKNHTSPDVDLGDISGINASVVNIQKEIDRLNEVAKNLNESLIDLQELGKYEQYIKGGGGSDIIKLLNEQVNKEMQSSNLYMSMSSWCYTHSLDGAGLFLFDHAAEEYEHAKKLIIFLNENNVPVQLTSISAPEHKFEGLTQIFQKAYEHEQHISESINNIVDHAIKSKDHATFNFLQWYVAEQHEEEVLFKDILDKIELIGNENHGLYLADQYVKGIAKSRKS

SEQ ID NO: 5332 - protein, 1379 aa, Artificial Sequence
  SARS-CoV-2/Netherlands/ZuidHolland_2/2020__EPI_ISL_414556 spike protein (1-1211)(Q965C_S1003C) Ferritin construct
MFVFLVLLPLVSSQCVNLTTRTQLPPAYTNSFTRGVYYPDKVFRSSVLHSTQDLFLPFFSNVTWFHAIHVSGTNGTKRFDNPVLPFNDGVYFASTEKSNIIRGWIFGTTLDSKTQSLLIVNNATNVVIKVCEFQFCNDPFLGVYYHKNNKSWMESEFRVYSSANNCTFEYVSQPFLMDLEGKQGNFKNLREFVFKNIDGYFKIYSKHTPINLVRDLPQGFSALEPLVDLPIGINITRFQTLLALHRSYLTPGDSSSGWTAGAAAYYVGYLQPRTFLLKYNENGTITDAVDCALDPLSETKCTLKSFTVEKGIYQTSNFRVQPTESIVRFPNITNLCPFGEVFNATRFASVYAWNRKRISNCVADYSVLYNSASFSTFKCYGVSPTKLNDLCFTNVYADSFVIRGDEVRQIAPGQTGKIADYNYKLPDDFTGCVIAWNSNNLDSKVGGNYNYLYRLFRKSNLKPFERDISTEIYQAGSTPCNGVEGFNCYFPLQSYGFQPTNGVGYQPYRVVVLSFELLHAPATVCGPKKSTNLVKNKCVNFNFNGLTGTGVLTESNKKFLPFQQFGRDIADTTDAVRDPQTLEILDITPCSFGGVSVITPGTNTSNQVAVLYQGVNCTEVPVAIHADQLTPTWRVYSTGSNVFQTRAGCLIGAEHVNNSYECDIPIGAGICASYQTQTNSPRRARSVASQSIIAYTMSLGAENSVAYSNNSIAIPTNFTISVTTEILPVSMTKTSVDCTMYICGDSTECSNLLLQYGSFCTQLNRALTGIALEQDKNTQEVFAQVKQIYKTPPIKDFGGFNFSQILPDPSKPSKRSFIEDLLFNKVTLADAGFIKQYGDCLGDIAARDLICAQKFNGLTVLPPLLTDEMIAQYTSALLAGTITSGWTFGAGAALQIPFAMQMAYRFNGIGVTQNVLYENQKLIANQFNSAIGKIQDSLSSTASALGKLQDVVNQNAQALNTLVKCLSSNFGAISSVLNDILSRLDKVEAEVQIDRLITGRLQCLQTYVTQQLIRAAEIRASANLAATKMSECVLGQSKRVDFCGKGYHLMSFPQSAPHGVVFLHVTYVPAQEKNFTTAPAICHDGKAHFPREGVFVSNGTHWFVTQRNFYEPQIITTDNTFVSGNCDVVIGIVNNTVYDPLQPELDSFKEELDKYFKNHTSPDVDLGDISGINASVVNIQKEIDRLNEVAKNLNESLIDLQELGKYEQYIKGGGGSDIIKLLNEQVNKEMQSSNLYMSMSSWCYTHSLDGAGLFLFDHAAEEYEHAKKLIIFLNENNVPVQLTSISAPEHKFEGLTQIFQKAYEHEQHISESINNIVDHAIKSKDHATFNFLQWYVAEQHEEEVLFKDILDKIELIGNENHGLYLADQYVKGIAKSRKS

SEQ ID NO: 5333 - protein, 1379 aa, Artificial Sequence
  SARS-CoV-2/USA/WA-UW31/2020__EPI_ISL_414618 spike protein (1-1211)(Q965C_S1003C) Ferritin construct
MFVFLVLLPLVSSQCVNLTTRTQLPPAYTNSFTRGVYYPDKVFRSSVLHSTQDLFLPFFSNVTWFHAIHVSGTNGTKRFDNPVLPFNDGVYFASTEKSNIIRGWIFGTTLDSKTQSLLIVNNATNVVIKVCEFQFCNDPFLGVYYHKNNKSWMESEFRVYSSANNCTFEYVSQPFLMDLEGKQGNFKNLREFVFKNIDGYFKIYSKHTPINLVRDLPQGFSALEPLVDLPIGINITRFQTLLALHRSYLTPGDSSSGWTAGAAAYYVGYLQPRTFLLKYNENGTITDAVDCALDPLSETKCTLKSFTVEKGIYQTSNFRVQPTESIVRFPNITNLCPFGEVFNATRFASVYAWNRKRISNCVADYSVLYNSASFSTFKCYGVSPTKLNDLCFTNVYADSFVIRGDEVRQIAPGQTGKIADYNYKLPDDFTGCVIAWNSNNLDSKVGGNYNYLYRLFRKSNLKPFERDISTEIYQAGSTPCNGAEGFNCYFPLQSYGFQPTNGVGYQPYRVVVLSFELLHAPATVCGPKKSTNLVKNKCVNFNFNGLTGTGVLTESNKKFLPFQQFGRDIADTTDAVRDPQTLEILDITPCSFGGVSVITPGTNTSNQVAVLYQDVNCTEVPVAIHADQLTPTWRVYSTGSNVFQTRAGCLIGAEHVNNSYECDIPIGAGICASYQTQTNSPRRARSVASQSIIAYTMSLGAENSVAYSNNSIAIPTNFTISVTTEILPVSMTKTSVDCTMYICGDSTECSNLLLQYGSFCTQLNRALTGIAVEQDKNTQEVFAQVKQIYKTPPIKDFGGFNFSQILPDPSKPSKRSFIEDLLFNKVTLADAGFIKQYGDCLGDIAARDLICAQKFNGLTVLPPLLTDEMIAQYTSALLAGTITSGWTFGAGAALQIPFAMQMAYRFNGIGVTQNVLYENQKLIANQFNSAIGKIQDSLSSTASALGKLQDVVNQNAQALNTLVKCLSSNFGAISSVLNDILSRLDKVEAEVQIDRLITGRLQCLQTYVTQQLIRAAEIRASANLAATKMSECVLGQSKRVDFCGKGYHLMSFPQSAPHGVVFLHVTYVPAQEKNFTTAPAICHDGKAHFPREGVFVSNGTHWFVTQRNFYEPQIITTDNTFVSGNCDVVIGIVNNTVYDPLQPELDSFKEELDKYFKNHTSPDVDLGDISGINASVVNIQKEIDRLNEVAKNLNESLIDLQELGKYEQYIKGGGGSDIIKLLNEQVNKEMQSSNLYMSMSSWCYTHSLDGAGLFLFDHAAEEYEHAKKLIIFLNENNVPVQLTSISAPEHKFEGLTQIFQKAYEHEQHISESINNIVDHAIKSKDHATFNFLQWYVAEQHEEEVLFKDILDKIELIGNENHGLYLADQYVKGIAKSRKS

SEQ ID NO: 5334 - protein, 1379 aa, Artificial Sequence
  SARS-CoV-2/South Korea/SNU01/2020__EPI_ISL_411929 spike protein (1-1211)(Q965C_S1003C) Ferritin construct
MFVFLVLLPLVSSQCVNLTTRTQLPPAYTNSFTRGVYYPDKVFRSSVLHSTQDLFLPFFSNVTWFHAIHVSGTNGTKRFDNPVLPFNDGVYFASTEKSNIIRGWIFGTTLDSKTQSLLIVNNATNVVIKVCEFQFCNDPFLGVYYHKNNKSWMESEFRVYSSANNCTFEYVSQPFLMDLEGKQGNFKNLREFVFKNIDGYFKIYSKHTPINLVRDLPQGFWALEPLVDLPIGINITRFQTLLALHRSYLTPGDSSSGWTAGAAAYYVGYLQPRTFLLKYNENGTITDAVDCALDPLSETKCTLKSFTVEKGIYQTSNFRVQPTESIVRFPNITNLCPFGEVFNATRFASVYAWNRKRISNCVADYSVLYNSASFSTFKCYGVSPTKLNDLCFTNVYADSFVIRGDEVRQIAPGQTGKIADYNYKLPDDFTGCVIAWNSNNLDSKVGGNYNYLYRLFRKSNLKPFERDISTEIYQAGSTPCNGVEGFNCYFPLQSYGFQPTNGVGYQPYRVVVLSFELLHAPATVCGPKKSTNLVKNKCVNFNFNGLTGTGVLTESNKKFLPFQQFGRDIADTTDAVRDPQTLEILDITPCSFGGVSVITPGTNTSNQVAVLYQDVNCTEVPVAIHADQLTPTWRVYSTGSNVFQTRAGCLIGAEHVNNSYECDIPIGAGICASYQTQTNSPRRARSVASQSIIAYTMSLGAENSVAYSNNSIAIPTNFTISVTTEILPVSMTKTSVDCTMYICGDSTECSNLLLQYGSFCTQLNRALTGIAVEQDKNTQEVFAQVKQIYKTPPIKDFGGFNFSQILPDPSKPSKRSFIEDLLFNKVTLADAGFIKQYGDCLGDIAARDLICAQKFNGLTVLPPLLTDEMIAQYTSALLAGTITSGWTFGAGAALQIPFAMQMAYRFNGIGVTQNVLYENQKLIANQFNSAIGKIQDSLSSTASALGKLQDVVNQNAQALNTLVKCLSSNFGAISSVLNDILSRLDKVEAEVQIDRLITGRLQCLQTYVTQQLIRAAEIRASANLAATKMSECVLGQSKRVDFCGKGYHLMSFPQSAPHGVVFLHVTYVPAQEKNFTTAPAICHDGKAHFPREGVFVSNGTHWFVTQRNFYEPQIITTDNTFVSGNCDVVIGIVNNTVYDPLQPELDSFKEELDKYFKNHTSPDVDLGDISGINASVVNIQKEIDRLNEVAKNLNESLIDLQELGKYEQYIKGGGGSDIIKLLNEQVNKEMQSSNLYMSMSSWCYTHSLDGAGLFLFDHAAEEYEHAKKLIIFLNENNVPVQLTSISAPEHKFEGLTQIFQKAYEHEQHISESINNIVDHAIKSKDHATFNFLQWYVAEQHEEEVLFKDILDKIELIGNENHGLYLADQYVKGIAKSRKS

SEQ ID NO: 5335 - protein, 1379 aa, Artificial Sequence
  SARS-CoV-2/China/WF0004/2020__EPI_ISL_413694 spike protein (1-1211)(Q965C_S1003C) Ferritin construct
MFVFLVLLPLVSSQCVNLTTRTQLPPAYTNSFTRGVYYPDKVFRSSVLHSTQDLFLPFFSNVTWFHAIHVSGTNGTKRFDNPVLPFNDGVYFASTEKSNIIRGWIFGTTLDSKTQSLLIVNNATNVVIKVCEFQFCNDPFLGVYYHKNNKSWTESEFRVYSSANNCTFEYVSQPFLMDLEGKQGNFKNLREFVFKNIDGYFKIYSKHTPINLVRDLPQGFSALEPLVDLPIGINITRFQTLLALHRSYLTPGDSSSGWTAGAAAYYVGYLQPRTFLLKYNENGTITDAVDCALDPLSETKCTLKSFTVEKGIYQTSNFRVQPTESIVRFPNITNLCPFGEVFNATRFASVYAWNRKRISNCVADYSVLYNSASFSTFKCYGVSPTKLNDLCFTNVYADSFVIRGDEVRQIAPGQTGKIADYNYKLPDDFTGCVIAWNSNNLDSKVGGNYNYLYRLFRKSNLKPFERDISTEIYQAGSTPCNGVEGFNCYFPLQSYGFQPTNGVGYQPYRVVVLSFELLHAPATVCGPKKSTNLVKNKCVNFNFNGLTGTGVLTESNKKFLPFQQFGRDIADTTDAVRDPQTLEILDITPCSFGGVSVITPGTNTSNQVAVLYQDVNCTEVPVAIHADQLTPTWRVYSTGSNVFQTRAGCLIGAEHVNNSYECDIPIGAGICASYQTQTNSPRRARSVASQSIIAYTMSLGAENSVAYSNNSIAIPTNFTISVTTEILPVSMTKTSVDCTMYICGDSTECSNLLLQYGSFCTQLNRALTGIAVEQDKNTQEVFAQVKQIYKTPPIKDFGGFNFSQILPDPSKPSKRSFIEDLLFNKVTLADAGFIKQYGDCLGDIAARDLICAQKFNGLTVLPPLLTDEMIAQYTSALLAGTITSGWTFGAGAALQIPFAMQMAYRFNGIGVTQNVLYENQKLIANQFNSAIGKIQDSLSSTASALGKLQDVVNQNAQALNTLVKCLSSNFGAISSVLNDILSRLDKVEAEVQIDRLITGRLQCLQTYVTQQLIRAAEIRASANLAATKMSECVLGQSKRFDFCGKGYHLMSFPQSAPHGVVFLHVTYVPAQEKNFTTAPAICHDGKAHFPREGVFVSNGTHWFVTQRNFYEPQIITTDNTFVSGNCDVVIGIVNNTVYDPLQPELDSFKEELDKYFKNHTSPDVDLGDISGINASVVNIQKEIDRLNEVAKNLNESLIDLQELGKYEQYIKGGGGSDIIKLLNEQVNKEMQSSNLYMSMSSWCYTHSLDGAGLFLFDHAAEEYEHAKKLIIFLNENNVPVQLTSISAPEHKFEGLTQIFQKAYEHEQHISESINNIVDHAIKSKDHATFNFLQWYVAEQHEEEVLFKDILDKIELIGNENHGLYLADQYVKGIAKSRKS

SEQ ID NO: 5336 - protein, 1379 aa, Artificial Sequence
  SARS-CoV-2/China/WF0028/2020__EPI_ISL_413791 spike protein (1-1211)(Q965C_S1003C) Ferritin construct
MFVFLVLLPLVSSQCVNLTTRTQLPPAYTNSFTRGVYYPDKVFRSSVLHSTQDLFLPFFSNVTWFHAIHVSGTNGTKRFDNPVLPFNDGVYFASTEKSNIIRGWIFGTTLDSKTQSLLIVNNATNVVIKVCEFQFCNDPFLGVYYHKNNKSWMESEFRVYSSANNCTFEYVSQPFLMDLEGKQGNFKNLREFVFKNIDGYFKIYSKHTPINLVRDLPQGFSALEPLVDLPIGINITRFQTLLALHRSYLTPGDSSSGWTAGAAAYYVGYLQPRTFLLKYNENGTITDAVDCALDPLSETKCTLKSFTVEKGIYQTSNFRVQPTESIVRFPNITNLCPFGEVFNATRFASVYAWNRKRISNCVADYSVLYNSASFSTFKCYGVSPTKLNDLCFTNVYADSFVIRGDEVRQIAPGQTGKIADYNYKLPDDFTGCVIAWNSNNLDSKVGGNYNYLYRLFRKSNLKPFERDISTEIYQAGSTPCNGVEGFNCYFPLQSYGFQPTNGVGYQPYRVVVLSFELLHAPATVCGPKKSTNLVKNKCVNFNFNGLTGTGVLTESNKKFLPFQQFGRDIADTTDAVRDPQTLEILDITPCSFGGVSVITPGTNTSNQVAVLYQDVNCTEVPVAIHADQLTPTWRVYSTGSNVFQTRAGCLIGAEHVNNSYECDIPIGAGICASYQTQTNSPRRARSVASQSIIAYTMSLGAENSVAYSNNSIAIPTNFTISVTTEILPVSMTKTSVDCTMYICGDSTECSNLLLQYGSFCTQLNRALTGIAVEQDKNTQEVFAQVKQIYKTPPIKDFGGFNFSQILPDPSKPSKRSFIEDLLFNKVTLADAGFIKQYGDCLGDIAARDLICAQKFNGLTVLPPLLTDEMIAQYTSALLAGTITSGWTFGAGAALQIPFAMQMAYRFNGIGVTQNVLYENQKLIANQFNSAIGKIQDSLSSTASALGKLQDVVNQNAQALNTLVKCLSSNFGAISSVLNDILSRLDKVEAEVQIDRLITGRLQCLQTYVTQQLIRAAEIRASANLAATKMSECVLGQSKRVDFCGKGYHLMSFPQSAPHGVVFLHVTYVPAQEKNFTTAPAICHDGKAHFPREGVFVSNGTHWFVTQRNFYEPQIITTDNTFVSGNCDVVIGIVNNTVYDPLQPELESFKEELDKYFKNHTSPDVDLGDISGINASVVNIQKEIDRLNEVAKNLNESLIDLQELGKYEQYIKGGGGSDIIKLLNEQVNKEMQSSNLYMSMSSWCYTHSLDGAGLFLFDHAAEEYEHAKKLIIFLNENNVPVQLTSISAPEHKFEGLTQIFQKAYEHEQHISESINNIVDHAIKSKDHATFNFLQWYVAEQHEEEVLFKDILDKIELIGNENHGLYLADQYVKGIAKSRKS

SEQ ID NO: 5337 - protein, 1379 aa, Artificial Sequence
  SARS-CoV-2/2019-nCoV/USA-CruiseA-18/2020__MT159716.1 spike protein (1-1211)(Q965C_S1003C) Ferritin construct
MFVFLVLLPLVSSQCVNLTTRTQLPPAYTNSFTRGVYYPDKVFRSSVLHSTQDLFLPFFSNVTWFHAIHVSGTNGTKRFDNPVLPFNDGVYFASTEKSNIIRGWIFGTTLDSKTQSLLIVNNATNVVIKVCEFQFCNDPFLGVYYHKNNKSWMESELRVYSSANNCTFEYVSQPFLMDLEGKQGNFKNLREFVFKNIDGYFKIYSKHTPINLVRDLPQGFSALEPLVDLPIGINITRFQTLLALHRSYLTPGDSSSGWTAGAAAYYVGYLQPRTFLLKYNENGTITDAVDCALDPLSETKCTLKSFTVEKGIYQTSNFRVQPTESIVRFPNITNLCPFGEVFNATRFASVYAWNRKRISNCVADYSVLYNSASFSTFKCYGVSPTKLNDLCFTNVYADSFVIRGDEVRQIAPGQTGKIADYNYKLPDDFTGCVIAWNSNNLDSKVGGNYNYLYRLFRKSNLKPFERDISTEIYQAGSTPCNGVEGFNCYFPLQSYGFQPTNGVGYQPYRVVVLSFELLHAPATVCGPKKSTNLVKNKCVNFNFNGLTGTGVLTESNKKFLPFQQFGRDIADTTDAVRDPQTLEILDITPCSFGGVSVITPGTNTSNQVAVLYQDVNCTEVPVAIHADQLTPTWRVYSTGSNVFQTRAGCLIGAEHVNNSYECDIPIGAGICASYQTQTNSPRRARSVASQSIIAYTMSLGAENSVAYSNNSIAIPTNFTISVTTEILPVSMTKTSVDCTMYICGDSTECSNLLLQYGSFCTQLNRALTGIAVEQDKNTQEVFAQVKQIYKTPPIKDFGGFNFSQILPDPSKPSKRSFIEDLLFNKVTLADAGFIKQYGDCLGDIAARDLICAQKFNGLTVLPPLLTDEMIAQYTSALLAGTITSGWTFGAGAALQIPFAMQMAYRFNGIGVTQNVLYENQKLIANQFNSAIGKIQDSLSSTASALGKLQDVVNQNAQALNTLVKCLSSNFGAISSVLNDILSRLDKVEAEVQIDRLITGRLQCLQTYVTQQLIRAAEIRASANLAATKMSECVLGQSKRVDFCGKGYHLMSFPQSAPHGVVFLHVTYVPAQEKNFTTAPAICHDGKAHFPREGVFVSNGTHWFVTQRNFYEPQIITTDNTFVSGNCDVVIGIVNNTVYDPLQPELDSFKEELDKYFKNHTSPDVDLGDISGINASVVNIQKEIDRLNEVAKNLNESLIDLQELGKYEQYIKGGGGSDIIKLLNEQVNKEMQSSNLYMSMSSWCYTHSLDGAGLFLFDHAAEEYEHAKKLIIFLNENNVPVQLTSISAPEHKFEGLTQIFQKAYEHEQHISESINNIVDHAIKSKDHATFNFLQWYVAEQHEEEVLFKDILDKIELIGNENHGLYLADQYVKGIAKSRKS

SEQ ID NO: 5338 - protein, 1379 aa, Artificial Sequence
  SARS-CoV-2/SARS-CoV-2/Yunnan-01/human/2020/CHN__MT049951.1 spike protein (1-1211)(Q965C_S1003C) Ferritin construct
MFVFLVLLPLVSSQCVNLTTRTQLPPANTNSFTRGVYYPDKVFRSSVLHSTQDLFLPFFSNVTWFHAIHVSGTNGTKRFDNPVLPFNDGVYFASTEKSNIIRGWIFGTTLDSKTQSLLIVNNATNVVIKVCEFQFCNDPFLGVYYHKNNKSWMESEFRVYSSANNCTFEYVSQPFLMDLEGKQGNFKNLREFVFKNIDGYFKIYSKHTPINLVRDLPQGFSALEPLVDLPIGINITRFQTLLALHRSYLTPGDSSSGWTAGAAAYYVGYLQPRTFLLKYNENGTITDAVDCALDPLSETKCTLKSFTVEKGIYQTSNFRVQPTESIVRFPNITNLCPFGEVFNATRFASVYAWNRKRISNCVADYSVLYNSASFSTFKCYGVSPTKLNDLCFTNVYADSFVIRGDEVRQIAPGQTGKIADYNYKLPDDFTGCVIAWNSNNLDSKVGGNYNYLYRLFRKSNLKPFERDISTEIYQAGSTPCNGVEGFNCYFPLQSYGFQPTNGVGYQPYRVVVLSFELLHAPATVCGPKKSTNLVKNKCVNFNFNGLTGTGVLTESNKKFLPFQQFGRDIADTTDAVRDPQTLEILDITPCSFGGVSVITPGTNTSNQVAVLYQDVNCTEVPVAIHADQLTPTWRVYSTGSNVFQTRAGCLIGAEHVNNSYECDIPIGAGICASYQTQTNSPRRARSVASQSIIAYTMSLGAENSVAYSNNSIAIPTNFTISVTTEILPVSMTKTSVDCTMYICGDSTECSNLLLQYGSFCTQLNRALTGIAVEQDKNTQEVFAQVKQIYKTPPIKDFGGFNFSQILPDPSKPSKRSFIEDLLFNKVTLADAGFIKQYGDCLGDIAARDLICAQKFNGLTVLPPLLTDEMIAQYTSALLAGTITSGWTFGAGAALQIPFAMQMAYRFNGIGVTQNVLYENQKLIANQFNSAIGKIQDSLSSTASALGKLQDVVNQNAQALNTLVKCLSSNFGAISSVLNDILSRLDKVEAEVQIDRLITGRLQCLQTYVTQQLIRAAEIRASANLAATKMSECVLGQSKRVDFCGKGYHLMSFPQSAPHGVVFLHVTYVPAQEKNFTTAPAICHDGKAHFPREGVFVSNGTHWFVTQRNFYEPQIITTDNTFVSGNCDVVIGIVNNTVYDPLQPELDSFKEELDKYFKNHTSPDVDLGDISGINASVVNIQKEIDRLNEVAKNLNESLIDLQELGKYEQYIKGGGGSDIIKLLNEQVNKEMQSSNLYMSMSSWCYTHSLDGAGLFLFDHAAEEYEHAKKLIIFLNENNVPVQLTSISAPEHKFEGLTQIFQKAYEHEQHISESINNIVDHAIKSKDHATFNFLQWYVAEQHEEEVLFKDILDKIELIGNENHGLYLADQYVKGIAKSRKS

SEQ ID NO: 5339 - protein, 1379 aa, Artificial Sequence
  SARS-CoV-2/USA/WA-UW292/2020__EPI_ISL_418077 spike protein (1-1211)(Q965C_S1003C) Ferritin construct
MFVFLVLLPLVSSQCVNLTTRTQLPPAYTNSFTRGVYYPDKVFRSSVLHSTQDLFLPFFSNVTWFHAIHVSGTNGTKRFDNPVLPFNDGVYFASTEKSNIIRGWIFGTTLDSKTQSLLIVNNATNVVIKVCEFQFCNDPFLGVYYHKNNKSWMESEFRVYSSANNCTFEYVSQPFLMDLEGKQGNFKNLREFVFKNIDGYFKIYSKHTPINLVRDLPQGFSALEPLVDLPIGINITRFQTLLALHRSYLTPGDSSSGWTAGAAAYYVGYLQPRTFLLKYNENGTITDAVDCALDPLSETKCTLKSFTVEKGIYQTSNFRVQPTESIVRFPNITNLCPFGEVFNATRFASVYAWNRKRISNCVADYSVLYNSASFSTFKCYGVSPTKLNDLCFTNVYADSFVIRGDEVRQIAPGQTGKIADYNYKLPDDFTGCVIAWNSNNLDSKVGGNYNYLYRLFRKSNLKPFERDISTEIYQASSTPCNGVEGFNCYFPLQSYGFQPTNGVGYQPYRVVVLSFELLHAPATVCGPKKSTNLVKNKCVNFNFNGLTGTGVLTESNKKFLPFQQFGRDIADTTDAVRDPQTLEILDITPCSFGGVSVITPGTNTSNQVAVLYQDVNCTEVPVAIHADQLTPTWRVYSTGSNVFQTRAGCLIGAEHVNNSYECDIPIGAGICASYQTQTNSPRRARSVASQSIIAYTMSLGAENSVAYSNNSIAIPTNFTISVTTEILPVSMTKTSVDCTMYICGDSTECSNLLLQYGSFCTQLNRALTGIAVEQDKNTQEVFAQVKQIYKTPPIKDFGGFNFSQILPDPSKPSKRSFIEDLLFNKVTLADAGFIKQYGDCLGDIAARDLICAQKFNGLTVLPPLLTDEMIAQYTSALLAGTITSGWTFGAGAALQIPFAMQMAYRFNGIGVTQNVLYENQKLIANQFNSAIGKIQDSLSSTASALGKLQDVVNQNAQALNTLVKCLSSNFGAISSVLNDILSRLDKVEAEVQIDRLITGRLQCLQTYVTQQLIRAAEIRASANLAATKMSECVLGQSKRVDFCGKGYHLMSFPQSAPHGVVFLHVTYVPAQEKNFTTAPAICHDGKAHFPREGVFVSNGTHWFVTQRNFYEPQIITTDNTFVSGNCDVVIGIVNNTVYDPLQPELDSFKEELDKYFKNHTSPDVDLGDISGINASVVNIQKEIDRLNEVAKNLNESLIDLQELGKYEQYIKGGGGSDIIKLLNEQVNKEMQSSNLYMSMSSWCYTHSLDGAGLFLFDHAAEEYEHAKKLIIFLNENNVPVQLTSISAPEHKFEGLTQIFQKAYEHEQHISESINNIVDHAIKSKDHATFNFLQWYVAEQHEEEVLFKDILDKIELIGNENHGLYLADQYVKGIAKSRKS

SEQ ID NO: 5340 - protein, 1379 aa, Artificial Sequence
  SARS-CoV-2/Iceland/192/2020__EPI_ISL_417819 spike protein (1-1211)(Q965C_S1003C) Ferritin construct
MFVFFVLLPLVSSQCVNLTTRTQLPPAYTNSFTRGVYYPDKVFRSSVLHSTQDLFLPFFSNVTWFHAIHVSGTNGTKRFDNPVLPFNDGVYFASTEKSNIIRGWIFGTTLDSKTQSLLIVNNATNVVIKVCEFQFCNDPFLGVYYHKNNKSWMESEFRVYSSANNCTFEYVSQPFLMDLEGKQGNFKNLREFVFKNIDGYFKIYSKHTPINLVRDLPQGFSALEPLVDLPIGINITRFQTLLALHRSYLTPGDSSSGWTAGAAAYYVGYLQPRTFLLKYNENGTITDAVDCALDPLSETKCTLKSFTVEKGIYQTSNFRVQPTESIVRFPNITNLCPFGEVFNATRFASVYAWNRKRISNCVADYSVLYNSASFSTFKCYGVSPTKLNDLCFTNVYADSFVIRGDEVRQIAPGQTGKIADYNYKLPDDFTGCVIAWNSNNLDSKVGGNYNYLYRLFRKSNLKPFERDISTEIYQAGSTPCNGVEGFNCYFPLQSYGFQPTNGVGYQPYRVVVLSFELLHAPATVCGPKKSTNLVKNKCVNFNFNGLTGTGVLTESNKKFLPFQQFGRDIADTTDAVRDPQTLEILDITPCSFGGVSVITPGTNTSNQVAVLYQGVNCTEVPVAIHADQLTPTWRVYSTGSNVFQTRAGCLIGAEHVNNSYECDIPIGAGICASYQTQTNSPRRARSVASQSIIAYTMSLGAENSVAYSNNSIAIPTNFTISVTTEILPVSMTKTSVDCTMYICGDSTECSNLLLQYGSFCTQLNRALTGIAVEQDKNTQEVFAQVKQIYKTPPIKDFGGFNFSQILPDPSKPSKRSFIEDLLFNKVTLADAGFIKQYGDCLGDIAARDLICAQKFNGLTVLPPLLTDEMIAQYTSALLAGTITSGWTFGAGAALQIPFAMQMAYRFNGIGVTQNVLYENQKLIANQFNSAIGKIQDSLSSTASALGKLQDVVNQNAQALNTLVKCLSSNFGAISSVLNDILSRLDKVEAEVQIDRLITGRLQCLQTYVTQQLIRAAEIRASANLAATKMSECVLGQSKRVDFCGKGYHLMSFPQSAPHGVVFLHVTYVPAQEKNFTTAPAICHDGKAHFPREGVFVSNGTHWFVTQRNFYEPQIITTDNTFVSGNCDVVIGIVNNTVYDPLQPELDSFKEELDKYFKNHTSPDVDLGDISGINASVVNIQKEIDRLNEVAKNLNESLIDLQELGKYEQYIKGGGGSDIIKLLNEQVNKEMQSSNLYMSMSSWCYTHSLDGAGLFLFDHAAEEYEHAKKLIIFLNENNVPVQLTSISAPEHKFEGLTQIFQKAYEHEQHISESINNIVDHAIKSKDHATFNFLQWYVAEQHEEEVLFKDILDKIELIGNENHGLYLADQYVKGIAKSRKS

SEQ ID NO: 5341 - protein, 1379 aa, Artificial Sequence
  SARS-CoV-2/Belgium/ULG-6939/2020__EPI_ISL_417020 spike protein (1-1211)(Q965C_S1003C) Ferritin construct
MFVFLVLLPLVSSQCVNLTTRTQLPPAYTNSFTRGVYYPDKVFRSSVLHSTQDLFLPFFSNVTWFHAIHVSGTNGTKRFDNPVLPFNDGVYFASTEKSNIIRGWIFGTTLDSKTQSLLIVNNATNVVIKVCEFQFCNDPFLGVYYHKNNKSWMESEFRVYSSANNCTFEYVSQPFLMDLEGKQGNFKNLREFVFKNIDGYFKIYSKHTPINLVRDLPQGFSALEPLVDLPIGINITRFQTLLALHRSYLTPGDSSSGWTAGAAAYYVGYLQPRTFLLKYNENGTITDAVDCALDPLSETKCTLKSFTVEKGIYQTSNFRVQPTESIVRFPNITNLCPFGEVFNATRFASVYAWNRKRISNCVADYSVLYNSASFSTFKCYGVSPTKLNDLCFTNVYADSFVIRGDEVRQIAPGQTGKIADYNYKLPDDFTGCVIAWNSNNLDSKVGGNYNYLYRLFRKSNLKPFERDISTEIYQAGSTPCNGVEGFNCYFPLQSYGFQPTNGVGYQPYRVVVLSFELLHAPATVCGPKKSTNLVKNKCVNFNFNGLTGTGVLTESNKKFLPFQQFGRDIADTTDAVRDPQTLEILDITPCSFGGVSVITPGTNTSNQVAVLYQGVNCTEVPVAIHADQLTPTWRVYSTGSNVFQTRAGCLIGAEHVNNSYECDIPIGAGICASYQTQTNSPRRARSVASQSIIAYTMSLGAENSVVYSNNSIAIPTNFTISVTTEILPVSMTKTSVDCTMYICGDSTECSNLLLQYGSFCTQLNRALTGIAVEQDKNTQEVFAQVKQIYKTPPIKDFGGFNFSQILPDPSKPSKRSFIEDLLFNKVTLADAGFIKQYGDCLGDIAARDLICAQKFNGLTVLPPLLTDEMIAQYTSALLAGTITSGWTFGAGAALQIPFAMQMAYRFNGIGVTQNVLYENQKLIANQFNSAIGKIQDSLSSTASALGKLQDVVNQNAQALNTLVKCLSSNFGAISSVLNDILSRLDKVEAEVQIDRLITGRLQCLQTYVTQQLIRAAEIRASANLAATKMSECVLGQSKRVDFCGKGYHLMSFPQSAPHGVVFLHVTYVPAQEKNFTTAPAICHDGKAHFPREGVFVSNGTHWFVTQRNFYEPQIITTDNTFVSGNCDVVIGIVNNTVYDPLQPELDSFKEELDKYFKNHTSPDVDLGDISGINASVVNIQKEIDRLNEVAKNLNESLIDLQELGKYEQYIKGGGGSDIIKLLNEQVNKEMQSSNLYMSMSSWCYTHSLDGAGLFLFDHAAEEYEHAKKLIIFLNENNVPVQLTSISAPEHKFEGLTQIFQKAYEHEQHISESINNIVDHAIKSKDHATFNFLQWYVAEQHEEEVLFKDILDKIELIGNENHGLYLADQYVKGIAKSRKS

SEQ ID NO: 5342 - protein, 1379 aa, Artificial Sequence
  SARS-CoV-2/France/HF2496/2020__EPI_ISL_418231 spike protein (1-1211)(Q965C_S1003C) Ferritin construct
MFVFLVLLPLVSSQCVNLTTRTQLPPAYTNSFTRGVYYPDKVFRSSVLHSTQDLFLPFFSNVTWFHAIHVSGTNGTKRFDNPVLPFNDGVYFASTEKSNIIRGWIFGTTLDSKTQSLLIVNNATNVVIKVCEFQFCNDPFLGVYYHKNNKSWMESEFRVYSSANNCTFEYVSQPFLMDLEGKQGNFKNLREFVFKNIDGYFKIYSKHTPINLVRDLPQGFSALEPLVDLPIGINITRFQTLLALHRSYLTPGDSSSGWTAGAAAYYVGYLQPRTFLLKYNENGTITDAVDCALDPLSETKCTLKSFTVEKGIYQTSNFRVQPTESIVRFPNITNLCPFGEVFNATRFASVYAWNRKRISNCVADYSVLYNSASFSTFKCYGVSPTKLNDLCFTNVYADSFVIRGDEVRQIAPGQTGKIADYNYKLPDDFTGCVIAWNSNNLDSKVGGNYNYLYRLFRKSNLKPFERDISTEIYQAGSTPCNGVEGFNCYFPLQSYGFQPTNGVGYQPYRVVVLSFELLHAPATVCGPKKSTNLVKNKCVNFNFNGLTGTGVLTESNKKFLPFQQFGRDIADTTDAVRDPQTLEILDITPCSFGGVSVITPGTNTSNQVAVLYQGVNCTEVPVAIHADQLTPTWRVYSTGSNVFQTRAGCLIGAEHVNNSYECDIPIGAGICASYQTQTNSPRRARSVASQSIIAYTMSLGAENSVAYSNNSIAIPTNFTISVTTEILPVSMTKTSVDCTMYICGDSTECSNLLLQYGSFCTQLNRALTGIAVEQDKNTQEVFAQVKQIYKTPPIKDFGGFNFSQILPDPSKPSKRSFIEDLLFNKVTLADAGFIKQYGDCLGDIVARDLICAQKFNGLTVLPPLLTDEMIAQYTSALLAGTITSGWTFGAGAALQIPFAMQMAYRFNGIGVTQNVLYENQKLIANQFNSAIGKIQDSLSSTASALGKLQDVVNQNAQALNTLVKCLSSNFGAISSVLNDILSRLDKVEAEVQIDRLITGRLQCLQTYVTQQLIRAAEIRASANLAATKMSECVLGQSKRVDFCGKGYHLMSFPQSAPHGVVFLHVTYVPAQEKNFTTAPAICHDGKAHFPREGVFVSNGTHWFVTQRNFYEPQIITTDNTFVSGNCDVVIGIVNNTVYDPLQPELDSFKEELDKYFKNHTSPDVDLGDISGINASVVNIQKEIDRLNEVAKNLNESLIDLQELGKYEQYIKGGGGSDIIKLLNEQVNKEMQSSNLYMSMSSWCYTHSLDGAGLFLFDHAAEEYEHAKKLIIFLNENNVPVQLTSISAPEHKFEGLTQIFQKAYEHEQHISESINNIVDHAIKSKDHATFNFLQWYVAEQHEEEVLFKDILDKIELIGNENHGLYLADQYVKGIAKSRKS

SEQ ID NO: 5343 - protein, 1379 aa, Artificial Sequence
  SARS-CoV-2/USA/WA-UW291/2020__EPI_ISL_418076 spike protein (1-1211)(Q965C_S1003C) Ferritin construct
MFVFLVLLPLVSSQCVNLTTRTQLPPAYTNSFTRGVYYPDKVFRSSVLHSTQDLFLPFFSNVTWFHAIHVSGTNGTKRFDNPVLPFNDGVYFASTEKSNIIRGWIFGTTLDSKTQSLLIVNNATNVVIKVCEFQFCNDPFLGVYYHKNNKSWMESEFRVYSSANNCTFEYVSQPFLMDLEGKQGNFKNLREFVFKNIDGYFKIYSKHTPINLVRDLPQGFSALEPLVDLPIGINITRFQTLLALHRSYLTPGDSSSGWTAGAAAYYVGYLQPRTFLLKYNENGTITDAVDCALDPLSETKCTLKSFTVEKGIYQTSNFRVQPTESIVRFPNITNLCPFGEVFNATRFASVYAWNRKRISNCVADYSVLYNSASFSTFKCYGVSPTKLNDLCFTNVYADSFVIRGDEVRQIAPGQTGKIADYNYKLPDDFTGCVIAWNSNNLDSKVGGNYNYLYRLFRKSNLKPFERDISTEIYQAGSTPCNGVEGFNCYFPLQSYGFQPTNGVGYQPYRVVVLSFELLHAPATVCGPKKSTNLVKNKCVNFNFNGLTGTGVLTESNKKFLPFQQFGRDIADTTDAVRDPQTLEILDITPCSFGGVSVITPGTNTSNQVAVLYQGVNCTEVPVAIHADQLTPTWRVYSTGSNVFQTRAGCLIGAEHVNNSYECDIPIGAGICASYQTQTNSPRRARSVASQSIIAYTMSLGAENSVAYSNNSIAIPTNFTISVTTEILPVSMTKTSVDCTMYICGDSTECSNLLLQYGSFCTQLNRALTGIAVEQDKNTQEVFAQVKQIYKTPPIKDFGGFNFSQILPDPSKPSKRSFIEDLLFNKVTLADAGFIKQYGDCLGDIAARDLICAQKFNGLTVLPPLLTDEMIAQYTSALLAGTITSGWTFGAGAALQIPFAMQMAYRFNGIGVTQNVLYENQKLIANQFNSAIGKIQYSLSSTASALGKLQDVVNQNAQALNTLVKCLSSNFGAISSVLNDILSRLDKVEAEVQIDRLITGRLQCLQTYVTQQLIRAAEIRASANLAATKMSECVLGQSKRVDFCGKGYHLMSFPQSAPHGVVFLHVTYVPAQEKNFTTAPAICHDGKAHFPREGVFVSNGTHWFVTQRNFYEPQIITTDNTFVSGNCDVVIGIVNNTVYDPLQPELDSFKEELDKYFKNHTSPDVDLGDISGINASVVNIQKEIDRLNEVAKNLNESLIDLQELGKYEQYIKGGGGSDIIKLLNEQVNKEMQSSNLYMSMSSWCYTHSLDGAGLFLFDHAAEEYEHAKKLIIFLNENNVPVQLTSISAPEHKFEGLTQIFQKAYEHEQHISESINNIVDHAIKSKDHATFNFLQWYVAEQHEEEVLFKDILDKIELIGNENHGLYLADQYVKGIAKSRKS

SEQ ID NO: 5344 - protein, 1379 aa, Artificial Sequence; identical to SEQ ID NO: 5307
  SARS-CoV-2/Portugal/PT0034/2020__EPI_ISL_418019 spike protein (1-1211)(Q965C_S1003C) Ferritin construct

SEQ ID NO: 5345 - protein, 1379 aa, Artificial Sequence
  SARS-CoV-2/Iceland/202/2020__EPI_ISL_417750 spike protein (1-1211)(Q965C_S1003C) Ferritin construct
MFVFLVLLPLVSSQCVNLTTRTQLPPAYTNSFTRGVYYPDKVFRSSVLHSTQDLFLPFFSNVTWFHAIHVSGTNGTKRFDNPVLPFNDGVYFASTEKSNIIRGWIFGTTLDSKTQSLLIVNNATNVVIKVCEFQFCNDPFLGVYYHKNNKSWMESEFRVYSSANNCTFEYVSQPFLMDLEGKQGNFKNLREFVFKNIDGYFKIYSKHTPINLVRDLPQGFSALEPLVDLPIGINITRFQTLLALHRSYLTPGDSSSGWTAGAAAYYVGYLQPRTFLLKYNENGTITDAVDCALDPLSETKCTLKSFTVEKGIYQTSNFRVQPTESIVRFPNITNLCPFGEVFNATRFASVYAWNRKRISNCVADYSVLYNSASFSTFKCYGVSPTKLNDLCFTNVYADSFVIRGDEVRQIAPGQTGKIADYNYKLPDDFTGCVIAWNSNNLDSKVGGNYNYLYRLFRKSNLKPFERDISTEIYQAGSTPCNGVEGFNCYFPLQSYGFQPTNGVGYQPYRVVVLSFELLHAPATVCGPKKSTNLVKNKCVNFNFNGLTGTGVLTESNKKFLPFQQFGRDIADTTDAVRDPQTLEILDITPCSFGGVSVITPGTNTSNQVAVLYQDVNCTEVPVAIHADQLTPTWRVYSTGSNVFQTRAGCLIGAEHVNNSYECDIPIGAGICASYQTQTNSPRRARSVASQSIIAYTMSLGAENSVAYSNNSIAIPTNFTISVTTEILPVSMTKTSVDCTMYICGDSTECSNLLLQYGSFCTQLNRALTGIAVEQDKNTQEVFAQVKQIYKTPPIKDFGGFNFSQILPDPSKPSKRSFIEDLLFNKVTLADAGFIKQYGDCLGDIAARDLICAQKFNGLTVLPPLLTDEMIAQYTSALLAGTITSGWTFGAGAALQIPFAMQMAYRFNGIGVTQNVLYENQKLIANQFNSAIGKIQDSLSSTASALGKLQDVVNQNAQALNTLVKCLSSNFGAISSVLNDILSRLDKVEAEVQIDRLITGRLQCLQTYVTQQLIRAAEIRASANLAATKMSECVLGQSKRVDFCGKGYHLMSFPQSAPHGVVFLHVTYVPAQEKNFTTAPAICHDGKAHFPREGVFVSNGTHWFVTQRNFYEPQIITTDNTFVSGNCDVVIGIVNNTVYDPLQPELDSFKEELDKYFKNHTSPDVDLGDIPGINASVVNIQKEIDRLNEVAKNLNESLIDLQELGKYEQYIKGGGGSDIIKLLNEQVNKEMQSSNLYMSMSSWCYTHSLDGAGLFLFDHAAEEYEHAKKLIIFLNENNVPVQLTSISAPEHKFEGLTQIFQKAYEHEQHISESINNIVDHAIKSKDHATFNFLQWYVAEQHEEEVLFKDILDKIELIGNENHGLYLADQYVKGIAKSRKS

SEQ ID NO: 5346 - protein, 1379 aa, Artificial Sequence
  SARS-CoV-2/USA/WA-UW261/2020__EPI_ISL_418046 spike protein (1-1211)(Q965C_S1003C) Ferritin construct
MFVFLVLLPLVSSQCVNLTTRTQLPPAYTNSFTRGVYYPDKVFRSSVLHSTQDLFLPFFSNVTWFHAIHVSGTNGTKRFDNPVLPFNDGVYFASTEKSNIIRGWIFGTTLDSKTQSLLIVNNATNVVIKVCEFQFCNDPFLGVYYHKNNKSWMESEFRVYSSANNCTFEYVSQPFLMDLEGKQGNFKNLREFVFKNIDGYFKIYSKHTPINLVRDLPQGFSALEPLVDLPIGINITRFQTLLALHRSYLTPGDSSSGWTAGAAAYYVGYLQPRTFLLKYNENGTITDAVDCALDPLSETKCTLKSFTVEKGIYQTSNFRVQPTESIVRFPNITNLCPFGEVFNATRFTSVYAWNRKRISNCVADYSVLYNSASFSTFKCYGVSPTKLNDLCFTNVYADSFVIRGDEVRQIAPGQTGKIADYNYKLPDDFTGCVIAWNSNNLDSKVGGNYNYLYRLFRKSNLKPFERDISTEIYQAGSTPCNGVEGFNCYFPLQSYGFQPTNGVGYQPYRVVVLSFELLHAPATVCGPKKSTNLVKNKCVNFNFNGLTGTGVLTESNKKFLPFQQFGRDIADTTDAVRDPQTLEILDITPCSFGGVSVITPGTNTSNQVAVLYQDVNCTEVPVAIHADQLTPTWRVYSTGSNVFQTRAGCLIGAEHVNNSYECDIPIGAGICASYQTQTNSPRRARSVASQSIIAYTMSLGAENSVAYSNNSIAIPTNFTISVTTEILPVSMTKTSVDCTMYICGDSTECSNLLLQYGSFCTQLNRALTGIAVEQDKNTQEVFAQVKQIYKTPPIKDFGGFNFSQILPDPSKPSKRSFIEDLLFNKVTLADAGFIKQYGDCLGDIAARDLICAQKFNGLTVLPPLLTDEMIAQYTSALLAGTITSGWTFGAGAALQIPFAMQMAYRFNGIGVTQNVLYENQKLIANQFNSAIGKIQDSLSSTASALGKLQDVVNQNAQALNTLVKCLSSNFGAISSVLNDILSRLDKVEAEVQIDRLITGRLQCLQTYVTQQLIRAAEIRASANLAATKMSECVLGQSKRVDFCGKGYHLMSFPQSAPHGVVFLHVTYVPAQEKNFTTAPAICHDGKAHFPREGVFVSNGTHWFVTQRNFYEPQIITTDNTFVSGNCDVVIGIVNNTVYDPLQPELDSFKEELDKYFKNHTSPDVDLGDISGINASVVNIQKEIDRLNEVAKNLNESLIDLQELGKYEQYIKGGGGSDIIKLLNEQVNKEMQSSNLYMSMSSWCYTHSLDGAGLFLFDHAAEEYEHAKKLIIFLNENNVPVQLTSISAPEHKFEGLTQIFQKAYEHEQHISESINNIVDHAIKSKDHATFNFLQWYVAEQHEEEVLFKDILDKIELIGNENHGLYLADQYVKGIAKSRKS

SEQ ID NO: 5347 - protein, 1379 aa, Artificial Sequence
  SARS-CoV-2/Portugal/PT0035/2020__EPI_ISL_418020 spike protein (1-1211)(Q965C_S1003C) Ferritin construct
MFVFLVLLPLVSSQCVNLTTRTQLPPAYTNSFTRGVYYPDKVFRSSVLHSTQDLFLPFFSNVTWFHAIHVSGTNGTKRFDNPVLPFNDGVYFASTEKSNIIRGWIFGTTLDSKTQSLLIVNNATNVVIKVCEFQFCNDPFLGVYYHKNNKSWMESEFRVYSSANNCTFEYVSQPFLMDLEGKQGNFKNLREFVFKNIDGYFKIYSKHTPINLVRDLPQGFSALEPLVDLPIGINITRFQTLLALHRSYLTPGDSSSGWTAGAAAYYVGYLQPRTFLLKYNENGTITDAVDCALDPLSETKCTLKSFTVEKGIYQTSNFRVQPTESIVRFPNITNLCPFGEVFNATRFASVYAWNRKRISNCVADYSVLYNSASFSTFKCYGVSPTKLNDLCFTNVYADSFVIRGDEVRQIAPGQTGKIADYNYKLPDDFTGCVIAWNSNNLDSKVGGNYNYLYRLFRKSNLKPFERDISTEIYQAGSTPCNGVEGFNCYFPLQSYGFQPTNGVGYQPYRVVVLSFELLHAPATVCGPKKSTNLVKNKCVNFNFNGLTGTGVLTESNKKFLPFQQFGRDIADTTDAVRDPQTLEILDITPCSFGGVSVITPGTNTSNQVAVLYQDVNCTEVPVAIHADQLTPTWRVYSTGSNVFQTRAGCLIGAEHVNNSYECDIPIGAGICASYQTQTNSPRRARSVASQSIIAYTMSLGAENSVAYSNNSIAIPTNFTISVTTEILPVSMTKTSVDCTMYICGDSTECSNLLLQYGSFCTQLNRALTGIAVEQDKNTQEVFAQVKQIYKTPPIKDFGGFNFSQILPDPSKPSKRSFIEDLLFNKVTLADAGFIKQYGDCLGDISARDLICAQKFNGLTVLPPLLTDEMIAQYTSALLAGTITSGWTFGAGAALQIPFAMQMAYRFNGIGVTQNVLYENQKLIANQFNSAIGKIQDSLSSTASALGKLQDVVNQNAQALNTLVKCLSSNFGAISSVLNDILSRLDKVEAEVQIDRLITGRLQCLQTYVTQQLIRAAEIRASANLAATKMSECVLGQSKRVDFCGKGYHLMSFPQSAPHGVVFLHVTYVPAQEKNFTTAPAICHDGKAHFPREGVFVSNGTHWFVTQRNFYEPQIITTDNTFVSGNCDVVIGIVNNTVYDPLQPELDSFKEELDKYFKNHTSPDVDLGDISGINASVVNIQKEIDRLNEVAKNLNESLIDLQELGKYEQYIKGGGGSDIIKLLNEQVNKEMQSSNLYMSMSSWCYTHSLDGAGLFLFDHAAEEYEHAKKLIIFLNENNVPVQLTSISAPEHKFEGLTQIFQKAYEHEQHISESINNIVDHAIKSKDHATFNFLQWYVAEQHEEEVLFKDILDKIELIGNENHGLYLADQYVKGIAKSRKS

SEQ ID NO: 5348 - protein, 1379 aa, Artificial Sequence
  SARS-CoV-2/USA/NY-NYUMC7/2020__EPI_ISL_418192 spike protein (1-1211)(Q965C_S1003C) Ferritin construct
MFVFLVLLPLVSSQCVNLTTRTQLPPAYTNSFTRGVYYPDKVFRSSVLHSTQDLFLPFFSNVTWFHAIHVSGTNGTKRFDNPVLPFNDGVYFASTEKSNIIRGWIFGTTLDSKTQSLLIVNNATNVVIKVCEFQFCNDPFLGVYHHKNNKSWMESEFRVYSSANNCTFEYVSQPFLMDLEGKQGNFKNLREFVFKNIDGYFKIYSKHTPINLVRDLPQGFSALEPLVDLPIGINITRFQTLLALHRSYLTPGDSSSGWTAGAAAYYVGYLQPRTFLLKYNENGTITDAVDCALDPLSETKCTLKSFTVEKGIYQTSNFRVQPTESIVRFPNITNLCPFGEVFNATRFASVYAWNRKRISNCVADYSVLYNSASFSTFKCYGVSPTKLNDLCFTNVYADSFVIRGDEVRQIAPGQTGKIADYNYKLPDDFTGCVIAWNSNNLDSKVGGNYNYLYRLFRKSNLKPFERDISTEIYQAGSTPCNGVEGFNCYFPLQSYGFQPTNGVGYQPYRVVVLSFELLHAPATVCGPKKSTNLVKNKCVNFNFNGLTGTGVLTESNKKFLPFQQFGRDIADTTDAVRDPQTLEILDITPCSFGGVSVITPGTNTSNQVAVLYQGVNCTEVPVAIHADQLTPTWRVYSTGSNVFQTRAGCLIGAEHVNNSYECDIPIGAGICASYQTQTNSPRRARSVASQSIIAYTMSLGAENSVAYSNNSIAIPTNFTISVTTEILPVSMTKTSVDCTMYICGDSTECSNLLLQYGSFCTQLNRALTGIAVEQDKNTQEVFAQVKQIYKTPPIKDFGGFNFSQILPDPSKPSKRSFIEDLLFNKVTLADAGFIKQYGDCLGDIAARDLICAQKFNGLTVLPPLLTDEMIAQYTSALLAGTITSGWTFGAGAALQIPFAMQMAYRFNGIGVTQNVLYENQKLIANQFNSAIGKIQDSLSSTASALGKLQDVVNQNAQALNTLVKCLSSNFGAISSVLNDILSRLDKVEAEVQIDRLITGRLQCLQTYVTQQLIRAAEIRASANLAATKMSECVLGQSKRVDFCGKGYHLMSFPQSAPHGVVFLHVTYVPAQEKNFTTAPAICHDGKAHFPREGVFVSNGTHWFVTQRNFYEPQIITTDNTFVSGNCDVVIGIVNNTVYDPLQPELDSFKEELDKYFKNHTSPDVDLGDISGINASVVNIQKEIDRLNEVAKNLNESLIDLQELGKYEQYIKGGGGSDIIKLLNEQVNKEMQSSNLYMSMSSWCYTHSLDGAGLFLFDHAAEEYEHAKKLIIFLNENNVPVQLTSISAPEHKFEGLTQIFQKAYEHEQHISESINNIVDHAIKSKDHATFNFLQWYVAEQHEEEVLFKDILDKIELIGNENHGLYLADQYVKGIAKSRKS

SEQ ID NO: 5349 - protein, 1379 aa, Artificial Sequence
  SARS-CoV-2/Iceland/189/2020__EPI_ISL_417709 spike protein (1-1211)(Q965C_S1003C) Ferritin construct
MFVFLVLLPLVSSQCVNLTTRTQLPPAYTNSFTRGVYYPDKVFRSSVLHSTQDLFLPFFSNVTWFHAIHVSGTNGTKRFDNPVLPFNDGVYFASTEKSNIIRGWIFGTTLDSKTQSLLIVNNATNVVIKVCEFQFCNDPFLGVYYHKNNKSWMESEFRVYSSANNCTFEYVSQPFLMDLEGKQGNFKNLREFVFKNIDGYFKIYSKHTPINLVRDLPQGFSALEPLVDLPIGINITRFQTLLALHRSYLTPGDSSSGWTAGAAAYYVGYLQPRTFLLKYNENGTITDAVDCALDPLSETKCTLKSFTVEKGIYQTSNFRVQPTESIVRFPNITNLCPFGEVFNATRFASVYAWNRKRISNCVADYSVLYNSASFSTFKCYGVSPTKLNDLCFTNVYADSFVIRGDEVRQIAPGQTGKIADYNYKLPDDFTGCVIAWNSNNLDSKVGGNYNYLYRLFRKSNLKPFERDISTEIYQAGSTPCNGVEGFNCYFPLQSYGFQPTNGVGYQPYRVVVLSFELLHAPATVCGPKKSTNLVKNKCVNFNFNGLTGTGVLTESNKKFLPFQQFGRDIADTTDAVRDPQTLEILDITPCSFGGVSVITPGTNTSNQVAVLYQGVNCTEVPVAIHADQLTPTWRVYSTGSNVFQTRAGCLIGAEHVNNSYECDIPIGAGICASYQTQTNSPRRARSVASQSIIAYTMSLGAENSVAYSNNSIAIPTNFTISVTTEILPVSMTKTSVDCTMYICGDSTECSNLLLQYGSFCTQLNRALTGIAVEQDKNTQEVFAQVKQIYKTPPIKDFGGFNFSQILPDPSKPSKRSFIEDLLFNKVTLADAGFTKQYGDCLGDIAARDLICAQKFNGLTVLPPLLTDEMIAQYTSALLAGTITSGWTFGAGAALQIPFAMQMAYRFNGIGVTQNVLYENQKLIANQFNSAIGKIQDSLSSTASALGKLQDVVNQNAQALNTLVKCLSSNFGAISSVLNDILSRLDKVEAEVQIDRLITGRLQCLQTYVTQQLIRAAEIRASANLAATKMSECVLGQSKRVDFCGKGYHLMSFPQSAPHGVVFLHVTYVPAQEKNFTTAPAICHDGKAHFPREGVFVSNGTHWFVTQRNFYEPQIITTDNTFVSGNCDVVIGIVNNTVYDPLQPELDSFKEELDKYFKNHTSPDVDLGDISGINASVVNIQKEIDRLNEVAKNLNESLIDLQELGKYEQYIKGGGGSDIIKLLNEQVNKEMQSSNLYMSMSSWCYTHSLDGAGLFLFDHAAEEYEHAKKLIIFLNENNVPVQLTSISAPEHKFEGLTQIFQKAYEHEQHISESINNIVDHAIKSKDHATFNFLQWYVAEQHEEEVLFKDILDKIELIGNENHGLYLADQYVKGIAKSRKS

SEQ ID NO: 5350 - protein, 1379 aa, Artificial Sequence
  SARS-CoV-2/Australia/NSW56/2020__EPI_ISL_417408 spike protein (1-1211)(Q965C_S1003C) Ferritin construct
MFVFLVLLPLVSSQCVNLTTRTQLPPAYTNSFTRGVYYPDKVFRSSVLHSTQDLFLPFFSNVTWFHAIHVSGTNGTKRFDNPVLPFNDGVYFASTEKSNIIRGWIFGTTLDSKTQSLLIVNNATNVVIKVCEFQFCNDPFLGVYYHKNNKSWMESEFRVYSSANNCTFEYVSQPFLMDLEGKQGNFKNLREFVFKNIDGYFKIYSKHTPINLVRDLPQGFSALEPLVDLPIGINITRFQTLLALHRSYLTPGDSSSGWTAGAAAYYVGYLQPRTFLLKYNENGTITDAVDCALDPLSETKCTLKSFTVEKGIYQTSNFRVQPTESIVRFPNITNLCPFGEVFNATRFASVYAWNRKRISNCVADYSVLYNSASFSTFKCYGVSPTKLNDLCFTNVYADSFVIRGDEVRQIAPGQTGKIADYNYKLPDDFTGCVIAWNSNNLDSKVGGNYNYLYRLFRKSNLKPFERDISTEIYQAGSTPCNGVEGFNCYFPLQSYGFQPTNGVGYQPYRVVVLSFELLHAPATVCGPKKSTNLVKNKCVNFNFNGLTGTGVLTESNKKFLPFQQFGRDIADTTDAVRDPQTLEILDITPCSFGGVSVITPGTNTSNQVAVLYQDVNCTEVPVAIHADQLTPTWRVYSTGSNVFQTRAGCLIGAEHVNNSYECDIPIGAGICASYQTQTNSPRRARSVASQSIIAYTMSLGAENSVAYSNNSIAIPTNFTISVTTEILPVSMTKTSVDCTMYICGDSTECSNLLLQYGSFCTQLNRALTGIAVEQDKNTQEVFAQVKQIYKTPPIKDFGGFNFSQILPDSSKPSKRSFIEDLLFNKVTLADAGFIKQYGDCLGDIAARDLICAQKFNGLTVLPPLLTDEMIAQYTSALLAGTITSGWTFGAGAALQIPFAMQMAYRFNGIGVTQNVLYENQKLIANQFNSAIGKIQDSLSSTASALGKLQDVVNQNAQALNTLVKCLSSNFGAISSVLNDILSRLDKVEAEVQIDRLITGRLQCLQTYVTQQLIRAAEIRASANLAATKMSECVLGQSKRVDFCGKGYHLMSFPQSAPHGVVFLHVTYVPAQEKNFTTAPAICHDGKAHFPREGVFVSNGTHWFVTQRNFYEPQIITTDNTFVSGNCDVVIGIVNNTVYDPLQPELDSFKEELDKYFKNHTSPDVDLGDISGINASVVNIQKEIDRLNEVAKNLNESLIDLQELGKYEQYIKGGGGSDIIKLLNEQVNKEMQSSNLYMSMSSWCYTHSLDGAGLFLFDHAAEEYEHAKKLIIFLNENNVPVQLTSISAPEHKFEGLTQIFQKAYEHEQHISESINNIVDHAIKSKDHATFNFLQWYVAEQHEEEVLFKDILDKIELIGNENHGLYLADQYVKGIAKSRKS

SEQ ID NO: 5351 - protein, 1379 aa, Artificial Sequence
  SARS-CoV-2/Iceland/280/2020__EPI_ISL_417608 spike protein (1-1211)(Q965C_S1003C) Ferritin construct
MFVFLVLLPLVSSQCVNLTTRTQLPPAYTNSFTRGVYYPDKVFRSSVLHSTQDLFLPFFSNVTWFHAIHVSGTNGTKRFDNPVLPFNDGVYFASTEKSNIIRGWIFGTTLDSKTQSLLIVNNATNVVIKVCEFQFCNDPFLGVYYHKNNKSWMESEFRVYSSANNCTFEYVSQPFLMDLEGKQGNFKNLREFVFKNIDGYFKIYSKHTPINLVRDLPQGFSALEPLVDLPIGINITRFQTLLALHRSYLTPGDSSSGWTAGAAAYYVGYLQPRTFLLKYNENGTITDAVDCALDPLSETKCTLKSFTVEKGIYQTSNFRVQPTESIVRFPNITNLCPFGEVFNATRFASVYAWNRKRISNCVADYSVLYNSASFSTFKCYGVSPTKLNDLCFTNVYADSFVIRGDEVRQIAPGQTGKIADYNYKLPDDFTGCVIAWNSNNLDSKVGGNYNYLYRLFRKSNLKPFERDISTEIYQAGSTPCNGVEGFNCYFPLQSYGFQPTNGVGYQPYRVVVLSFELLHAPATVCGPKKSTNLVKNKCVNFNFNGLTGTGVLTESNKKFLPFQQFGRDIADTTDAVRDPQTLEILDITPCSFGGVSVITPGTNTSNQVAVLYQGVNCTEVPVAIHADQLTPTWRVYSTGSNVFQTRAGCLIGAEHVNNSYECDIPIGAGICASYHTQTNSPRRARSVASQSIIAYTMSLGAENSVAYSNNSIAIPTNFTISVTTEILPVSMTKTSVDCTMYICGDSTECSNLLLQYGSFCTQLNRALTGIAVEQDKNTQEVFAQVKQIYKTPPIKDFGGFNFSQILPDPSKPSKRSFIEDLLFNKVTLADAGFIKQYGDCLGDIAARDLICAQKFNGLTVLPPLLTDEMIAQYTSALLAGTITSGWTFGAGAALQIPFAMQMAYRFNGIGVTQNVLYENQKLIANQFNSAIGKIQDSLSSTASALGKLQDVVNQNAQALNTLVKCLSSNFGAISSVLNDILSRLDKVEAEVQIDRLITGRLQCLQTYVTQQLIRAAEIRASANLAATKMSECVLGQSKRVDFCGKGYHLMSFPQSAPHGVVFLHVTYVPAQEKNFTTAPAICHDGKAHFPREGVFVSNGTHWFVTQRNFYEPQIITTDNTFVSGNCDVVIGIVNNTVYDPLQPELDSFKEELDKYFKNHTSPDVDLGDISGINASVVNIQKEIDRLNEVAKNLNESLIDLQELGKYEQYIKGGGGSDIIKLLNEQVNKEMQSSNLYMSMSSWCYTHSLDGAGLFLFDHAAEEYEHAKKLIIFLNENNVPVQLTSISAPEHKFEGLTQIFQKAYEHEQHISESINNIVDHAIKSKDHATFNFLQWYVAEQHEEEVLFKDILDKIELIGNENHGLYLADQYVKGIAKSRKS

SEQ ID NO: 5352 - protein, 1379 aa, Artificial Sequence; identical to SEQ ID NO: 5307
  SARS-CoV-2/Iceland/247/2020__EPI_ISL_417575 spike protein (1-1211)(Q965C_S1003C) Ferritin construct

SEQ ID NO: 5353 - protein, 1379 aa, Artificial Sequence
  SARS-CoV-2/Iceland/238/2020__EPI_ISL_417566 spike protein (1-1211)(Q965C_S1003C) Ferritin construct
MFVFLVLLPLVSSQCVNLTTRTQLPPAYTNSFTRGVYYPDKVFRSSVLHSTQDLFLPFFSNVTWFHAIHVSGTNGTKRFDNPVLPFNDGVYFASTEKSNIIRGWIFGTTLDSKTQSLLIVNNATNVVIKVCEFQFCNDPFLGVYYHKNNKSWMESEFRVYSSANNCTFEYVSQPFLMDLEGKQGNFKNLREFVFKNIDGYFKIYSKHTPINLVRDLPQGFSALEPLVDLPIGINITRFQTLLALHRSYLTPGDSSSGWTAGAAAYYVGYLQPRTFLLKYNENGTITDAVDCALDPLSETKCTLKSFTVEKGIYQTSNFRVQPTESIVRFPNITNLCPFGEVFNATRFASVYAWNRKRISNCVADYSVLYNSASFSTFKCYGVSPTKLNDLCFTNVYADSFVIRGDEVRQIAPGQTGKIADYNYKLPDDFTGCVIAWNSNNLDSKVGGNYNYLYRLFRKSNLKPFERDISTEIYQAGSTPCNGVEGFNCYFPLQSYGFQPTNGVGYQPYRVVVLSFELLHAPATVCGPKKSTNLVKNKCVNFNFNGLTGTGVLTESNKKFLPFQQFGRDIADTTDAVRDPQTLEILDITPCSFGGVSVITPGTNTSNQVAVLYQGVNCTEVPVAIHADQLTPTWRVYSTGSNVFQTRAGCLIGAEHVNNSYECDIPIGAGICASYQTQTNSPRRARSVASQSIIAYTMSLGAENSVAYSNNSIAIPTNFTISVTTEILPVSMTKTSVDCTMYICGDSTECSNLLLQYGSFCTQLNRALTGIAVEQDKNTQEVFAQVKQIYKTPPIKDFGGFNFSQILPDPSKPSKRSFIEDLLFNKVTLADVGFIKQYGDCLGDIAARDLICAQKFNGLTVLPPLLTDEMIAQYTSALLAGTITSGWTFGAGAALQIPFAMQMAYRFNGIGVTQNVLYENQKLIANQFNSAIGKIQDSLSSTASALGKLQDVVNQNAQALNTLVKCLSSNFGAISSVLNDILSRLDKVEAEVQIDRLITGRLQCLQTYVTQQLIRAAEIRASANLAATKMSECVLGQSKRVDFCGKGYHLMSFPQSAPHGVVFLHVTYVPAQEKNFTTAPAICHDGKAHFPREGVFVSNGTHWFVTQRNFYEPQIITTDNTFVSGNCDVVIGIVNNTVYDPLQPELDSFKEELDKYFKNHTSPDVDLGDISGINASVVNIQKEIDRLNEVAKNLNESLIDLQELGKYEQYIKGGGGSDIIKLLNEQVNKEMQSSNLYMSMSSWCYTHSLDGAGLFLFDHAAEEYEHAKKLIIFLNENNVPVQLTSISAPEHKFEGLTQIFQKAYEHEQHISESINNIVDHAIKSKDHATFNFLQWYVAEQHEEEVLFKDILDKIELIGNENHGLYLADQYVKGIAKSRKS

SEQ ID NO: 5354 - protein, 1379 aa, Artificial Sequence
  SARS-CoV-2/Greece/16/2020__EPI_ISL_418265 spike protein (1-1211)(Q965C_S1003C) Ferritin construct
MFVFLVLLPLVSSQCVNLTTRTQLPPAYTNSFTRGVYYPDKVFRSSVLHSTQDLFLPFFSNVTWFHAIHVSGTNGTKRFDNPVLPFNDGVYFASTEKSNIIRGWIFGTTLDSKTQSLLIVNNATNVVIKVCEFQFCNDPFLGVYYHKNNKSWMESEFRVYSSANNCTFEYVSQPFLMDLEGKQGNFKNLREFVFKNVDGYFKIYSKHTPINLVRDLPQGFSALEPLVDLPIGINITRFQTLLALHRSYLTPGDSSSGWTAGAAAYYVGYLQPRTFLLKYNENGTITDAVDCALDPLSETKCTLKSFTVEKGIYQTSNFRVQPTESIVRFPNITNLCPFGEVFNATRFASVYAWNRKRISNCVADYSVLYNSASFSTFKCYGVSPTKLNDLCFTNVYADSFVIRGDEVRQIAPGQTGKIADYNYKLPDDFTGCVIAWNSNNLDSKVGGNYNYLYRLFRKSNLKPFERDISTEIYQAGSTPCNGVEGFNCYFPLQSYGFQPTNGVGYQPYRVVVLSFELLHAPATVCGPKKSTNLVKNKCVNFNFNGLTGTGVLTESNKKFLPFQQFGRDIADTTDAVRDPQTLEILDITPCSFGGVSVITPGTNTSNQVAVLYQDVNCTEVPVAIHADQLTPTWRVYSTGSNVFQTRAGCLIGAEHVNNSYECDIPIGAGICASYQTQTNSPRRARSVASQSIIAYTMSLGAENSVAYSNNSIAIPTNFTISVTTEILPVSMTKTSVDCTMYICGDSTECSNLLLQYGSFCTQLNRALTGIAVEQDKNTQEVFAQVKQIYKTPPIKDFGGFNFSQILPDPSKPSKRSFIEDLLFNKVTLADAGFIKQYGDCLGDIAARDLICAQKFNGLTVLPPLLTDEMIAQYTSALLAGTITSGWTFGAGAALQIPFAMQMAYRFNGIGVTQNVLYENQKLIANQFNSAIGKIQDSLSSTASALGKLQDVVNQNAQALNTLVKCLSSNFGAISSVLNDILSRLDKVEAEVQIDRLITGRLQCLQTYVTQQLIRAAEIRASANLAATKMSECVLGQSKRVDFCGKGYHLMSFPQSAPHGVVFLHVTYVPAQEKNFTTAPAICHDGKAHFPREGVFVSNGTHWFVTQRNFYEPQIITTDNTFVSGNCDVVIGIVNNTVYDPLQPELDSFKEELDKYFKNHTSPDVDLGDISGINASVVNIQKEIDRLNEVAKNLNESLIDLQELGKYEQYIKGGGGSDIIKLLNEQVNKEMQSSNLYMSMSSWCYTHSLDGAGLFLFDHAAEEYEHAKKLIIFLNENNVPVQLTSISAPEHKFEGLTQIFQKAYEHEQHISESINNIVDHAIKSKDHATFNFLQWYVAEQHEEEVLFKDILDKIELIGNENHGLYLADQYVKGIAKSRKS

SEQ ID NO: 5355 - protein, 1379 aa, Artificial Sequence
  SARS-CoV-2/Iceland/319/2020__EPI_ISL_417648 spike protein (1-1211)(Q965C_S1003C) Ferritin construct
MFVFLVLLPLVSSQCVNLTTRTQLPPAYTNSFTRGVYYPDKVFRSSVLHSTQDLFLPFFSNVTWFHAIHVSGTNGTKRFDNPVLPFNDGVYFASTEKSNIIRGWIFGTTLDSKTQSLLIVNNATNVVIKVCEFQFCNDPFLGVYYHKNNKSWMESEFRVYSSANNCTFEYVSQPFLIDLEGKQGNFKNLREFVFKNIDGYFKIYSKHTPINLVRDLPQGFSALEPLVDLPIGINITRFQTLLALHRSYLTPGDSSSGWTAGAAAYYVGYLQPRTFLLKYNENGTITDAVDCALDPLSETKCTLKSFTVEKGIYQTSNFRVQPTESIVRFPNITNLCPFGEVFNATRFASVYAWNRKRISNCVADYSVLYNSASFSTFKCYGVSPTKLNDLCFTNVYADSFVIRGDEVRQIAPGQTGKIADYNYKLPDDFTGCVIAWNSNNLDSKVGGNYNYLYRLFRKSNLKPFERDISTEIYQAGSTPCNGVEGFNCYFPLQSYGFQPTNGVGYQPYRVVVLSFELLHAPATVCGPKKSTNLVKNKCVNFNFNGLTGTGVLTESNKKFLPFQQFGRDIADTTDAVRDPQTLEILDITPCSFGGVSVITPGTNTSNQVAVLYQGVNCTEVPVAIHADQLTPTWRVYSTGSNVFQTRAGCLIGAEHVNNSYECDIPIGAGICASYQTQTNSPRRARSVASQSIIAYTMSLGAENSVAYSNNSIAIPTNFTISVTTEILPVSMTKTSVDCTMYICGDSTECSNLLLQYGSFCTQLNRALTGIAVEQDKNTQEVFAQVKQIYKTPPIKDFGGFNFSQILPDPSKPSKRSFIEDLLFNKVTLADAGFIKQYGDCLGDIAARDLICAQKFNGLTVLPPLLTDEMIAQYTSALLAGTITSGWTFGAGAALQIPFAMQMAYRFNGIGVTQNVLYENQKLIANQFNSAIGKIQDSLSSTASALGKLQDVVNQNAQALNTLVKCLSSNFGAISSVLNDILSRLDKVEAEVQIDRLITGRLQCLQTYVTQQLIRAAEIRASANLAATKMSECVLGQSKRVDFCGKGYHLMSFPQSAPHGVVFLHVTYVPAQEKNFTTAPAICHDGKAHFPREGVFVSNGTHWFVTQRNFYEPQIITTDNTFVSGNCDVVIGIVNNTVYDPLQPELDSFKEELDKYFKNHTSPDVDLGDISGINASVVNIQKEIDRLNEVAKNLNESLIDLQELGKYEQYIKGGGGSDIIKLLNEQVNKEMQSSNLYMSMSSWCYTHSLDGAGLFLFDHAAEEYEHAKKLIIFLNENNVPVQLTSISAPEHKFEGLTQIFQKAYEHEQHISESINNIVDHAIKSKDHATFNFLQWYVAEQHEEEVLFKDILDKIELIGNENHGLYLADQYVKGIAKSRKS

SEQ ID NO: 5356 - protein, 1379 aa, Artificial Sequence
  SARS-CoV-2/Congo/94/2020__EPI_ISL_417947 spike protein (1-1211)(Q965C_S1003C) Ferritin construct
MFVFLVLLPLVSSQCVNLTTRTQLPPAYTNSFTRGVYYPDKVFRSSVLHSTQDLFLPFFSNVTWFHAIHVSGTNGTKRFDNPVLPFNDGVYFASTEKSNIIRGWIFGTTLDSKTQSLLIVNNATNVVIKVCEFQFCNDPFLGVYYHKNNKSWMESEFRVYSSANNCTFEYVSQPFLMDLEGKQGNFKNLREFVFKNIDGYFKIYSKHTPINLVRDLPQGFSALEPLVDLPIGINITRFQTLLALHRSYLTPGDSSSGWTAGAAAYYVGYLQPRTFLLKYNENGTITDAVDCALDPLSETKCTLKSFTVEKGIYQTSNFRVQPTESIVRFPNITNLCPFGEVFNATRFASVYAWNRKRISNCVADYSVLYNSASFSTFKCYGVSPTKLNDLCFTNVYADSFVIRGDEVRQIAPGQTGKIADYNYKLPDDFTGCVIAWNSNNLDSKVGGNYNYLYRLFRKSNLKPFERDISTEIYQAGSTPCNGVEGFNCYFPLQSYGFQPTNGVGYQPYRVVVLSFELLHAPATVCGPKKSTNLVKNKCVNFNFNGLTGTGVLTESNKKFLPFQQFGRDIADTTDAVRDPQTLEILDITPCSFGGVSVITPGTNTSNQVAVLYQGVNCTEVPVAIHADQLTPTWRVYSTGSNVFQTRAGCLIGAEHVNNSYECDIPIGAGICASYQTQTNSPRRARSVASQSIIAYTMSLGAENSVAYSNNSIAIPTNFTISVTTEILPVSMTKTSVDCTMYICGDSTECSNLLLQYGSFCTQLNRALTGIAVEQDKNTQEVFAQVKQIYKTPPIKDFGGFNFSQILPDPSKPSKRSFIEDILFNKVTLADAGFIKQYGDCLGDIAARDLICAQKFNGLTVLPPLLTDEMIAQYTSALLAGTITSGWTFGAGAALQIPFAMQMAYRFNGIGVTQNVLYENQKLIANQFNSAIGKIQDSLSSTASALGKLQDVVNQNAQALNTLVKCLSSNFGAISSVLNDILSRLDKVEAEVQIDRLITGRLQCLQTYVTQQLIRAAEIRASANLAATKMSECVLGQSKRVDFCGKGYHLMSFPQSAPHGVVFLHVTYVPAQEKNFTTAPAICHDGKAHFPREGVFVSNGTHWFVTQRNFYEPQIITTDNTFVSGNCDVVIGIVNNTVYDPLQPELDSFKEELDKYFKNHTSPDVDLGDISGINASVVNIQKEIDRLNEVAKNLNESLIDLQELGKYEQYIKGGGGSDIIKLLNEQVNKEMQSSNLYMSMSSWCYTHSLDGAGLFLFDHAAEEYEHAKKLIIFLNENNVPVQLTSISAPEHKFEGLTQIFQKAYEHEQHISESINNIVDHAIKSKDHATFNFLQWYVAEQHEEEVLFKDILDKIELIGNENHGLYLADQYVKGIAKSRKS

SEQ ID NO: 5357 - protein, 1379 aa, Artificial Sequence
  SARS-CoV-2/Congo/158/2020__EPI_ISL_417950 spike protein (1-1211)(Q965C_S1003C) Ferritin construct
MFVFLVLLPLVSSQCVNLTTRTQLPPAYTNSFTRGVYYPDKVFRSSVLHSTQDLFLPFFSNVTWFHAIHVSGTNGTKRFDNPVLPFNDGVYFASTEKSNIIRGWIFGTTLDSKTQSLLIVNNATNVVIKVCEFQFCNDPFLGVYYHKNNKSWMESEFRVYSSANNCTFEYVSQPFLMDLEGKQGNFKNLREFVFKNIDGYFKIYSKHTPINLVRDLPQGFSALEPLVDLPIGINITRFQTLLALHRSYLTPGDSSSGWTAGAAAYYVGYLQPRTFLLKYNENGTITDAVDCALDPLSETKCTLKSFTVEKGIYQTSNFRVQPTESIVRFPNITNLCPFGEVFNATRFASVYAWNRKRISNCVADYSVLYNSASFSTFKCYGVSPTKLNDLCFTNVYADSFVIRGDEVRQIAPGQTGKIADYNYKLPDDFTGCVIAWNSNNLDSKVGGNYNYLYRLFRKSNLKPFERDISTEIYQAGSTPCNGVEGFNCYFPLQSYGFQPTNGVGYQPYRVVVLSFELLHAPATVCGPKKSTNLVKNKCVNFNFNGLTGTGVLTESNKKFLPFQQFGRDIADTTDAVRDPQTLEILDITPCSFGGVSVITPGTNTSNQVAVLYQDVNCTEVPVAIHADQLTPTWRVYSTGSNVFQTRAGCLIGAEHVNNSYECDIPIGAGICASYQTQTNSPRRARSVASQSIIAYTMSLGAENSVAYSNNSIAIPTNFTISVTTEILPVSMTKTSVDCTMYICGDSTECSNLLLQYGSFCTQLNRALTGIAVEQDKNTQEVFAQVKQIYKTPPIKDFGGFNFSQILPDPSKPSKRSFIEDLLFNKVTLADAGFIKQYGDCLGDIAARDLICAQKFNGLTVLPPLLTDEMIAQYTSALLAGTITSGWTFGAGAALQIPFAMQMAYRFNGIGVTQNVLYENQKLIANQFNSAIGKIQDSLSSTASALGKLQDVVNQNAQALNTLVKCLSSNFGAISSVLNDILSRLDKVEAEVQIDRLITGRLQCLQTYVTQQLIRAAEIRASANLAATKMSECVLGQSKRVDFCGKGYHLMSFPQSAPHGVVFLHVTYVPAQEKNFTTAPAICHDGKAHFPREGVFVSNGTHWFVTQRNFYEPQIITTDNTFLSGNCDVVIGIVNNTVYDPLQPELDSFKEELDKYFKNHTSPDVDLGDISGINASVVNIQKEIDRLNEVAKNLNESLIDLQELGKYEQYIKGGGGSDIIKLLNEQVNKEMQSSNLYMSMSSWCYTHSLDGAGLFLFDHAAEEYEHAKKLIIFLNENNVPVQLTSISAPEHKFEGLTQIFQKAYEHEQHISESINNIVDHAIKSKDHATFNFLQWYVAEQHEEEVLFKDILDKIELIGNENHGLYLADQYVKGIAKSRKS

SEQ ID NO: 5358 - protein, 1379 aa, Artificial Sequence
  SARS-CoV-2/USA/UT-00034/2020__EPI_ISL_417977 spike protein (1-1211)(Q965C_S1003C) Ferritin construct
MFVFLVLLPLVSSQCVNLTTRTQLPPAYTNSFTRGVYYPDKVFRSSVLHSTQDLFLPFFSNVTWFHAIHVSGTNGTKRFDNPVLPFNDGVYFASTEKSNIIRGWIFGTTLDSKTQSLLIVNNATNVVIKVCEFQFCNDPFLGVYYYKNNKSWMESEFRVYSSANNCTFEYVSQPFLMDLEGKQGNFKNLREFVFKNIDGYFKIYSKHTPINLVRDLPQGFSALEPLVDLPIGINITRFQTLLALHRSYLTPGDSSSGWTAGAAAYYVGYLQPRTFLLKYNENGTITDAVDCALDPLSETKCTLKSFTVEKGIYQTSNFRVQPTESIVRFPNITNLCPFGEVFNATRFASVYAWNRKRISNCVADYSVLYNSASFSTFKCYGVSPTKLNDLCFTNVYADSFVIRGDEVRQIAPGQTGKIADYNYKLPDDFTGCVIAWNSNNLDSKVGGNYNYLYRLFRKSNLKPFERDISTEIYQAGSTPCNGVEGFNCYFPLQSYGFQPTNGVGYQPYRVVVLSFELLHAPATVCGPKKSTNLVKNKCVNFNFNGLTGTGVLTESNKKFLPFQQFGRDIADTTDAVRDPQTLEILDITPCSFGGVSVITPGTNTSNQVAVLYQGVNCTEVPVAIHADQLTPTWRVYSTGSNVFQTRAGCLIGAEHVNNSYECDIPIGAGICASYQTQTNSPRRARSVASQSIIAYTMSLGAENSVAYSNNSIAIPTNFTISVTTEILPVSMTKTSVDCTMYICGDSTECSNLLLQYGSFCTQLNRALTGIAVEQDKNTQEVFAQVKQIYKTPPIKDFGGFNFSQILPDPSKPSKRSFIEDLLFNKVTLADAGFIKQYGDCLGDIAARDLICAQKFNGLTVLPPLLTDEMIAQYTSALLAGTITSGWTFGAGAALQIPFAMQMAYRFNGIGVTQNVLYENQKLIANQFNSAIGKIQDSLSSTASALGKLQDVVNQNAQALNTLVKCLSSNFGAISSVLNDILSRLDKVEAEVQIDRLITGRLQCLQTYVTQQLIRAAEIRASANLAATKMSECVLGQSKRVDFCGKGYHLMSFPQSAPHGVVFLHVTYVPAQEKNFTTAPAICHDGKAHFPREGVFVSNGTHWFVTQRNFYEPQIITTDNTFVSGNCDVVIGIVNNTVYDPLQPELDSFKEELDKYFKNHTSPDVDLGDISGINASVVNIQKEIDRLNEVAKNLNESLIDLQELGKYEQYIKGGGGSDIIKLLNEQVNKEMQSSNLYMSMSSWCYTHSLDGAGLFLFDHAAEEYEHAKKLIIFLNENNVPVQLTSISAPEHKFEGLTQIFQKAYEHEQHISESINNIVDHAIKSKDHATFNFLQWYVAEQHEEEVLFKDILDKIELIGNENHGLYLADQYVKGIAKSRKS

SEQ ID NO: 5359 - protein, 1379 aa, Artificial Sequence
  SARS-CoV-2/USA/UT-00033/2020__EPI_ISL_417976 spike protein (1-1211)(Q965C_S1003C) Ferritin construct
MFVFLVLLPLVSSQCVNLTTRTQLPPAYTNSFTRGVYYPDKVFRSSVLHSTQDLFLPFFSNVTWFHAIHVSGTNGTKRFDNPVLPFNDGVYFASTEKSNIIRGWIFGTTLDSKTQSLLIVNNATNVVIKVCEFQFCNDPFLGVYYHKNNKSWMESEFRVYSSANNCTFEYVSQPFLMDLEGKQGNFKNLREFVFKNIDGYFKIYSKHTPINLVRDLPQGFSALEPLVDLPIGINITRFQTLLALHRSYLTPGDSSSGLTAGAAAYYVGYLQPRTFLLKYNENGTITDAVDCALDPLSETKCTLKSFTVEKGIYQTSNFRVQPTESIVRFPNITNLCPFGEVFNATRFASVYAWNRKRISNCVADYSVLYNSASFSTFKCYGVSPTKLNDLCFTNVYADSFVIRGDEVRQIAPGQTGKIADYNYKLPDDFTGCVIAWNSNNLDSKVGGNYNYLYRLFRKSNLKPFERDISTEIYQAGSTPCNGVEGFNCYFPLQSYGFQPTNGVGYQPYRVVVLSFELLHAPATVCGPKKSTNLVKNKCVNFNFNGLTGTGVLTESNKKFLPFQQFGRDIADTTDAVRDPQTLEILDITPCSFGGVSVITPGTNTSNQVAVLYQGVNCTEVPVAIHADQLTPTWRVYSTGSNVFQTRAGCLIGAEHVNNSYECDIPIGAGICASYQTQTNSPRRARSVASQSIIAYTMSLGAENSVAYSNNSIAIPTNFTISVTTEILPVSMTKTSVDCTMYICGDSTECSNLLLQYGSFCTQLNRALTGIAVEQDKNTQEVFAQVKQIYKTPPIKDFGGFNFSQILPDPSKPSKRSFIEDLLFNKVTLADAGFIKQYGDCLGDIAARDLICAQKFNGLTVLPPLLTDEMIAQYTSALLAGTITSGWTFGAGAALQIPFAMQMAYRFNGIGVTQNVLYENQKLIANQFNSAIGKIQDSLSSTASALGKLQDVVNQNAQALNTLVKCLSSNFGAISSVLNDILSRLDKVEAEVQIDRLITGRLQCLQTYVTQQLIRAAEIRASANLAATKMSECVLGQSKRVDFCGKGYHLMSFPQSAPHGVVFLHVTYVPAQEKNFTTAPAICHDGKAHFPREGVFVSNGTHWFVTQRNFYEPQIITTDNTFVSGNCDVVIGIVNNTVYDPLQPELDSFKEELDKYFKNHTSPDVDLGDISGINASVVNIQKEIDRLNEVAKNLNESLIDLQELGKYEQYIKGGGGSDIIKLLNEQVNKEMQSSNLYMSMSSWCYTHSLDGAGLFLFDHAAEEYEHAKKLIIFLNENNVPVQLTSISAPEHKFEGLTQIFQKAYEHEQHISESINNIVDHAIKSKDHATFNFLQWYVAEQHEEEVLFKDILDKIELIGNENHGLYLADQYVKGIAKSRKS

SEQ ID NO: 5360 - protein, 1379 aa, Artificial Sequence
  SARS-CoV-2/USA/WI-13/2020__EPI_ISL_417516 spike protein (1-1211)(Q965C_S1003C) Ferritin construct
MFVFLVLLPLVSSQCVNLTTRTQLPPAYTNSFTRGVYYPDKVFRSSVLHSTQDLFLPFFSNVTWFHAIHVSGTNGTKRFDNPVLPFNDGVYFASTEKSNIIRGWIFGTTLDSKTQSLLIVNNATNVVIKVCEFQFCNDPFLGVYYHKNNKSWMESEFRVYSSANNCTFEYVSQPFLMDLEGKQGNFKNLREFVFKNIDGYFKIYSKHTPINLVRDLPQGFSALEPLVDLPIGINITRFQTLLALHRSYLTPGDSSSGWTAGAAAYYVGYLQPRTFLLKYNENGTITDAVDCALDPLSETKCTLKSFTVEKGIYQTSNFRVLPTESIVRFPNITNLCPFGEVFNATRFASVYAWNRKRISNCVADYSVLYNSASFSTFKCYGVSPTKLNDLCFTNVYADSFVIRGDEVRQIAPGQTGKIADYNYKLPDDFTGCVIAWNSNNLDSKVGGNYNYLYRLFRKSNLKPFERDISTEIYQAGSTPCNGVEGFNCYFPLQSYGFQPTNGVGYQPYRVVVLSFELLHAPATVCGPKKSTNLVKNKCVNFNFNGLTGTGVLTESNKKFLPFQQFGRDIADTTDAVRDPQTLEILDITPCSFGGVSVITPGTNTSNQVAVLYQGVNCTEVPVAIHADQLTPTWRVYSTGSNVFQTRAGCLIGAEHVNNSYECDIPIGAGICASYQTQTNSPRRARSVASQSIIAYTMSLGAENSVAYSNNSIAIPTNFTISVTTEILPVSMTKTSVDCTMYICGDSTECSNLLLQYGSFCTQLNRALTGIAVEQDKNTQEVFAQVKQIYKTPPIKDFGGFNFSQILPDPSKPSKRSFIEDLLFNKVTLADAGFIKQYGDCLGDIAARDLICAQKFNGLTVLPPLLTDEMIAQYTSALLAGTITSGWTFGAGAALQIPFAMQMAYRFNGIGVTQNVLYENQKLIANQFNSAIGKIQDSLSSTASALGKLQDVVNQNAQALNTLVKCLSSNFGAISSVLNDILSRLDKVEAEVQIDRLITGRLQCLQTYVTQQLIRAAEIRASANLAATKMSECVLGQSKRVDFCGKGYHLMSFPQSAPHGVVFLHVTYVPAQEKNFTTAPAICHDGKAHFPREGVFVSNGTHWFVTQRNFYEPQIITTDNTFVSGNCDVVIGIVNNTVYDPLQPELDSFKEELDKYFKNHTSPDVDLGDISGINASVVNIQKEIDRLNEVAKNLNESLIDLQELGKYEQYIKGGGGSDIIKLLNEQVNKEMQSSNLYMSMSSWCYTHSLDGAGLFLFDHAAEEYEHAKKLIIFLNENNVPVQLTSISAPEHKFEGLTQIFQKAYEHEQHISESINNIVDHAIKSKDHATFNFLQWYVAEQHEEEVLFKDILDKIELIGNENHGLYLADQYVKGIAKSRKS

SEQ ID NO: 5361 - protein, 1378 aa, Artificial Sequence
  SARS-CoV-2/India/1-27/2020__EPI_ISL_413522 spike protein (1-1210)(Q964C_S1002C) Ferritin construct
MFVFLVLLPLVSSQCVNLTTRTQLPPAYTNSFTRGVYYPDKVFRSSVLHSTQDLFLPFFSNVTWFHAIHVSGTNGTKRFDNPVLPFNDGVYFASTEKSNIIRGWIFGTTLDSKTQSLLIVNNATNVVIKVCEFQFCNDPFLGVYHKNNKSWMESEFRVYSSANNCTFEYVSQPFLMDLEGKQGNFKNLREFVFKNIDGYFKIYSKHTPINLVRDLPQGFSALEPLVDLPIGINITRFQTLLALHRSYLTPGDSSSGWTAGAAAYYVGYLQPRTFLLKYNENGTITDAVDCALDPLSETKCTLKSFTVEKGIYQTSNFRVQPTESIVRFPNITNLCPFGEVFNATRFASVYAWNRKRISNCVADYSVLYNSASFSTFKCYGVSPTKLNDLCFTNVYADSFVIRGDEVIQIAPGQTGKIADYNYKLPDDFTGCVIAWNSNNLDSKVGGNYNYLYRLFRKSNLKPFERDISTEIYQAGSTPCNGVEGFNCYFPLQSYGFQPTNGVGYQPYRVVVLSFELLHAPATVCGPKKSTNLVKNKCVNFNFNGLTGTGVLTESNKKFLPFQQFGRDIADTTDAVRDPQTLEILDITPCSFGGVSVITPGTNTSNQVAVLYQDVNCTEVPVAIHADQLTPTWRVYSTGSNVFQTRAGCLIGAEHVNNSYECDIPIGAGICASYQTQTNSPRRARSVASQSIIAYTMSLGAENSVAYSNNSIAIPTNFTISVTTEILPVSMTKTSVDCTMYICGDSTECSNLLLQYGSFCTQLNRALTGIAVEQDKNTQEVFAQVKQIYKTPPIKDFGGFNFSQILPDPSKPSKRSFIEDLLFNKVTLADAGFIKQYGDCLGDIAARDLICAQKFNGLTVLPPLLTDEMIAQYTSALLAGTITSGWTFGAGAALQIPFAMQMAYRFNGIGVTQNVLYENQKLIANQFNSAIGKIQDSLSSTASALGKLQDVVNQNAQALNTLVKCLSSNFGAISSVLNDILSRLDKVEAEVQIDRLITGRLQCLQTYVTQQLIRAAEIRASANLAATKMSECVLGQSKRVDFCGKGYHLMSFPQSAPHGVVFLHVTYVPAQEKNFTTAPAICHDGKAHFPREGVFVSNGTHWFVTQRNFYEPQIITTDNTFVSGNCDVVIGIVNNTVYDPLQPELDSFKEELDKYFKNHTSPDVDLGDISGINASVVNIQKEIDRLNEVAKNLNESLIDLQELGKYEQYIKGGGGSDIIKLLNEQVNKEMQSSNLYMSMSSWCYTHSLDGAGLFLFDHAAEEYEHAKKLIIFLNENNVPVQLTSISAPEHKFEGLTQIFQKAYEHEQHISESINNIVDHAIKSKDHATFNFLQWYVAEQHEEEVLFKDILDKIELIGNENHGLYLADQYVKGIAKSRKS

SEQ ID NO: 5362 - protein, 1373 aa, Artificial Sequence
  SARS-CoV-2/pangolin/Guangxi/P4L/2017__EPI_ISL_410538 spike protein (1-1205)(Q959C_S997C) Ferritin construct
MFVFLFVLPLVSSQCVNLTTRTGIPPGYTNSSTRGVYYPDKVFRSSILHLTQDLFLPFFSNVTWFNTINYQGGFKKFDNPVLPFNDGVYFASTEKSNIIRGWIFGTTLDARTQSLLIVNNATNVVIKVCEFQFCTDPFLGVYYHNNNKTWVENEFRVYSSANNCTFEYISQPFLMDLEGKQGNFKNLREFVFKNVDGYFKIYSKHTPIDLVRDLPRGFAALEPLVDLPIGINITRFQTLLALHRSYLTPGNLESGWTTGAAAYYVGYLQQRTFLLSYNQNGTITDAVDCSLDPLSETKCTLKSLTVEKGIYQTSNFRVQPTISIVRFPNITNLCPFGEVFNASKFASVYAWNRKRISNCVADYSVLYNSTSFSTFKCYGVSPTKLNDLCFTNVYADSFVVKGDEVRQIAPGQTGVIADYNYKLPDDFTGCVIAWNSVKQDALTGGNYGYLYRLFRKSKLKPFERDISTEIYQAGSTPCNGQVGLNCYYPLERYGFHPTTGVNYQPFRVVVLSFELLNGPATVCGPKLSTTLVKDKCVNFNFNGLTGTGVLTTSKKQFLPFQQFGRDISDTTDAVRDPQTLEILDITPCSFGGVSVITPGTNTSNQVAVLYQDVNCTEVPMAIHAEQLTPAWRVYSAGANVFQTRAGCLVGAEHVNNSYECDIPVGAGICASYHSMSSLRSVNQRSIIAYTMSLGAENSVAYSNNSIAIPTNFTISVTTEILPVSMTKTSVDCTMYICGDSIECSNLLLQYGSFCTQLNRALTGIAVEQDKNTQEVFAQVKQIYKTPPIKDFGGFNFSQILPDPSKPSKRSFIEDLLFNKVTLADAGFIKQYGDCLGDIAARDLICAQKFNGLTVLPPLLTDEMIAQYTSALLAGTITSGWTFGAGAALQIPFAMQMAYRFNGIGVTQNVLYENQKLIANQFNSAIGKIQDSLSSTASALGKLQDVVNQNAQALNTLVKCLSSNFGAISSVLNDILSRLDKVEAEVQIDRLITGRLQCLQTYVTQQLIRAAEIRASANLAATKMSECVLGQSKRVDFCGKGYHLMSFPQSAPHGVVFLHVTYVPAQEKNFTTAPAICHEGKAHFPREGVFVSNGTHWFITQRNFYEPQIITTDNTFVSGSCDVVIGIVNNTVYDPLQPELDSFKEELDKYFKNHTSPDVDLGDISGINASVVNIQKEIDRLNEVAKNLNESPIDLQELGKYEQYIKGGGGSDIIKLLNEQVNKEMQSSNLYMSMSSWCYTHSLDGAGLFLFDHAAEEYEHAKKLIIFLNENNVPVQLTSISAPEHKFEGLTQIFQKAYEHEQHISESINNIVDHAIKSKDHATFNFLQWYVAEQHEEEVLFKDILDKIELIGNENHGLYLADQYVKGIAKSRKS

SEQ ID NO: 5363 - protein, 1373 aa, Artificial Sequence
  SARS-CoV-2/pangolin/Guangxi/P5L/2017__EPI_ISL_410540 spike protein (1-1205)(Q959C_S997C) Ferritin construct
MFVFLFVLPLVSSQCVNLTTRTGIPPGYTNSSTRGVYYPDKVFRSSILHLTQDLFLPFFSNVTWFNTINYQGGFKKFDNPVLPFNDGVYFASTEKSNIIRGWIFGTTLDARTQSLLIVNNATNVVIKVCEFQFCTDPFLGVYYHNNNKTWVENEFRVYSSANNCTFEYISQPFLMDLEGKQGNFKNLREFVFKNVDGYFKIYSKHTPIDLVRDLPRGFAALEPLVDLPIGINITRFQTLLALHRSYLTPGKLESGWTTGAAAYYVGYLQQRTFLLSYNQNGTITDAVDCSLDPLSETKCTLKSLTVEKGIYQTSNFRVQPTISIVRFPNITNLCPFGEVFNASKFASVYAWNRKRISNCVADYSVLYNSTSFSTFKCYGVSPTKLNDLCFTNVYADSFVVKGDEVRQIAPGQTGVIADYNYKLPDDFTGCVIAWNSVKQDALTGGNYGYLYRLFRKSKLKPFERDISTEIYQAGSTPCNGQVGLNCYYPLERYGFHPTTGVNYQPFRVVVLSFELLNGPATVCGPKLSTTLVKDKCVNFNFNGLTGTGVLTTSKKQFLPFQQFGRDISDTTDAVRDPQTLEILDITPCSFGGVSVITPGTNTSNQVAVLYQDVNCTEVPMAIHAEQLTPAWRVYSAGANVFQTRAGCLVGAEHVNNSYECDIPVGAGICASYHSMSSFRSVNQRSIIAYTMSLGAENSVAYSNNSIAIPTNFTISVTTEILPVSMTKTSVDCTMYICGDSIECSNLLLQYGSFCTQLNRALTGIAVEQDKNTQEVFAQVKQIYKTPPIKDFGGFNFSQILPDPSKPSKRSFIEDLLFNKVTLADAGFIKQYGDCLGDIAARDLICAQKFNGLTVLPPLLTDEMIAQYTSALLAGTITSGWTFGAGAALQIPFAMQMAYRFNGIGVTQNVLYENQKLIANQFNSAIGKIQDSLSSTASALGKLQDVVNQNAQALNTLVKCLSSNFGAISSVLNDILSRLDKVEAEVQIDRLITGRLQCLQTYVTQQLIRAAEIRASANLAATKMSECVLGQSKRVDFCGKGYHLMSFPQSAPHGVVFLHVTYVPAQEKNFTTAPAICHEGKAHFPREGVFVSNGTHWFITQRNFYEPQIITTDNTFVSGSCDVVIGIVNNTVYDPLQPELDSFKEELDKYFKNHTSPDVDLGDISGINASVVNIQKEIDRLNEVAKNLNESLIDLQELGKYEQYIKGGGGSDIIKLLNEQVNKEMQSSNLYMSMSSWCYTHSLDGAGLFLFDHAAEEYEHAKKLIIFLNENNVPVQLTSISAPEHKFEGLTQIFQKAYEHEQHISESINNIVDHAIKSKDHATFNFLQWYVAEQHEEEVLFKDILDKIELIGNENHGLYLADQYVKGIAKSRKS

SEQ ID NO: 5364 - protein, 1373 aa, Artificial Sequence
  SARS-CoV-2/pangolin/Guangxi/P5E/2017__EPI_ISL_410541 spike protein (1-1205)(Q959C_S997C) Ferritin construct
MFVFLFVLPLVSSQCVNLTTRTGIPPGYTNSSTRGVYYPDKVFRSSILHLTQDLFLPFFSNVTWFNTITYQGGSKKFDNPVLPFNDGVYFASTEKSNIIRGWIFGTTLDARTQSLLIVNNATNVVIKVCEFQFCTDPFLGVYYHNNNKTWVENEFRVYSSANNCTFEYISQPFLMDLEGKQGNFKNLREFVFKNVDGYFKIYSKHTPIDLVRDLPRGFAALEPLVDLPIGINITRFQTLLALHRSYLTPGKLESGWTTGAAAYYVGYLQQRTFLLSYNQNGTITDAVDCSLDPLSETKCTLKSLTVEKGIYQTSNFRVQPTISIVRFPNITNLCPFGEVFNASKFASVYAWNRKRISNCVADYSVLYNSTSFSTFKCYGVSPTKLNDLCFTNVYADSFVVKGDEVRQIAPGQTGVIADYNYKLPDDFTGCVIAWNSVKQDALTGDNYGYLYRLFRKSKLKPFERDISTEIYQAGSTPCNGQVGLNCYYPLERYGFHPTTGVNYQPFRVVVLSFELLNGPATVCGPKLSTTLVKDKCVNFNFNGLTGTGVLTTSKKQFLPFQQFGRDISDTTDAVRDPQTLEILDITPCSFGGVSVITPGTNTSNQVAVLYQDVNCTEVPMAIHAEQLTPAWRVYSAGANVFQTRAGCLVGAEHVNNSYECDIPVGAGICASYHSMSSFRSVNQRSIIAYTMSLGAENSVAYSNNSIAIPTNFTISVTTEILPVSMTKTSVDCTMYICGDSIECSNLLLQYGSFCTQLNRALTGIAVEQDKNTQEVFAQVKQIYKTPPIKDFGGFNFSQILPDPSKPSKRSFIEDLLFNKVTLADAGFIKQYGDCLGDIAARDLICAQKFNGLTVLPPLLTDEMIAQYTSALLAGTITSGWTFGAGAALQIPFAMQMAYRFNGIGVTQNVLYENQKLIANQFNSAIGKIQDSLSSTASALGKLQDVVNQNAQALNTLVKCLSSNFGAISSVLNDILSRLDKVEAEVQIDRLITGRLQCLQTYVTQQLIRAAEIRASANLAATKMSECVLGQSKRVDFCGKGYHLMSFPQSAPHGVVFLHVTYVPAQEKNFTTAPAICHEGKAHFPREGVFVSNGTHWFITQRNFYEPQIITTDNTFVSGSCDVVIGIVNNTVYDPLQPELDSFKEELDKYFKNHTSPDVDLGDISGINASVVNIQKEIDRLNEVAKNLNESLIDLQELGKYEQYIKGGGGSDIIKLLNEQVNKEMQSSNLYMSMSSWCYTHSLDGAGLFLFDHAAEEYEHAKKLIIFLNENNVPVQLTSISAPEHKFEGLTQIFQKAYEHEQHISESINNIVDHAIKSKDHATFNFLQWYVAEQHEEEVLFKDILDKIELIGNENHGLYLADQYVKGIAKSRKS

SEQ ID NO: 5365 - protein, 1371 aa, Artificial Sequence
  SARS-CoV-2/pangolin/Guangxi/P1E/2017__EPI_ISL_410539 spike protein (1-1203)(Q957C_S995C) Ferritin construct
MFVFLFVLPLVSSQCVNLTTRTGIQPGYTNSSTRGVYYPDKVFRSSILHLTQDLFLPFFSNVTWFNTINYQGGFKKFDNPVLPFNDGVYFASTEKSNIIRGWIFGTTLDARTQSLLIVNNATNVVIKVCEFQFCTDPFLGVYYHNNNKTWVENEFRVYSSANNCTFEYISQPFLMDLEGKQGNFKNLREFVFKNVDGYFKIYSKHTPIDLVRDLPRGFAALEPLVDLPIGINITRFQTLLALHRSYLTPGKLESGWTTGAAAYYVGYLQQRTFLLSYNQNGTITDAVDCSLDPLSETKCTLKSLTVEKGIYQTSNFRVQPTISIVRFPNITNLCPFGEVFNASKFASVYAWNRKRISNCVADYSVLYNSTSFSTFKCYGVSPTKLNDLCFTNVYADSFVVKGDEVRQIAPGQTGVIADYNYKLPDDFTGCVIAWNSVKQDALTGGNYLYRLFRKSKLKPFERDISTEIYQAGSTPCNGQVGLNCYYPLERYGFHPTTGVNYQPFRVVVLSFELLNGPATVCGPKLSTTLVKDKCVNFNFNGLTGTGVLTTSKKQFLPFQQFGRDISDTTDAVRDPQTLEILDITPCSFGGVSVITPGTNTSNQVAVLYQDVNCTEVPMAIHAEQLTPAWRVYSAGANVFQTRAGCLVGAEHVNNSYECDIPVGAGICASYHSMSSLRSVNQRSIIAYTMSLGAENSVAYSNNSIAIPTNFTISVTTEILPVSMTKTSVDCTMYICGDSIECSNLLLQYGSFCTQLNRALTGIAVEQDKNTQEVFAQVKQIYKTPPIKDFGGFNFSQILPDPSKPSKRSFIEDLLFNKVTLADAGFIKQYGDCLGDIAARDLICAQKFNGLTVLPPLLTDEMIAQYTSALLAGTITSGWTFGAGAALQIPFAMQMAYRFNGIGVTQNVLYENQKLIANQFNSAIGKIQDSLSSTASALGKLQDVVNQNAQALNTLVKCLSSNFGAISSVLNDILSRLDKVEAEVQIDRLITGRLQCLQTYVTQQLIRAAEIRASANLAATKMSECVLGQSKRVDFCGKGYHLMSFPQSAPHGVVFLHVTYVPAQEKNFTTAPAICHEGKAHFPREGVFVSNGTHWFITQRNFYEPQIITTDNTFVSGSCDVVIGIVNNTVYDPLQPELDSFKEELDKYFKNHTSPDVDLGDISGINASVVNIQKEIDRLNEVAKNLNESLIDLQELGKYEQYIKGGGGSDIIKLLNEQVNKEMQSSNLYMSMSSWCYTHSLDGAGLFLFDHAAEEYEHAKKLIIFLNENNVPVQLTSISAPEHKFEGLTQIFQKAYEHEQHISESINNIVDHAIKSKDHATFNFLQWYVAEQHEEEVLFKDILDKIELIGNENHGLYLADQYVKGIAKSRKS

SEQ ID NO: 5366 - protein, 1379 aa, Artificial Sequence
  SARS-CoV-2/Wuhan/WIV05/2019__EPI_ISL_402128 spike protein (1-1211)(F970C_G999C) Ferritin construct
MFVFLVLLPLVSSQCVNLTTRTQLPPAYTNSFTRGVYYPDKVFRSSVLHSTQDLFLPFFSNVTWFHAIHVSGTNGTKRFDNPVLPFNDGVYFASTEKSNIIRGWIFGTTLDSKTQSLLIVNNATNVVIKVCEFQFCNDPFLGVYYHKNNKSWMESEFRVYSSANNCTFEYVSQPFLMDLEGKQGNFKNLREFVFKNIDGYFKIYSKHTPINLVRDLPQGFSALEPLVDLPIGINITRFQTLLALHRSYLTPGDSSSGWTAGAAAYYVGYLQPRTFLLKYNENGTITDAVDCALDPLSETKCTLKSFTVEKGIYQTSNFRVQPTESIVRFPNITNLCPFGEVFNATRFASVYAWNRKRISNCVADYSVLYNSASFSTFKCYGVSPTKLNDLCFTNVYADSFVIRGDEVRQIAPGQTGKIADYNYKLPDDFTGCVIAWNSNNLDSKVGGNYNYLYRLFRKSNLKPFERDISTEIYQAGSTPCNGVEGFNCYFPLQSYGFQPTNGVGYQPYRVVVLSFELLHAPATVCGPKKSTNLVKNKCVNFNFNGLTGTGVLTESNKKFLPFQQFGRDIADTTDAVRDPQTLEILDITPCSFGGVSVITPGTNTSNQVAVLYQDVNCTEVPVAIHADQLTPTWRVYSTGSNVFQTRAGCLIGAEHVNNSYECDIPIGAGICASYQTQTNSPRRARSVASQSIIAYTMSLGAENSVAYSNNSIAIPTNFTISVTTEILPVSMTKTSVDCTMYICGDSTECSNLLLQYGSFCTQLNRALTGIAVEQDKNTQEVFAQVKQIYKTPPIKDFGGFNFSQILPDPSKPSKRSFIEDLLFNKVTLADAGFIKQYGDCLGDIAARDLICAQKFNGLTVLPPLLTDEMIAQYTSALLAGTITSGWTFGAGAALQIPFAMQMAYRFNGIGVTQNVLYENQKLIANQFNSAIGKIQDSLSSTASALGKLQDVVNQNAQALNTLVKQLSSNCGAISSVLNDILSRLDKVEAEVQIDRLITCRLQSLQTYVTQQLIRAAEIRASANLAATKMSECVLGQSKRVDFCGKGYHLMSFPQSAPHGVVFLHVTYVPAQEKNFTTAPAICHDGKAHFPREGVFVSNGTHWFVTQRNFYEPQIITTDNTFVSGNCDVVIGIVNNTVYDPLQPELDSFKEELDKYFKNHTSPDVDLGDISGINASVVNIQKEIDRLNEVAKNLNESLIDLQELGKYEQYIKGGGGSDIIKLLNEQVNKEMQSSNLYMSMSSWCYTHSLDGAGLFLFDHAAEEYEHAKKLIIFLNENNVPVQLTSISAPEHKFEGLTQIFQKAYEHEQHISESINNIVDHAIKSKDHATFNFLQWYVAEQHEEEVLFKDILDKIELIGNENHGLYLADQYVKGIAKSRKS

SEQ ID NO: 5367 - protein, 1375 aa, Artificial Sequence
  SARS-CoV-2/bat/Yunnan/RaTG13/2013__EPI_ISL_402131 spike protein (1-1207)(F966C_G995C) Ferritin construct
MFVFLVLLPLVSSQCVNLTTRTQLPPAYTNSSTRGVYYPDKVFRSSVLHLTQDLFLPFFSNVTWFHAIHVSGTNGIKRFDNPVLPFNDGVYFASTEKSNIIRGWIFGTTLDSKTQSLLIVNNATNVVIKVCEFQFCNDPFLGVYYHKNNKSWMESEFRVYSSANNCTFEYVSQPFLMDLEGKQGNFKNLREFVFKNIDGYFKIYSKHTPINLVRDLPPGFSALEPLVDLPIGINITRFQTLLALHRSYLTPGDSSSGWTAGAAAYYVGYLQPRTFLLKYNENGTITDAVDCALDPLSETKCTLKSFTVEKGIYQTSNFRVQPTDSIVRFPNITNLCPFGEVFNATTFASVYAWNRKRISNCVADYSVLYNSTSFSTFKCYGVSPTKLNDLCFTNVYADSFVITGDEVRQIAPGQTGKIADYNYKLPDDFTGCVIAWNSKHIDAKEGGNFNYLYRLFRKANLKPFERDISTEIYQAGSKPCNGQTGLNCYYPLYRYGFYPTDGVGHQPYRVVVLSFELLNAPATVCGPKKSTNLVKNKCVNFNFNGLTGTGVLTESNKKFLPFQQFGRDIADTTDAVRDPQTLEILDITPCSFGGVSVITPGTNASNQVAVLYQDVNCTEVPVAIHADQLTPTWRVYSTGSNVFQTRAGCLIGAEHVNNSYECDIPIGAGICASYQTQTNSRSVASQSIIAYTMSLGAENSVAYSNNSIAIPTNFTISVTTEILPVSMTKTSVDCTMYICGDSTECSNLLLQYGSFCTQLNRALTGIAVEQDKNTQEVFAQVKQIYKTPPIKDFGGFNFSQILPDPSKPSKRSFIEDLLFNKVTLADAGFIKQYGDCLGDIAARDLICAQKFNGLTVLPPLLTDEMIAQYTSALLAGTITSGWTFGAGAALQIPFAMQMAYRFNGIGVTQNVLYENQKLIANQFNSAIGKIQDSLSSTASALGKLQDVVNQNAQALNTLVKQLSSNCGAISSVLNDILSRLDKVEAEVQIDRLITCRLQSLQTYVTQQLIRAAEIRASANLAATKMSECVLGQSKRVDFCGKGYHLMSFPQSAPHGVVFLHVTYVPAQEKNFTTAPAICHDGKAHFPREGVFVSNGTHWFVTQRNFYEPQIITTDNTFVSGSCDVVIGIVNNTVYDPLQPELDSFKEELDKYFKNHTSPDVDLGDISGINASVVNIQKEIDRLNEVAKNLNESLIDLQELGKYEQYIKGGGGSDIIKLLNEQVNKEMQSSNLYMSMSSWCYTHSLDGAGLFLFDHAAEEYEHAKKLIIFLNENNVPVQLTSISAPEHKFEGLTQIFQKAYEHEQHISESINNIVDHAIKSKDHATFNFLQWYVAEQHEEEVLFKDILDKIELIGNENHGLYLADQYVKGIAKSRKS

SEQ ID NO: 5368 - protein, 1379 aa, Artificial Sequence
  SARS-CoV-2/Wuhan/HBCDC-HB-01/2019__EPI_ISL_402132 spike protein (1-1211)(F970C_G999C) Ferritin construct
MFVFLVLLPLVSSQCVNLTTRTQLPPAYTNSITRGVYYPDKVFRSSVLHSTQDLFLPFFSNVTWFHAIHVSGTNGTKRFDNPVLPFNDGVYFASTEKSNIIRGWIFGTTLDSKTQSLLIVNNATNVVIKVCEFQFCNDPFLGVYYHKNNKSWMESEFRVYSSANNCTFEYVSQPFLMDLEGKQGNFKNLREFVFKNIDGYFKIYSKHTPINLVRDLPQGFSALEPLVDLPIGINITRFQTLLALHRSYLTPGDSSSGWTAGAAAYYVGYLQPRTFLLKYNENGTITDAVDCALDPLSETKCTLKSFTVEKGIYQTSNFRVQPTESIVRFPNITNLCPFGEVFNATRFASVYAWNRKRISNCVADYSVLYNSASFSTFKCYGVSPTKLNDLCFTNVYADSFVIRGDEVRQIAPGQTGKIADYNYKLPDDFTGCVIAWNSNNLDSKVGGNYNYLYRLFRKSNLKPFERDISTEIYQAGSTPCNGVEGFNCYFPLQSYGFQPTNGVGYQPYRVVVLSFELLHAPATVCGPKKSTNLVKNKCVNFNFNGLTGTGVLTESNKKFLPFQQFGRDIADTTDAVRDPQTLEILDITPCSFGGVSVITPGTNTSNQVAVLYQDVNCTEVPVAIHADQLTPTWRVYSTGSNVFQTRAGCLIGAEHVNNSYECDIPIGAGICASYQTQTNSPRRARSVASQSIIAYTMSLGAENSVAYSNNSIAIPTNFTISVTTEILPVSMTKTSVDCTMYICGDSTECSNLLLQYGSFCTQLNRALTGIAVEQDKNTQEVFAQVKQIYKTPPIKDFGGFNFSQILPDPSKPSKRSFIEDLLFNKVTLADAGFIKQYGDCLGDIAARDLICAQKFNGLTVLPPLLTDEMIAQYTSALLAGTITSGWTFGAGAALQIPFAMQMAYRFNGIGVTQNVLYENQKLIANQFNSAIGKIQDSLSSTASALGKLQDVVNQNAQALNTLVKQLSSNCGAISSVLNDILSRLDKVEAEVQIDRLITCRLQSLQTYVTQQLIRAAEIRASANLAATKMSECVLGQSKRVDFCGKGYHLMSFPQSAPHGVVFLHVTYVPAQEKNFTTAPAICHDGKAHFPREGVFVSNGTHWFVTQRNFYEPQIITTDNTFVSGNCDVVIGIVNNTVYDPLQPELDSFKEELDKYFKNHTSPDVDLGDISGINASVVNIQKEIDRLNEVAKNLNESLIDLQELGKYEQYIKGGGGSDIIKLLNEQVNKEMQSSNLYMSMSSWCYTHSLDGAGLFLFDHAAEEYEHAKKLIIFLNENNVPVQLTSISAPEHKFEGLTQIFQKAYEHEQHISESINNIVDHAIKSKDHATFNFLQWYVAEQHEEEVLFKDILDKIELIGNENHGLYLADQYVKGIAKSRKS

SEQ ID NO: 5369 - protein, 1379 aa, Artificial Sequence
  SARS-CoV-2/Guangdong/20SF028/2020__EPI_ISL_403936 spike protein (1-1211)(F970C_G999C) Ferritin construct
MFVFLVLLPLVSSQCVNLTTRTQLPPAYTNSFTRGVYYPDKVFRSSVLYSTQDLFLPFFSNVTWFHAIHVSGTNGTKRFDNPVLPFNDGVYFASTEKSNIIRGWIFGTTLDSKTQSLLIVNNATNVVIKVCEFQFCNDPFLGVYYHKNNKSWMESEFRVYSSANNCTFEYVSQPFLMDLEGKQGNFKNLREFVFKNIDGYFKIYSKHTPINLVRDLPQGFSALEPLVDLPIGINITRFQTLLALHRSYLTPGDSSSGWTAGAAAYYVGYLQPRTFLLKYNENGTITDAVDCALDPLSETKCTLKSFTVEKGIYQTSNFRVQPTESIVRFPNITNLCPFGEVFNATRFASVYAWNRKRISNCVADYSVLYNSASFSTFKCYGVSPTKLNDLCFTNVYADSFVIRGDEVRQIAPGQTGKIADYNYKLPDDFTGCVIAWNSNNLDSKVGGNYNYLYRLFRKSNLKPFERDISTEIYQAGSTPCNGVEGFNCYFPLQSYGFQPTNGVGYQPYRVVVLSFELLHAPATVCGPKKSTNLVKNKCVNFNFNGLTGTGVLTESNKKFLPFQQFGRDIADTTDAVRDPQTLEILDITPCSFGGVSVITPGTNTSNQVAVLYQDVNCTEVPVAIHADQLTPTWRVYSTGSNVFQTRAGCLIGAEHVNNSYECDIPIGAGICASYQTQTNSPRRARSVASQSIIAYTMSLGAENSVAYSNNSIAIPTNFTISVTTEILPVSMTKTSVDCTMYICGDSTECSNLLLQYGSFCTQLNRALTGIAVEQDKNTQEVFAQVKQIYKTPPIKDFGGFNFSQILPDPSKPSKRSFIEDLLFNKVTLADAGFIKQYGDCLGDIAARDLICAQKFNGLTVLPPLLTDEMIAQYTSALLAGTITSGWTFGAGAALQIPFAMQMAYRFNGIGVTQNVLYENQKLIANQFNSAIGKIQDSLSSTASALGKLQDVVNQNAQALNTLVKQLSSNCGAISSVLNDILSRLDKVEAEVQIDRLITCRLQSLQTYVTQQLIRAAEIRASANLAATKMSECVLGQSKRVDFCGKGYHLMSFPQSAPHGVVFLHVTYVPAQEKNFTTAPAICHDGKAHFPREGVFVSNGTHWFVTQRNFYEPQIITTDNTFVSGNCDVVIGIVNNTVYDPLQPELDSFKEELDKYFKNHTSPDVDLGDISGINASVVNIQKEIDRLNEVAKNLNESLIDLQELGKYEQYIKGGGGSDIIKLLNEQVNKEMQSSNLYMSMSSWCYTHSLDGAGLFLFDHAAEEYEHAKKLIIFLNENNVPVQLTSISAPEHKFEGLTQIFQKAYEHEQHISESINNIVDHAIKSKDHATFNFLQWYVAEQHEEEVLFKDILDKIELIGNENHGLYLADQYVKGIAKSRKS

SEQ ID NO: 5370 - protein, 1379 aa, Artificial Sequence
  SARS-CoV-2/Shenzhen/SZTH-001/2020__EPI_ISL_406592 spike protein (1-1211)(F970C_G999C) Ferritin construct
MFVFLVLLPLVSSQCVNLTTRTQLPPAYTNSFTRGVYYPDKVFRSSVLHSTQDLFLPFFSNVTWFHAIHVSGTNGTKRFDNPVLPFNDGVYFASTEKSNIIRGWIFGTTLDSKTQSLLIVNNATNVVIKVCEFQFCNDPFLGVYYHKNNKSWMESEFRVYSSANNCTFEYVSQPFLMDLEGKQGNFKNLREFVFKNIDGYFKIYSKHTPINLVRDLPQGFSALEPLVDLPIGINITRFQTLLALHRSYLTPGDSSSGWTAGAAAYYVGYLQPRTFLLKYNENGTITDAVDCALDPLSETKCTLKSFTVEKGIYQTSNFRVQPTESIVRFPNITNLCPFGEVFNATRFASVYAWNRKRISNCVADYSVLYNSASFSTFKCYGVSPTKLNDLCFTNVYADSFVIRGDEVRQIAPGQTGKIADYNYKLPDDFTGCVIAWNSNNLDSKVGGNYNYLYRLFRKSNLKPFERDISTEIYQAGSTPCNGVEGFNCYFPLQSYGFQPTNGVGYQPYRVVVLSFELLHAPATVCGPKKSTNLVKNKCVNFNFNGLTGTGVLTESNKKFLPFQQFGRDIADTTDAVRDPQTLEILDITPCSFGGVSVITPGTNTSNQVAVLYQDVNCTEVPVAIHADQLTPTWRVYSTGSNVFQTRAGCLIGAEHVNNSYECDIPIGAGICASYQTQTNSPRRARSVASQSIIAYTMSLGAENSVAYSNNSIAIPTNFTISVTTEILPVSMTKTSVDCTMYICGDSTECSNLLLQYGSFCTQLNRALTGIAVEQDKNTQEVFAQVKQIYKTPPIKDFGGFNFSQILPDPSKPSKRSFIEDLLFNKVTLADAGFIKQYGDCLGDIAARDLICAQKFNGLTVLPPLLTDEMIAQYTSALLAGTITSGWTFGAGAALQIPFAMQMAYRFNGIGVTQNVLYENQKLIANQFNSAIGKIQDSLSSTASALGKLQDVVNQNAQALNTLVKQLSSNCGAISSVLNDILSRLDKVEAEVQIDRLITCRLQSLQTYVTQQLIRAAEIRASANLAATKMSECVLGQSKRVDFCGKGYHLMSFPQSAPHGVVFLHVTYVPAQEKNFTTAPAICHDGKAHFPREGVFVSNGTHWFVTQRNFYEPQIITTDNTFVSGNCDVLIGIVNNTVYDPLQPELDSFKEELDKYFKNHTSPDVDLGDISGINASVVNIQKEIDRLNEVAKNLNESLIDLQELGKYEQYIKGGGGSDIIKLLNEQVNKEMQSSNLYMSMSSWCYTHSLDGAGLFLFDHAAEEYEHAKKLIIFLNENNVPVQLTSISAPEHKFEGLTQIFQKAYEHEQHISESINNIVDHAIKSKDHATFNFLQWYVAEQHEEEVLFKDILDKIELIGNENHGLYLADQYVKGIAKSRKS

SEQ ID NO: 5371 - protein, 1379 aa, Artificial Sequence
  SARS-CoV-2/Shenzhen/SZTH-004/2020__EPI_ISL_406595 spike protein (1-1211)(F970C_G999C) Ferritin construct
MFVFLVLLPLVSSQCVNLTTRTQLPPAYTNSFTRGVYYPDKVFRSSVLHSTQDLFLPFFSNVTWFHAIHVSGTNGTKRFDNPVLPFNDGVYFASTEKSNIIRGWIFGTTLDSKTQSLLIVNNATNVVIKVCEFQFCNDPFLGVYYHKNNKSWMESEFRVYSSANNCTFEYVSQPFLMDLEGKQGNFKNLREFVFKNIDGYFKIYSKHTPINLVRDLPQGFSALEPLVDLPIGINITRFQTLLALHRSYLTPGDSSSGWTAGAAAYYVGYLQPRTFLLKYNENGTITDAVDCALDPLSETKCTLKSFTVEKGIYQTSNFRVQPTESIVRFPNITNLCPFGEVFNATRFASVYAWDRKRISNCVAYYSVLYNSASFSTFKCYGVSPTKLNDLCFTNVYADSFVIRGDEVRQIAPGQTGKIADYNYKLPDDFTGCVIAWNSNNLDSKVGGNYNYLYRLFRKSNLKPFERDISTEIYQAGSTPCNGVEGFNCYFPLQSYGFQPTNGVGYQPYRVVVLSFELLHAPATVCGPKKSTNLVKNKCVNFNFNGLTGTGVLTESNKKFLPFQQFGRDIADTTDAVRDPQTLEILDITPCSFGGVSVITPGTNTSNQVAVLYQDVNCTEVPVAIHADQLTPTWRVYSTGSNVFQTRAGCLIGAEHVNNSYECDIPIGAGICASYQTQTNSPRRARSVASQSIIAYTMSLGAENSVAYSNNSIAIPTNFTISVTTEILPVSMTKTSVDCTMYICGDSTECSNLLLQYGSFCTQLNRALTGIAVEQDKNTQEVFAQVKQIYKTPPIKDFGGFNFSQILPDPSKPSKRSFIEDLLFNKVTLADAGFIKQYGDCLGDIAARDLICAQKFNGLTVLPPLLTDEMIAQYTSALLAGTITSGWTFGAGAALQIPFAMQMAYRFNGIGVTQNVLYENQKLIANQFNSAIGKIQDSLSSTASALGKLQDVVNQNAQALNTLVKQLSSNCGAISSVLNDILSRLDKVEAEVQIDRLITCRLQSLQTYVTQQLIRAAEIRASANLAATKMSECVLGQSKRVDFCGKGYHLMSFPQSAPHGVVFLHVTYVPAQEKNFTTAPAICHDGKAHFPREGVFVSNGTHWFVTQRNFYEPQIITTDNTFVSGNCDVVIGIVNNTVYDPLQPELDSFKEELDKYFKNHTSPDVDLGDISGINASVVNIQKEIDRLNEVAKNLNESLIDLQELGKYEQYIKGGGGSDIIKLLNEQVNKEMQSSNLYMSMSSWCYTHSLDGAGLFLFDHAAEEYEHAKKLIIFLNENNVPVQLTSISAPEHKFEGLTQIFQKAYEHEQHISESINNIVDHAIKSKDHATFNFLQWYVAEQHEEEVLFKDILDKIELIGNENHGLYLADQYVKGIAKSRKS

SEQ ID NO: 5372 - protein, 1379 aa, Artificial Sequence
  SARS-CoV-2/France/IDF0372/2020__EPI_ISL_406596 spike protein (1-1211)(F970C_G999C) Ferritin construct
MFVFLVLLPLVSSQCVNLTTRTQLPPAYTNSFTRGVYYPDKVFRSSVLHSTQDLFLPFFSNVTWFHAIHVSGTNGTKRFDNPVLPFNDGVYFASTEKSNIIRGWIFGTTLDSKTQSLLIVNNATNVVIKVCEFQFCNDPFLGVYYHKNNKSWMESEFRVYSSANNCTFEYVSQPFLMDLEGKQGNFKNLREFVFKNIDGYFKIYSKHTPINLVRDLPQGFSALEPLVDLPIGINITRFQTLLALHRSYLTPGDSSSGWTAGAAAYYVGYLQPRTFLLKYNENGTITDAVDCALDPLSETKCTLKSFTVEKGIYQTSNFRVQPTESIVRFPNITNLCPFGEVFNATRFASVYAWNRKRISNCVADYSFLYNSASFSTFKCYGVSPTKLNDLCFTNVYADSFVIRGDEVRQIAPGQTGKIADYNYKLPDDFTGCVIAWNSNNLDSKVGGNYNYLYRLFRKSNLKPFERDISTEIYQAGSTPCNGVEGFNCYFPLQSYGFQPTNGVGYQPYRVVVLSFELLHAPATVCGPKKSTNLVKNKCVNFNFNGLTGTGVLTESNKKFLPFQQFGRDIADTTDAVRDPQTLEILDITPCSFGGVSVITPGTNTSNQVAVLYQDVNCTEVPVAIHADQLTPTWRVYSTGSNVFQTRAGCLIGAEHVNNSYECDIPIGAGICASYQTQTNSPRRARSVASQSIIAYTMSLGAENSVAYSNNSIAIPTNFTISVTTEILPVSMTKTSVDCTMYICGDSTECSNLLLQYGSFCTQLNRALTGIAVEQDKNTQEVFAQVKQIYKTPPIKDFGGFNFSQILPDPSKPSKRSFIEDLLFNKVTLADAGFIKQYGDCLGDIAARDLICAQKFNGLTVLPPLLTDEMIAQYTSALLAGTITSGWTFGAGAALQIPFAMQMAYRFNGIGVTQNVLYENQKLIANQFNSAIGKIQDSLSSTASALGKLQDVVNQNAQALNTLVKQLSSNCGAISSVLNDILSRLDKVEAEVQIDRLITCRLQSLQTYVTQQLIRAAEIRASANLAATKMSECVLGQSKRVDFCGKGYHLMSFPQSAPHGVVFLHVTYVPAQEKNFTTAPAICHDGKAHFPREGVFVSNGTHWFVTQRNFYEPQIITTDNTFVSGNCDVVIGIVNNTVYDPLQPELDSFKEELDKYFKNHTSPDVDLGDISGINASVVNIQKEIDRLNEVAKNLNESLIDLQELGKYEQYIKGGGGSDIIKLLNEQVNKEMQSSNLYMSMSSWCYTHSLDGAGLFLFDHAAEEYEHAKKLIIFLNENNVPVQLTSISAPEHKFEGLTQIFQKAYEHEQHISESINNIVDHAIKSKDHATFNFLQWYVAEQHEEEVLFKDILDKIELIGNENHGLYLADQYVKGIAKSRKS

SEQ ID NO: 5373 - protein, 1379 aa, Artificial Sequence
  SARS-CoV-2/Australia/VIC01/2020__EPI_ISL_406844 spike protein (1-1211)(F970C_G999C) Ferritin construct
MFVFLVLLPLVSSQCVNLTTRTQLPPAYTNSFTRGVYYPDKVFRSSVLHSTQDLFLPFFSNVTWFHAIHVSGTNGTKRFDNPVLPFNDGVYFASTEKSNIIRGWIFGTTLDSKTQSLLIVNNATNVVIKVCEFQFCNDPFLGVYYHKNNKSWMESEFRVYSSANNCTFEYVSQPFLMDLEGKQGNFKNLREFVFKNIDGYFKIYSKHTPINLVRDLPQGFSALEPLVDLPIGINITRFQTLLALHRRYLTPGDSSSGWTAGAAAYYVGYLQPRTFLLKYNENGTITDAVDCALDPLSETKCTLKSFTVEKGIYQTSNFRVQPTESIVRFPNITNLCPFGEVFNATRFASVYAWNRKRISNCVADYSVLYNSASFSTFKCYGVSPTKLNDLCFTNVYADSFVIRGDEVRQIAPGQTGKIADYNYKLPDDFTGCVIAWNSNNLDSKVGGNYNYLYRLFRKSNLKPFERDISTEIYQAGSTPCNGVEGFNCYFPLQSYGFQPTNGVGYQPYRVVVLSFELLHAPATVCGPKKSTNLVKNKCVNFNFNGLTGTGVLTESNKKFLPFQQFGRDIADTTDAVRDPQTLEILDITPCSFGGVSVITPGTNTSNQVAVLYQDVNCTEVPVAIHADQLTPTWRVYSTGSNVFQTRAGCLIGAEHVNNSYECDIPIGAGICASYQTQTNSPRRARSVASQSIIAYTMSLGAENSVAYSNNSIAIPTNFTISVTTEILPVSMTKTSVDCTMYICGDSTECSNLLLQYGSFCTQLNRALTGIAVEQDKNTQEVFAQVKQIYKTPPIKDFGGFNFSQILPDPSKPSKRSFIEDLLFNKVTLADAGFIKQYGDCLGDIAARDLICAQKFNGLTVLPPLLTDEMIAQYTSALLAGTITSGWTFGAGAALQIPFAMQMAYRFNGIGVTQNVLYENQKLIANQFNSAIGKIQDSLSSTASALGKLQDVVNQNAQALNTLVKQLSSNCGAISSVLNDILSRLDKVEAEVQIDRLITCRLQSLQTYVTQQLIRAAEIRASANLAATKMSECVLGQSKRVDFCGKGYHLMSFPQSAPHGVVFLHVTYVPAQEKNFTTAPAICHDGKAHFPREGVFVSNGTHWFVTQRNFYEPQIITTDNTFVSGNCDVVIGIVNNTVYDPLQPELDSFKEELDKYFKNHTSPDVDLGDISGINASVVNIQKEIDRLNEVAKNLNESLIDLQELGKYEQYIKGGGGSDIIKLLNEQVNKEMQSSNLYMSMSSWCYTHSLDGAGLFLFDHAAEEYEHAKKLIIFLNENNVPVQLTSISAPEHKFEGLTQIFQKAYEHEQHISESINNIVDHAIKSKDHATFNFLQWYVAEQHEEEVLFKDILDKIELIGNENHGLYLADQYVKGIAKSRKS

SEQ ID NO: 5374 - protein, 1379 aa, Artificial Sequence
  SARS-CoV-2/Germany/BavPat1/2020__EPI_ISL_406862 spike protein (1-1211)(F970C_G999C) Ferritin construct
MFVFLVLLPLVSSQCVNLTTRTQLPPAYTNSFTRGVYYPDKVFRSSVLHSTQDLFLPFFSNVTWFHAIHVSGTNGTKRFDNPVLPFNDGVYFASTEKSNIIRGWIFGTTLDSKTQSLLIVNNATNVVIKVCEFQFCNDPFLGVYYHKNNKSWMESEFRVYSSANNCTFEYVSQPFLMDLEGKQGNFKNLREFVFKNIDGYFKIYSKHTPINLVRDLPQGFSALEPLVDLPIGINITRFQTLLALHRSYLTPGDSSSGWTAGAAAYYVGYLQPRTFLLKYNENGTITDAVDCALDPLSETKCTLKSFTVEKGIYQTSNFRVQPTESIVRFPNITNLCPFGEVFNATRFASVYAWNRKRISNCVADYSVLYNSASFSTFKCYGVSPTKLNDLCFTNVYADSFVIRGDEVRQIAPGQTGKIADYNYKLPDDFTGCVIAWNSNNLDSKVGGNYNYLYRLFRKSNLKPFERDISTEIYQAGSTPCNGVEGFNCYFPLQSYGFQPTNGVGYQPYRVVVLSFELLHAPATVCGPKKSTNLVKNKCVNFNFNGLTGTGVLTESNKKFLPFQQFGRDIADTTDAVRDPQTLEILDITPCSFGGVSVITPGTNTSNQVAVLYQGVNCTEVPVAIHADQLTPTWRVYSTGSNVFQTRAGCLIGAEHVNNSYECDIPIGAGICASYQTQTNSPRRARSVASQSIIAYTMSLGAENSVAYSNNSIAIPTNFTISVTTEILPVSMTKTSVDCTMYICGDSTECSNLLLQYGSFCTQLNRALTGIAVEQDKNTQEVFAQVKQIYKTPPIKDFGGFNFSQILPDPSKPSKRSFIEDLLFNKVTLADAGFIKQYGDCLGDIAARDLICAQKFNGLTVLPPLLTDEMIAQYTSALLAGTITSGWTFGAGAALQIPFAMQMAYRFNGIGVTQNVLYENQKLIANQFNSAIGKIQDSLSSTASALGKLQDVVNQNAQALNTLVKQLSSNCGAISSVLNDILSRLDKVEAEVQIDRLITCRLQSLQTYVTQQLIRAAEIRASANLAATKMSECVLGQSKRVDFCGKGYHLMSFPQSAPHGVVFLHVTYVPAQEKNFTTAPAICHDGKAHFPREGVFVSNGTHWFVTQRNFYEPQIITTDNTFVSGNCDVVIGIVNNTVYDPLQPELDSFKEELDKYFKNHTSPDVDLGDISGINASVVNIQKEIDRLNEVAKNLNESLIDLQELGKYEQYIKGGGGSDIIKLLNEQVNKEMQSSNLYMSMSSWCYTHSLDGAGLFLFDHAAEEYEHAKKLIIFLNENNVPVQLTSISAPEHKFEGLTQIFQKAYEHEQHISESINNIVDHAIKSKDHATFNFLQWYVAEQHEEEVLFKDILDKIELIGNENHGLYLADQYVKGIAKSRKS

SEQ ID NO: 5375 - protein, 1379 aa, Artificial Sequence
  SARS-CoV-2/Wuhan/HBCDC-HB-02/2020__EPI_ISL_412978 spike protein (1-1211)(F970C_G999C) Ferritin construct
MFVFLVLLPLVSSQCVNLTTRTQLPPAYTNSFTRGVYYPDKVFRSSVLHSTQDLFLPFFSNVTWFHAIHVSGTNGTKRFDNPVLPFNDGVYFASTEKSNIIRGWIFGTTLDSKTQSLLIVNNATNVVIKVCEFQFCNDPFLGVYYHKNNKSWMESEFRVYSSANNCTFEYVSQPFLMDLEGKQGNFKNLREFVFKNIDGYFKIYSKHTPINLVRDLPQGFSALEPLVDLPIGINITRFQTLLALHRSYLTPGDSSSGWTAGAAAYYVGYLQPRTFLLKYNENGTITDAVDCALDPLSETKCTLKSFTVEKGIYQTSNFRVQPTESIVRFPNITNLCPFGEVFNATRFASVYAWNRKRISNCVADYSVLYNSASFSTFKCYGVSPTKLNDLCFTNVYADSFVIRGDEVRQIAPGQTGKIADYNYKLPDDFTGCVIAWNSNNLDSKVGGNYNYLYRLFRKSNLKPFERDISTEIYQAGSTPCNGVEGFNCYFPLQSYGFQPTNGVGYQPYRVVVLSFELLHAPATVCGPKKSTNLVKNKCVNFNFNGLTGTGVLTESNKKFLPFQQFGRDIADTTDAVRDPQTLEILDITPCSFGGVSVITPGTNTSNQVAVLYQDVNCTEVPVAIHADQLTPTWRVYSTGSNVFQTRAGCLIGAEHVNNSYECDIPIGAGICASYQTQTNSPRRARSVASQSIIAYTMSLGAENSVAYSNNSIAIPTNFTISVTTEILPVSMTKTSVDCTMYICGDSTECSNFLLQYGSFCTQLNRALTGIAVEQDKNTQEVFAQVKQIYKTPPIKDFGGFNFSQILPDPSKPSKRSFIEDLLFNKVTLADAGFIKQYGDCLGDIAARDLICAQKFNGLTVLPPLLTDEMIAQYTSALLAGTITSGWTFGAGAALQIPFAMQMAYRFNGIGVTQNVLYENQKLIANQFNSAIGKIQDSLSSTASALGKLQDVVNQNAQALNTLVKQLSSNCGAISSVLNDILSRLDKVEAEVQIDRLITCRLQSLQTYVTQQLIRAAEIRASANLAATKMSECVLGQSKRVDFCGKGYHLMSFPQSAPHGVVFLHVTYVPAQEKNFTTAPAICHDGKAHFPREGVFVSNGTHWFVTQRNFYEPQIITTDNTFVSGNCDVVIGIVNNTVYDPLQPELDSFKEELDKYFKNHTSPDVDLGDISGINASVVNIQKEIDRLNEVAKNLNESLIDLQELGKYEQYIKGGGGSDIIKLLNEQVNKEMQSSNLYMSMSSWCYTHSLDGAGLFLFDHAAEEYEHAKKLIIFLNENNVPVQLTSISAPEHKFEGLTQIFQKAYEHEQHISESINNIVDHAIKSKDHATFNFLQWYVAEQHEEEVLFKDILDKIELIGNENHGLYLADQYVKGIAKSRKS

SEQ ID NO: 5376 - protein, 1379 aa, Artificial Sequence
  SARS-CoV-2/Australia/QLD02/2020__EPI_ISL_407896 spike protein (1-1211)(F970C_G999C) Ferritin construct
MFVFLVLLPLVSSQCVNLTTRTQLPPAYTNSFTRGVYYPDKVFRSSVLHSTQDLFLPFFSNVTWFHAIHVSGTNGTKRFDNPVLPFNDGVYFASTEKSNIIRGWIFGTTLDSKTQSLLIVNNATNVVIKVCEFQFCNDPFLGVYYHKNNKSWMESEFRVYSSANNCTFEYVSQPFLMDLEGKQGNFKNLREFVFKNIDGYFKIYSKHTPINLVRDLPQGFSALEPLVDLPIGINITRFQTLLALHRSYLTPGDSSSGWTAGAAAYYVGYLQPRTFLLKYNENGTITDAVDCALDPLSETKCTLKSFTVEKGIYQTSNFRVQPTESIVRFPNITNLCPFGEVFNATRFASVYAWNRKRISNCVADYSVLYNSASFSTFKCYGVSPTKLNDLCFTNVYADSFVIRGDEVRQIAPGQTGKIADYNYKLPDDFTGCVIAWNSNNLDSKVGGNYNYLYRLFRKSNLKPFERDISTEIYQAGSTPCNGVEGFNCYFPLQSYGFQPTNGVGYQPYRVVVLSFELLHAPATVCGPKKSTNLVKNKCVNFNFNGLTGTGVLTESNKKFLPFQQFGRDIADTTDAVRDPQTLEILDITPCSFGGVSVITPGTNTSNQVAVLYQDVNCTEVPVAIHADQLTPTWRVYSTGSNVFQTRAGCLIGAEHVNNSYECDIPIGAGICASYQTQTNSPRRARSVASQSIIAYTMSLGAENSVAYSNNSIAIPTNFTISVTTEILPVSMTKTSVDCTMYICGDSTECSNLLLQYGSFCTQLNRALTGIAVEQDKNTQEVFAQVKQIYKTPPIKDFGGFNFSQILPDPSKPSKRSFIEDLLFNKVTLADAGFIKQYGDCLGDIAARDLICAQKFNGLTVLPPLLTDEMIAQYTSALLAGTITSGWTFGAGAALQIPFAMQMAYRFNGIGVTQNVLYENQKLIANQFNSAIGKIQDSLSSTASALGKLQDVVNQNAQALNTLVKQLSSNCGAISSVLNDILSRLDKVEAEVQIDRLITCRLQSLQTYVTQQLIRAAEIRASANLAATKMSECVLGQSKRVDFCGKGYHLMSFPQSAPHGVVFLHVTYVPAQEKNFTTAPAICHDGKAHFPREGVFVSNGTHWFVTQRNFYEPQIITTDNTFVSGNCDVVIGIVNNTVYDPLQLELDSFKEELDKYFKNHTSPDVDLGDISGINASVVNIQKEIDRLNEVAKNLNESLIDLQELGKYEQYIKGGGGSDIIKLLNEQVNKEMQSSNLYMSMSSWCYTHSLDGAGLFLFDHAAEEYEHAKKLIIFLNENNVPVQLTSISAPEHKFEGLTQIFQKAYEHEQHISESINNIVDHAIKSKDHATFNFLQWYVAEQHEEEVLFKDILDKIELIGNENHGLYLADQYVKGIAKSRKS

SEQ ID NO: 5377 - protein, 1379 aa, Artificial Sequence
  SARS-CoV-2/India/1-31/2020__EPI_ISL_413523 spike protein (1-1211)(F970C_G999C) Ferritin construct
MFVFLVLLPLVSSQCVNLTTRTQLPPAYTNSFTRGVYYPDKVFRSSVLHSTQDLFLPFFSNVTWFHAIHVSGTNGTKRFDNPVLPFNDGVYFASTEKSNIIRGWIFGTTLDSKTQSLLIVNNATNVVIKVCEFQFCNDPFLGVYYHKNNKSWMESEFRVYSSANNCTFEYVSQPFLMDLEGKQGNFKNLREFVFKNIDGYFKIYSKHTPINLVRDLPQGFSALEPLVDLPIGINITRFQTLLALHRSYLTPGDSSSGWTAGAAAYYVGYLQPRTFLLKYNENGTITDAVDCALDPLSETKCTLKSFTVEKGIYQTSNFRVQPTESIVRFPNITNLCPFGEVFNATRFASVYAWNRKRISNCVADYSVLYNSASFSTFKCYGVSPTKLNDLCFTNVYADSFVIRGDEVRQIAPGQTGKIADYNYKLPDDFTGCVIAWNSNNLDSKVGGNYNYLYRLFRKSNLKPFERDISTEIYQAGSTPCNGVEGFNCYFPLQSYGFQPTNGVGYQPYRVVVLSFELLHAPATVCGPKKSTNLVKNKCVNFNFNGLTGTGVLTESNKKFLPFQQFGRDIADTTDAVRDPQTLEILDITPCSFGGVSVITPGTNTSNQVAVLYQDVNCTEVPVAIHADQLTPTWRVYSTGSNVFQTRAGCLIGAEHVNNSYECDIPIGAGICASYQTQTNSPRRARSVASQSIIAYTMSLGAENSVAYSNNSIAIPTNFTISVTTEILPVSMTKTSVDCTMYICGDSTECSNLLLQYGSFCTQLNRALTGIAVEQDKNTQEVFAQVKQIYKTPPIKDFGGFNFSQILPDPSKPSKRSFIEDLLFNKVTLADAGFIKQYGDCLGDIAARDLICAQKFNGLTVLPPLLTDEMIAQYTSALLAGTITSGWTFGAGAALQIPFAMQMAYRFNGIGVTQNVLYENQKLIANQFNSVIGKIQDSLSSTASALGKLQDVVNQNAQALNTLVKQLSSNCGAISSVLNDILSRLDKVEAEVQIDRLITCRLQSLQTYVTQQLIRAAEIRASANLAATKMSECVLGQSKRVDFCGKGYHLMSFPQSAPHGVVFLHVTYVPAQEKNFTTAPAICHDGKAHFPREGVFVSNGTHWFVTQRNFYEPQIITTDNTFVSGNCDVVIGIVNNTVYDPLQPELDSFKEELDKYFKNHTSPDVDLGDISGINASVVNIQKEIDRLNEVAKNLNESLIDLQELGKYEQYIKGGGGSDIIKLLNEQVNKEMQSSNLYMSMSSWCYTHSLDGAGLFLFDHAAEEYEHAKKLIIFLNENNVPVQLTSISAPEHKFEGLTQIFQKAYEHEQHISESINNIVDHAIKSKDHATFNFLQWYVAEQHEEEVLFKDILDKIELIGNENHGLYLADQYVKGIAKSRKS

SEQ ID NO: 5378 - protein, 1379 aa, Artificial Sequence
  SARS-CoV-2/Guangdong/GD2020087-P0008/2020__EPI_ISL_413863 spike protein (1-1211)(F970C_G999C) Ferritin construct
MFVFLVLLPLVSSQCVNLTTRTQLPPAYTNSFTRGVYYPDKVFRSSVLHSTQDLFLPFFSNVTWFHAIHVSGTNGTKRFDNPVLPFNDGVYFASTEKSNIIRGWIFGTTLDSKTQSLLIVNNATNVVIKVCEFQFCNDPFLGVYYHKNNKSWMESEFRVYSSANNCTFEYVSQPFLMDLEGKQGNFKNLREFVFKNIDGYFKIYSKHTPINLVRDLPQGFSALEPLVDLPIGINITRFQTLLALHRSYLTPGDSSSGWTAGAAAYYVGYLQPRTFLLKYNENGTITDAVDCALDPLSETKCTLKSFTVEKGIYQTSNFRVQPTESIVRFPNITNLCPFGEVFNATRFASVYAWNRKRISNCVADYSVLYNSASFSTFKCYGVSPTKLNDLCFTNVYADSFVIRGDEVREIAPGQTGKIADYNYKLPDDFTGCVIAWNSNNLDSKVGGNYNYLYRLFRKSNLKPFERDISTEIYQAGSTPCNGVEGFNCYFPLQSYGFQPTNGVGYQPYRVVVLSFELLHAPATVCGPKKSTNLVKNKCVNFNFNGLTGTGVLTESNKKFLPFQQFGRDIADTTDAVRDPQTLEILDITPCSFGGVSVITPGTNTSNQVAVLYQDVNCTEVPVAIHADQLTPTWRVYSTGSNVFQTRAGCLIGAEHVNNSYECDIPIGAGICASYQTQTNSPRRARSVASQSIIAYTMSLGAENSVAYSNNSIAIPTNFTISVTTEILPVSMTKTSVDCTMYICGDSTECSNLLLQYGSFCTQLNRALTGIAVEQDKNTQEVFAQVKQIYKTPPIKDFGGFNFSQILPDPSKPSKRSFIEDLLFNKVTLADAGFIKQYGDCLGDIAARDLICAQKFNGLTVLPPLLTDEMIAQYTSALLAGTITSGWTFGAGAALQIPFAMQMAYRFNGIGVTQNVLYENQKLIANQFNSAIGKIQDSLSSTASALGKLQDVVNQNAQALNTLVKQLSSNCGAISSVLNDILSRLDKVEAEVQIDRLITCRLQSLQTYVTQQLIRAAEIRASANLAATKMSECVLGQSKRVDFCGKGYHLMSFPQSAPHGVVFLHVTYVPAQEKNFTTAPAICHDGKAHFPREGVFVSNGTHWFVTQRNFYEPQIITTDNTFVSGNCDVVIGIVNNTVYDPLQPELDSFKEELDKYFKNHTSPDVDLGDISGINASVVNIQKEIDRLNEVAKNLNESLIDLQELGKYEQYIKGGGGSDIIKLLNEQVNKEMQSSNLYMSMSSWCYTHSLDGAGLFLFDHAAEEYEHAKKLIIFLNENNVPVQLTSISAPEHKFEGLTQIFQKAYEHEQHISESINNIVDHAIKSKDHATFNFLQWYVAEQHEEEVLFKDILDKIELIGNENHGLYLADQYVKGIAKSRKS

SEQ ID NO: 5379 - protein, 1379 aa, Artificial Sequence
  SARS-CoV-2/Sweden/01/2020__EPI_ISL_411951 spike protein (1-1211)(F970C_G999C) Ferritin construct
MFVFLVLLPLVSSQCVNLTTRTQLPPAYTNSFTRGVYYPDKVFRSSVLHSTQDLFLPFFSNVTWFHAIHVSGTNGTKRFDNPVLPFNDGVYFASTEKSNIIRGWIFGTTLDSKTQSLLIVNNATNVVIKVCEFQFCNDPFLGVYYHKNNKSWMESEFRVYSSANNCTFEYVSQPFLMDLEGKQGNFKNLREFVFKNIDGYFKIYSKHTPINLVRDLPQGFSALEPLVDLPIGINITRFQTLLALHRSYLTPGDSSSGWTAGAAAYYVGYLQPRTFLLKYNENGTITDAVDCALDPLSETKCTLKSFTVEKGIYQTSNFRVQPTESIVRFPNITNLCPFGEVFNATRFASVYAWNRKRISNCVADYSVLYNSASFSTFKCYGVSPTKLNDLCFTNVYADSFVIRGDEVRQIAPGQTGKIADYNYKLPDDFTGCVIAWNSNNLDSKVGGNYNYLYRLFRKSNLKPFERDISTEIYQAGSTPCNGVEGFNCYFPLQSYGFQPTNGVGYQPYRVVVLSFELLHAPATVCGPKKSTNLVKNKCVNFNFNGLTGTGVLTESNKKFLPFQQFGRDIADTTDAVRDPQTLEILDITPCSFGGVSVITPGTNTSNQVAVLYQDVNCTEVPVAIHADQLTPTWRVYSTGSNVFQTRAGCLIGAEHVNNSYECDIPIGAGICASYQTQTNSPRRARSVASQSIIAYTMSLGAENSVAYSNNSIAIPTNFTISVTTEILPVSMTKTSVDCTMYICGDSTECSNLLLQYGSFCTQLNRALTGIAVEQDKNTQEVFAQVKQIYKTPPIKDCGGFNFSQILPDPSKPSKRSFIEDLLFNKVTLADAGFIKQYGDCLGDIAARDLICAQKFNGLTVLPPLLTDEMIAQYTSALLAGTITSGWTFGAGAALQIPFAMQMAYRFNGIGVTQNVLYENQKLIANQFNSAIGKIQDSLSSTASALGKLQDVVNQNAQALNTLVKQLSSNCGAISSVLNDILSRLDKVEAEVQIDRLITCRLQSLQTYVTQQLIRAAEIRASANLAATKMSECVLGQSKRVDFCGKGYHLMSFPQSAPHGVVFLHVTYVPAQEKNFTTAPAICHDGKAHFPREGVFVSNGTHWFVTQRNFYEPQIITTDNTFVSGNCDVVIGIVNNTVYDPLQPELDSFKEELDKYFKNHTSPDVDLGDISGINASVVNIQKEIDRLNEVAKNLNESLIDLQELGKYEQYIKGGGGSDIIKLLNEQVNKEMQSSNLYMSMSSWCYTHSLDGAGLFLFDHAAEEYEHAKKLIIFLNENNVPVQLTSISAPEHKFEGLTQIFQKAYEHEQHISESINNIVDHAIKSKDHATFNFLQWYVAEQHEEEVLFKDILDKIELIGNENHGLYLADQYVKGIAKSRKS

SEQ ID NO: 5380 - protein, 1379 aa, Artificial Sequence
  SARS-CoV-2/Tianmen/HBCDC-HB-07/2020__EPI_ISL_412983 spike protein (1-1211)(F970C_G999C) Ferritin construct
MFVFLVLLPLVSSQCVNLTTRTQLPPAYTNSFTRGVYYPDKVFRSSVLHSTQDLFLPFFSNVTWFHAIHVSGTNGTKRFDNPVLPFNDGVYFASTEKSNIIRGWIFGTTLDSKTQSLLIVNNATNVVIKVCEFQFCNDPFLGVYYHKNNKSWMESEFRVYSSANNCTFEYVSQPFLMDLEGKQGNFKNLREFVFKNIDGYFKIYSKHTPINLVRDLPQGFSALEPLVDLPIGINITRFQTLLALHRSYLTPGDSSSGWTAGAAAYYVGYLQPRTFLLKYNENGTITDAVDCALDPLSETKCTLKSFTVEKGIYQTSNFRVQPTESIVRFPNITNLCPFGEVFNATRFASVYAWNRKRISNCVADYSVLYNSASFSTFKCYGVSPTKLNDLCFTNVYADSFVIRGDEVRQIAPGQTGKIADYNYKLPDDFTGCVIAWNSNNLDSKVGGNYNYLYRLFRKSNLKPFERDISTEIYQAGSTPCNGVEGFNCYFPLQSYGFQPTNGVGYQPYRVVVLSFELLHAPATVCGPKKSTNLVKNKCVNFNFNGLTGTGVLTESNKKFLPFQQFGRDIADTTDAVRDPQTLEILDITPCSFGGVSVITPGTNTSNQVAVLYQDLNCTEVPVAIHADQLTPTWRVYSTGSNVFQTRAGCLIGAEHVNNSYECDIPIGAGICASYQTQTNSPRRARSVASQSIIAYTMSLGAENSVAYSNNSIAIPTNFTISVTTEILPVSMTKTSVDCTMYICGDSTECSNLLLQYGSFCTQLNRALTGIAVEQDKNTQEVFAQVKQIYKTPPIKDFGGFNFSQILPDPSKPSKRSFIEDLLFNKVTLADAGFIKQYGDCLGDIAARDLICAQKFNGLTVLPPLLTDEMIAQYTSALLAGTITSGWTFGAGAALQIPFAMQMAYRFNGIGVTQNVLYENQKLIANQFNSAIGKIQDSLSSTASALGKLQDVVNQNAQALNTLVKQLSSNCGAISSVLNDILSRLDKVEAEVQIDRLITCRLQSLQTYVTQQLIRAAEIRASANLAATKMSECVLGQSKRVDFCGKGYHLMSFPQSAPHGVVFLHVTYVPAQEKNFTTAPAICHDGKAHFPREGVFVSNGTHWFVTQRNFYEPQIITTDNTFVSGNCDVVIGIVNNTVYDPLQPELDSFKEELDKYFKNHTSPDVDLGDISGINASVVNIQKEIDRLNEVAKNLNESLIDLQELGKYEQYIKGGGGSDIIKLLNEQVNKEMQSSNLYMSMSSWCYTHSLDGAGLFLFDHAAEEYEHAKKLIIFLNENNVPVQLTSISAPEHKFEGLTQIFQKAYEHEQHISESINNIVDHAIKSKDHATFNFLQWYVAEQHEEEVLFKDILDKIELIGNENHGLYLADQYVKGIAKSRKS

SEQ ID NO: 5381 - protein, 1379 aa, Artificial Sequence
  SARS-CoV-2/Hong Kong/case42_VM20002493/2020__EPI_ISL_414527 spike protein (1-1211)(F970C_G999C) Ferritin construct
MFVFLVLLPLVSSQCVNLTTRTQLPPAYTNSFTRGVYYPDKVFRSSVLHSTQDLFLPFFSNVTWFHAIHVSGTNGTKRFDNPVLPFNDGVYFASTEKSNIIRGWIFGTTLDSKTQSLLIVNNATNVVIKVCEFQFCNDPFLGVYYHKNNKSWMESEFRVYSSANNCTFEYVSQPFLMDLEGKQGNFKNLREFVFKNIDGYFKIYSKHTPINLVRDLPQGFSALEPLVDLPIGINITRFQTLLALHRSYLTPGDSSSGWTAGAAAYYVGYLQPRTFLLKYNENGTITDAVDCALDPLSETKCTLKSFTVEKGIYQTSNFRVQPTESIVRFPNITNLCPFGEVFNATRFASVYAWNRKRISNCVADYSVLYNSASFSTFKCYGVSPTKLNDLCFTNVYADSFVIRGDEVRQIAPGQTGKIADYNYKLPDDFTGCVIAWNSNNLDSKVGGNYNYLYRLFRKSNLKPFERDISTEIYQAGSTPCNGVEGFNCYFPLQSYGFQPTNGVGYQPYRVVVLSFELLHAPATVCGPKKSTNLVKNKCVNFNFNGLTGTGVLTESNKKFLPFQQFGRDIADTTDAVRDPQTLEILDITPCSFGGVSVITPGTNTSNQVAVLYQDVNCTEVPVAIHADQLTPTWRVYSTGSNVFQTRAGCLIGAEHVNNSYECDIPIGAGICASYQTQTNSPRRARSVASQSIIAYTMSLGAENSVAYSNNSIAIPTNFAISVTTEILPVSMTKTSVDCTMYICGDSTECSNLLLQYGSFCTQLNRALTGIAVEQDKNTQEVFAQVKQIYKTPPIKDFGGFNFSQILPDPSKPSKRSFIEDLLFNKVTLADAGFIKQYGDCLGDIAARDLICAQKFNGLTVLPPLLTDEMIAQYTSALLAGTITSGWTFGAGAALQIPFAMQMAYRFNGIGVTQNVLYENQKLIANQFNSAIGKIQDSLSSTASALGKLQDVVNQNAQALNTLVKQLSSNCGAISSVLNDILSRLDKVEAEVQIDRLITCRLQSLQTYVTQQLIRAAEIRASANLAATKMSECVLGQSKRVDFCGKGYHLMSFPQSAPHGVVFLHVTYVPAQEKNFTTAPAICHDGKAHFPREGVFVSNGTHWFVTQRNFYEPQIITTDNTFVSGNCDVVIGIVNNTVYDPLQPELDSFKEELDKYFKNHTSPDVDLGDISGINASVVNIQKEIDRLNEVAKNLNESLIDLQELGKYEQYIKGGGGSDIIKLLNEQVNKEMQSSNLYMSMSSWCYTHSLDGAGLFLFDHAAEEYEHAKKLIIFLNENNVPVQLTSISAPEHKFEGLTQIFQKAYEHEQHISESINNIVDHAIKSKDHATFNFLQWYVAEQHEEEVLFKDILDKIELIGNENHGLYLADQYVKGIAKSRKS

SEQ ID NO: 5382 - protein, 1379 aa, Artificial Sequence
  SARS-CoV-2/USA/CruiseA-23/2020__EPI_ISL_414482 spike protein (1-1211)(F970C_G999C) Ferritin construct
MFVFLVLLPLVSSQCVNLTTRTQLPPAYTNSFTRGVYYPDKVFRSSVLHSTQDLFLPFFSNVTWFHAIHVSGTNGTKRFDNPVLPFNDGVYFASTEKSNIIRGWIFGTTLDSKTQSLLIVNNATNVVIKVCEFQFCNDPFLGVYYHKNNKSWMESEFRVYSSANNCTFEYVSQPFLMDLEVKQGNFKNLREFVFKNIDGYFKIYSKHTPINLVRDLPQGFSALEPLVDLPIGINITRFQTLLALHRSYLTPGDSSSGWTAGAAAYYVGYLQPRTFLLKYNENGTITDAVDCALDPLSETKCTLKSFTVEKGIYQTSNFRVQPTESIVRFPNITNLCPFGEVFNATRFASVYAWNRKRISNCVADYSVLYNSASFSTFKCYGVSPTKLNDLCFTNVYADSFVIRGDEVRQIAPGQTGKIADYNYKLPDDFTGCVIAWNSNNLDSKVGGNYNYLYRLFRKSNLKPFERDISTEIYQAGSTPCNGVEGFNCYFPLQSYGFQPTNGVGYQPYRVVVLSFELLHAPATVCGPKKSTNLVKNKCVNFNFNGLTGTGVLTESNKKFLPFQQFGRDIADTTDAVRDPQTLEILDITPCSFGGVSVITPGTNTSNQVAVLYQDVNCTEVPVAIHADQLTPTWRVYSTGSNVFQTRAGCLIGAEHVNNSYECDIPIGAGICASYQTQTNSPRRARSVASQSIIAYTMSLGAENSVAYSNNSIAIPTNFTISVTTEILPVSMTKTSVDCTMYICGDSTECSNLLLQYGSFCTQLNRALTGIAVEQDKNTQEVFAQVKQIYKTPPIKDFGGFNFSQILPDPSKPSKRSFIEDLLFNKVTLADAGFIKQYGDCLGDIAARDLICAQKFNGLTVLPPLLTDEMIAQYTSALLAGTITSGWTFGAGAALQIPFAMQMAYRFNGIGVTQNVLYENQKLIANQFNSAIGKIQDSLSSTASALGKLQDVVNQNAQALNTLVKQLSSNCGAISSVLNDILSRLDKVEAEVQIDRLITCRLQSLQTYVTQQLIRAAEIRASANLAATKMSECVLGQSKRVDFCGKGYHLMSFPQSAPHGVVFLHVTYVPAQEKNFTTAPAICHDGKAHFPREGVFVSNGTHWFVTQRNFYEPQIITTDNTFVSGNCDVVIGIVNNTVYDPLQPELDSFKEELDKYFKNHTSPDVDLGDISGINASVVNIQKEIDRLNEVAKNLNESLIDLQELGKYEQYIKGGGGSDIIKLLNEQVNKEMQSSNLYMSMSSWCYTHSLDGAGLFLFDHAAEEYEHAKKLIIFLNENNVPVQLTSISAPEHKFEGLTQIFQKAYEHEQHISESINNIVDHAIKSKDHATFNFLQWYVAEQHEEEVLFKDILDKIELIGNENHGLYLADQYVKGIAKSRKS

SEQ ID NO: 5383 - protein, 1379 aa, Artificial Sequence
  SARS-CoV-2/Hong Kong/case85_VM20002868/2020__EPI_ISL_414519 spike protein (1-1211)(F970C_G999C) Ferritin construct
MFVFLVLVPLVSSQCVNLTTRTQLPPAYTNSFTRGVYYPDKVFRSSVLHSTQDLFLPFFSNVTWFHAIHVSGTNGTKRFDNPVLPFNDGVYFASTEKSNIIRGWIFGTTLDSKTQSLLIVNNATNVVIKVCEFQFCNDPFLGVYYHKNNKSWMESEFRVYSSANNCTFEYVSQPFLMDLEGKQGNFKNLREFVFKNIDGYFKIYSKHTPINLVRDLPQGFSALEPLVDLPIGINITRFQTLLALHRSYLTPGDSSSGWTAGAAAYYVGYLQPRTFLLKYNENGTITDAVDCALDPLSETKCTLKSFTVEKGIYQTSNFRVQPTESIVRFPNITNLCPFGEVFNATRFASVYAWNRKRISNCVADYSVLYNSASFSTFKCYGVSPTKLNDLCFTNVYADSFVIRGDEVRQIAPGQTGKIADYNYKLPDDFTGCVIAWNSNNLDSKVGGNYNYLYRLFRKSNLKPFERDISTEIYQAGSTPCNGVEGFNCYFPLQSYGFQPTNGVGYQPYRVVVLSFELLHAPATVCGPKKSTNLVKNKCVNFNFNGLTGTGVLTESNKKFLPFQQFGRDIADTTDAVRDPQTLEILDITPCSFGGVSVITPGTNTSNQVAVLYQDVNCTEVPVAIHADQLTPTWRVYSTGSNVFQTRAGCLIGAEHVNNSYECDIPIGAGICASYQTQTNSPRRARSVASQSIIAYTMSLGAENSVAYSNNSIAIPTNFTISVTTEILPVSMTKTSVDCTMYICGDSTECSNLLLQYGSFCTQLNRALTGIAVEQDKNTQEVFAQVKQIYKTPPIKDFGGFNFSQILPDPSKPSKRSFIEDLLFNKVTLADAGFIKQYGDCLGDIAARDLICAQKFNGLTVLPPLLTDEMIAQYTSALLAGTITSGWTFGAGAALQIPFAMQMAYRFNGIGVTQNVLYENQKLIANQFNSAIGKIQDSLSSTASALGKLQDVVNQNAQALNTLVKQLSSNCGAISSVLNDILSRLDKVEAEVQIDRLITCRLQSLQTYVTQQLIRAAEIRASANLAATKMSECVLGQSKRVDFCGKGYHLMSFPQSAPHGVVFLHVTYVPAQEKNFTTAPAICHDGKAHFPREGVFVSNGTHWFVTQRNFYEPQIITTDNTFVSGNCDVVIGIVNNTVYDPLQPELDSFKEELDKYFKNHTSPDVDLGDISGINASVVNIQKEIDRLNEVAKNLNESLIDLQELGKYEQYIKGGGGSDIIKLLNEQVNKEMQSSNLYMSMSSWCYTHSLDGAGLFLFDHAAEEYEHAKKLIIFLNENNVPVQLTSISAPEHKFEGLTQIFQKAYEHEQHISESINNIVDHAIKSKDHATFNFLQWYVAEQHEEEVLFKDILDKIELIGNENHGLYLADQYVKGIAKSRKS

SEQ ID NO: 5384 - protein, 1379 aa, Artificial Sequence; identical to SEQ ID NO: 5374
  SARS-CoV-2/England/200990660/2020__EPI_ISL_414523 spike protein (1-1211)(F970C_G999C) Ferritin construct

SEQ ID NO: 5385 - protein, 1379 aa, Artificial Sequence
  SARS-CoV-2/Australia/NSW09/2020__EPI_ISL_413595 spike protein (1-1211)(F970C_G999C) Ferritin construct
MFVFLVLLPLVSSQCVNLTTRTQLPPAYTNSFTRGVYYPDKVFRSSVLHSTQDLFLPFFSNVTWFHAIHVSGTNGTKRFDNPVLPFNDGVYFASTEKSNIIRGWIFGTTLDSKTQSLLIVNNATNVVIKVCEFQFCNDPFLGVYYHKNNKSWMESEFRVYSSANNCTFEYVSQPFLMDLEGKQGNFKNLREFVFKNIDGYFKIYSKHTPINLVRDLPQGFSALEPLVDLPIGINITRFQTLLALHRSYLTPGDSSSGWTAGAAAYYVGYLQPRTFLLKYNENGTITDAVDCALDPLSETKCTLKSFTVEKGIYQTSNFRVQPTESIVRFPNITNLCPFGEVFNATRFASVYAWNRKRISNCVADYSVLYNSASFSTFKCYGVSPTKLNDLCFTNVYADSFVIRGDEVRQIAPGQTGKIADYNYKLPDDFTGCVIAWNSNNLDSKVGGNYNYLYRLFRKSNLKPFERDISTEIYQAGSTPCNGVEGFNCYFPLQSYGFQPTNGVGYQPYRVVVLSFELLHAPATVCGPKKSTNLVKNKCVNFNFNGLTGTGVLTESNKKFLPFQQFGRDIADTTDAVRDPQTLEILDITPCSFGGVSVITPGTNTSNQVAVLYQDVNCTEVPVAIHADQLTPTWRVYSTGSNVFQTRAGCLIGAEHVNNSYECDIPIGAGICASYQTQTNSPRRARSVASQSIIAYTMSLGAENSVAYSNNSIAIPTNFTISVTTEILPVSMTKTSVDCTMYICGDSTECSNLLLQYGSFCTQLNRALTGIAVEQDKNTQEVFAQVKQIYKTPPIKDFGGFNFSQILPDPSKPSKRSFIEDLLFNKVTLADAGFIKQYGDCLGDIAARDLICAQKFNGLTVLPPLLTDEMIAQYTSALLAGTITSGWTFGAGAALQIPFAMQMAYRFNGIGVTQNVLYENQKLIANQFNSAIGKIQDSLSFTASALGKLQDVVNQNAQALNTLVKQLSSNCGAISSVLNDILSRLDKVEAEVQIDRLITCRLQSLQTYVTQQLIRAAEIRASANLAATKMSECVLGQSKRVDFCGKGYHLMSFPQSAPHGVVFLHVTYVPAQEKNFTTAPAICHDGKAHFPREGVFVSNGTHWFVTQRNFYEPQIITTDNTFVSGNCDVVIGIVNNTVYDPLQPELDSFKEELDKYFKNHTSPDVDLGDISGINASVVNIQKEIDRLNEVAKNLNESLIDLQELGKYEQYIKGGGGSDIIKLLNEQVNKEMQSSNLYMSMSSWCYTHSLDGAGLFLFDHAAEEYEHAKKLIIFLNENNVPVQLTSISAPEHKFEGLTQIFQKAYEHEQHISESINNIVDHAIKSKDHATFNFLQWYVAEQHEEEVLFKDILDKIELIGNENHGLYLADQYVKGIAKSRKS

SEQ ID NO: 5386 - protein, 1379 aa, Artificial Sequence; identical to SEQ ID NO: 5366
  SARS-CoV-2/Australia/NSW10/2020__EPI_ISL_413596 spike protein (1-1211)(F970C_G999C) Ferritin construct

SEQ ID NO: 5387 - protein, 1379 aa, Artificial Sequence
  SARS-CoV-2/Switzerland/1000477797/2020__EPI_ISL_413023 spike protein (1-1211)(F970C_G999C) Ferritin construct
MFVFLVLLPLVSSQCVNLTTRTQLPPAYTNSFTRGVYYPDKVFRSSVLHSTQDLFLPFFSNVTWFHAIHVSGTNGTKRFDNPVLPFNDGVYFASTEKSNIIRGWIFGTTLDSKTQSLLIVNNATNVVIKVCEFQFCNDPFLGVYYHKNNKSWMESEFRVYSSANNCTFEYVSQPFLMDLEGKQGNFKNLREFVFKNIDGYFNIYSKHTPINLVRDLPQGFSALEPLVDLPIGINITRFQTLLALHRSYLTPGDSSSGWTAGAAAYYVGYLQPRTFLLKYNENGTITDAVDCALDPLSETKCTLKSFTVEKGIYQTSNFRVQPTESIVRFPNITNLCPFGEVFNATRFASVYAWNRKRISNCVADYSVLYNSASFSTFKCYGVSPTKLNDLCFTNVYADSFVIRGDEVRQIAPGQTGKIADYNYKLPDDFTGCVIAWNSNNLDSKVGGNYNYLYRLFRKSNLKPFERDISTEIYQAGSTPCNGVEGFNCYFPLQSYGFQPTNGVGYQPYRVVVLSFELLHAPATVCGPKKSTNLVKNKCVNFNFNGLTGTGVLTESNKKFLPFQQFGRDIADTTDAVRDPQTLEILDITPCSFGGVSVITPGTNTSNQVAVLYQGVNCTEVPVAIHADQLTPTWRVYSTGSNVFQTRAGCLIGAEHVNNSYECDIPIGAGICASYQTQTNSPRRARSVASQSIIAYTMSLGAENSVAYSNNSIAIPTNFTISVTTEILPVSMTKTSVDCTMYICGDSTECSNLLLQYGSFCTQLNRALTGIAVEQDKNTQEVFAQVKQIYKTPPIKDFGGFNFSQILPDPSKPSKRSFIEDLLFNKVTLADAGFIKQYGDCLGDIAARDLICAQKFNGLTVLPPLLTDEMIAQYTSALLAGTITSGWTFGAGAALQIPFAMQMAYRFNGIGVTQNVLYENQKLIANQFNSAIGKIQDSLSSTASALGKLQDVVNQNAQALNTLVKQLSSNCGAISSVLNDILSRLDKVEAEVQIDRLITCRLQSLQTYVTQQLIRAAEIRASANLAATKMSECVLGQSKRVDFCGKGYHLMSFPQSAPHGVVFLHVTYVPAQEKNFTTAPAICHDGKAHFPREGVFVSNGTHWFVTQRNFYEPQIITTDNTFVSGNCDVVIGIVNNTVYDPLQPELDSFKEELDKYFKNHTSPDVDLGDISGINASVVNIQKEIDRLNEVAKNLNESLIDLQELGKYEQYIKGGGGSDIIKLLNEQVNKEMQSSNLYMSMSSWCYTHSLDGAGLFLFDHAAEEYEHAKKLIIFLNENNVPVQLTSISAPEHKFEGLTQIFQKAYEHEQHISESINNIVDHAIKSKDHATFNFLQWYVAEQHEEEVLFKDILDKIELIGNENHGLYLADQYVKGIAKSRKS

SEQ ID NO: 5388 - protein, 1379 aa, Artificial Sequence
  SARS-CoV-2/Belgium/BA-02291/2020__EPI_ISL_415159 spike protein (1-1211)(F970C_G999C) Ferritin construct
MFVFLVLLPLVSSQCVNLTTRTQLPPAYTNSFTRGVYYPDKVFRSSVLHSTQDLFLPFFSNVTWFHAIHVSGTNGTKRFDNPVLPFNDGVYFASTEKSNIIRGWIFGTTLDSKTQSLLIVNNATNVVIKVCEFQFCNDPFLGVYYHKNNKSWMESEFRVYSSANNCTFEYVSQPFLMDLEGKQGNFKNLREFVFKNIDGYFKIYSKHTPINLVRDLPQGFSALEPLVDLPIGINITRFQTLLALHRSYLTPGDSSSGWTAGAAAYYVGYLQPRTFLLKYNENGTITDAVDCALDPLSETKCTLKSFTVEKGIYQTSNFRVQPTESIVRFPNITNLCPFGEVFNATRFASVYAWNRKRISNCVADYSVLYNSASFSTFKCYGVSPTKLNDLCFTNVYADSFVIRGDEVRQIAPGQTGKIADYNYKLPDDFTGCVIAWNSNNLDSKVGGNYNYLYRLFRRSNLKPFERDISTEIYQAGSTPCNGVEGFNCYFPLQSYGFQPTNGVGYQPYRVVVLSFELLPAPATVCGPKKSTNLVKNKCVNFNFNGLTGTGVLTESNKKFLPFQQFGRDIADTTDAVRDPQTLEILDITPCSFGGVSVITPGTNTSNQVAVLYQGVNCTEVPVAIHADQLTPTWRVYSTGSNVFQTRAGCLIGAEHVNNSYECDIPIGAGICASYQTQTNSPRRARSVASQSIIAYTMSLGAENSVAYSNNSIAIPTNFTISVTTEILPVSMTKTSVDCTMYICGDSTECSNLLLQYGSFCTQLNRALTGIAVEQDKNTQEVFAQVKQIYKTPPIKDFGGFNFSQILPDPSKPSKRSFIEDLLFNKVTLADAGFIKQYGDCLGDIAARDLICAQKFNGLTVLPPLLTDEMIAQYTSALLAGTITSGWTFGAGAALQIPFAMQMAYRFNGIGVTQNVLYENQKLIANQFNSAIGKIQDSLSSAAPALGKLQDVVNQNAQALNTLVKQLSSNCGAISSVLNDILSRLDKVEAEVQIDRLITCRLQSLQTYVTQQLIRAAEIRASANLAATKMSECVLGQSKRVDFCGKGYHLMSFPQSAPHGVVFLHVTYVPAQEKNFTTAPAICHDGKAHFPREGVFVSNGTHWFVTQRNFYEPQIITTDNTFVSGNCDVVIGIVNNTVYDPLQPELDSFKEELDKYFKNHTSPDVDLGDISGINASVVNIQKEIDRLNEVAKNLNESLIDLQELGKYEQYIKGGGGSDIIKLLNEQVNKEMQSSNLYMSMSSWCYTHSLDGAGLFLFDHAAEEYEHAKKLIIFLNENNVPVQLTSISAPEHKFEGLTQIFQKAYEHEQHISESINNIVDHAIKSKDHATFNFLQWYVAEQHEEEVLFKDILDKIELIGNENHGLYLADQYVKGIAKSRKS

SEQ ID NO: 5389 - protein, 1379 aa, Artificial Sequence
  SARS-CoV-2/USA/WA8-UW5/2020__EPI_ISL_413486 spike protein (1-1211)(F970C_G999C) Ferritin construct
MFVFLVLLPLVSSQCVNLTTRTQLPPAYTNSFTRGVYYPDKVFRSSVLHSTQDLFLPFFSNVTWFHAIHVSGTNGTKRFDNPVLPFNDGVYFASTEKSNIIRGWIFGTTLDSKTQSLLIVNNATNVVIKVCEFQFCNDPFLGVYYHKNNKSWMESEFRVYSSANNCTFEYVSQPFLMDLEGKQGNFKNLREFVFKNIDGYFKIYSKHTPINLVRDLPQGFSALEPLVDLPIGINITRFQTLLALHRSYLTPGDSSSGWTAGAAAYYVGYLQPRTFLLKYNENGTITDAVDCALDPLSETKCTLKSFTVEKGIYQTSNFRVQPTESIVRFPNITNLCPFGEVFNATRFASVYAWNRKRISNCVADYSVLYNSASFSTFKCYGVSPTKLNDLCFTNVYADSFVIRGDEVRQIAPGQTGKIADYNYKLPDDFTGCVIAWNSNNLDSKVGGNYNYLYRLFRKSNLKPFERDISTEIYQAGSTPCNGVEGFNCYFPLQSYGFQPTNGVGYQPYRVVVLSFELLHAPATVCGPKKSTNLVKNKCVNFNFNGLTGTGVLTESNKKFLPFQQFGRDIADTTDAVRDPQTLEILDITPCSFGGVSVITPGTNTSNQVAVLYQDVNCTEVPVAIHADQLTPTWRVYSTGSNVFQTRAGCLIGAEYVNNSYECDIPIGAGICASYQTQTNSPRRARSVASQSIIAYTMSLGAENSVAYSNNSIAIPTNFTISVTTEILPVSMTKTSVDCTMYICGDSTECSNLLLQYGSFCTQLNRALTGIAVEQDKNTQEVFAQVKQIYKTPPIKDFGGFNFSQILPDPSKPSKRSFIEDLLFNKVTLADAGFIKQYGDCLGDIAARDLICAQKFNGLTVLPPLLTDEMIAQYTSALLAGTITSGWTFGAGAALQIPFAMQMAYRFNGIGVTQNVLYENQKLIANQFNSAIGKIQDSLSSTASALGKLQDVVNQNAQALNTLVKQLSSNCGAISSVLNDILSRLDKVEAEVQIDRLITCRLQSLQTYVTQQLIRAAEIRASANLAATKMSECVLGQSKRVDFCGKGYHLMSFPQSAPHGVVFLHVTYVPAQEKNFTTAPAICHDGKAHFPREGVFVSNGTHWFVTQRNFYEPQIITTDNTFVSGNCDVVIGIVNNTVYDPLQPELDSFKEELDKYFKNHTSPDVDLGDISGINASVVNIQKEIDRLNEVAKNLNESLIDLQELGKYEQYIKGGGGSDIIKLLNEQVNKEMQSSNLYMSMSSWCYTHSLDGAGLFLFDHAAEEYEHAKKLIIFLNENNVPVQLTSISAPEHKFEGLTQIFQKAYEHEQHISESINNIVDHAIKSKDHATFNFLQWYVAEQHEEEVLFKDILDKIELIGNENHGLYLADQYVKGIAKSRKS

SEQ ID NO: 5390 - protein, 1379 aa, Artificial Sequence
  SARS-CoV-2/England/20102000506/2020__EPI_ISL_415147 spike protein (1-1211)(F970C_G999C) Ferritin construct
MFVFLVLLPLVSSQCVNLTTRTQLPPAYTNSFTRGVYYPDKVFRSSVLHSTQDLFLPFFSNVTWFHAIHVSGTNGTKRFDNPVLPFNDGVYFASTEKSNIIRGWIFGTTLDSKTQSLLIVNNATNVVIKVCEFQFCNDPFLGVYYHKNNKSWMESEFRVYSSANNCTFEYVSQPFLMDLEGKQGNFKNLREFVFKNIDGYFKIYSKHTPINLVRDLPQGFSALEPLVDLPIGINITRFQTLLALHRSYLTPGDSSSGWTAGAAAYYVGYLQPRTFLLKYNENGTITDAVDCALDPLSETKCTLKSFTVEKGIYQTSNFRVQPTESIVRFPNITNLCPFGEVFNATRFASVYAWNRKRISNCVADYSVLYNSASFSTFKCYGVSPTKLNDLCFTNVYADSFVIRGDEVRQIAPGQTGKIADYNYKLPDDFTGCVIAWNSNNLDSKVGGNYNYLYRLFRKSNLKPFERDISTEIYQAGSTPCNGVEGFNCYFPLQSYGFQPTNGVGYQPYRVVVLSFELLHAPATVCGPKKSTNLVKNKCVNFNFNGLTGTGVLTESNKKFLPFQQFGRDIADTTDAVRDPQTLEILDITPCSFGGVSVITPGTNTSNQVAVLYQGVNCTEVPVAIHADQLTPTWRVYSTGSNVFQTRAGCLIGAEHVNNSYECDIPIGAGICASYQTQTNSPRRARSVASQSIIAYTMSLGAENSVAYSNNSIAIPTNFTISVTTEILPVSMTKTSVDCTMYICGDSTECSNLLLQYGSFCTQLNRALTGIAVEQDKNTQEVFAQVKQIYKTPPIKDFGGFNFSQILPDPSKPSKRSFIEDLLFNKVTLADAGFIKQYGYCLGDIAARDLICAQKFNGLTVLPPLLTDEMIAQYTSALLAGTITSGWTFGAGAALQIPFAMQMAYRFNGIGVTQNVLYENQKLIANQFNSAIGKIQDSLSSTASALGKLQDVVNQNAQALNTLVKQLSSNCGAISSVLNDILSRLDKVEAEVQIDRLITCRLQSLQTYVTQQLIRAAEIRASANLAATKMSECVLGQSKRVDFCGKGYHLMSFPQSAPHGVVFLHVTYVPAQEKNFTTAPAICHDGKAHFPREGVFVSNGTHWFVTQRNFYEPQIITTDNTFVSGNCDVVIGIVNNTVYDPLQPELDSFKEELDKYFKNHTSPDVDLGDISGINASVVNIQKEIDRLNEVAKNLNESLIDLQELGKYEQYIKGGGGSDIIKLLNEQVNKEMQSSNLYMSMSSWCYTHSLDGAGLFLFDHAAEEYEHAKKLIIFLNENNVPVQLTSISAPEHKFEGLTQIFQKAYEHEQHISESINNIVDHAIKSKDHATFNFLQWYVAEQHEEEVLFKDILDKIELIGNENHGLYLADQYVKGIAKSRKS

SEQ ID NO: 5391 - protein, 1379 aa, Artificial Sequence
  SARS-CoV-2/Belgium/VAG-03013/2020__EPI_ISL_415155 spike protein (1-1211)(F970C_G999C) Ferritin construct
MFVFLVLLPLVSSQCVNLTTRTQLPPAYTNSFTRGVYYPDKVFRSSVLHSTQDLFLPFFSNVTWFHAIHVSGTNGTKRFDNPVLPFNDGVYFASTEKSNIIRGWIFGTTLDSKTQSLLIVNNATNVVIKVCEFQFCNDPFLGVYYHKNNKSWMESEFRVYSSANNCTFEYVSQPFLMDLEGKQGNFKNLREFVFKNIDGYFKIYSKHTPINLVRDLPQGFSALEPLVDLPIGINITRFQTLLALHRSYLTPGDSSSGWTAGAAAYYVGYLQPRTFLLKYNENGTITDAVDCALDPLSETKCTLKSFTVEKGIYQTSNFRVQPTESIVRFPNITNLCPFGEVFNATRFASVYAWNRKRISNCVADYSVLYNSASFSTFKCYGVSPTKLNDLCFTNVYADSFVIRGDEVRQIAPGQTGKIADYNYKLPDDFTGCVIAWNSNNLDSKVGGNYNYLYRLFRKSNLKPFERDISTEIYQAGSTPCNGVEGFNCYFPLQSYGFQPTNGVGYQPYRVVVLSFELLHAPATVCGPKKSTNLVKNKCVNFNFNGLTGTGVLTESNKKFLPFQQFGRDIADTTDAVRDPQTLEILDITPCSFGGVSVITPGTNTSNQVAVLYQGVNCTEVPVAIHADQLTPTWRVYSTGSNVFQTRAGCLIGAEHVNNSYECDIPIGAGICASYQTQTNSPRRARSVASQSIIAYTMSLGAENSVAYSNNSIAIPTNFTISVTTEILPVSMTKTSVDCTMYICGDSTECSNLLLQYGSFCTQLNRALTGIAVEQDKNTQEVFAQVKQIYKTPPIKDFGGFNFSQILPDPSKPSKRSFIEDLLFNKVTLADAGFIKQYGDCLGDIAARDLICAQKFNGLTVLPPLLTDEMIAQYTSALLAGTITSGWTFGAGAALQIPFAMQMAYRFNGIGVTQNVLYENQKLIANQFNSAIGKIQDSLSSTATALGKLQDVVNQNAQALNTLVKQLSSNCGAISSVLNDILSRLDKVEAEVQIDRLITCRLQSLQTYVTQQLIRAAEIRASANLAATKMSECVLGQSKRVDFCGKGYHLMSFPQSAPHGVVFLHVTYVPAQEKNFTTAPAICHDGKAHFPREGVFVSNGTHWFVTQRNFYEPQIITTDNTFVSGNCDVVIGIVNNTVYDPLQPELDSFKEELDKYFKNHTSPDVDLGDISGINASVVNIQKEIDRLNEVAKNLNESLIDLQELGKYEQYIKGGGGSDIIKLLNEQVNKEMQSSNLYMSMSSWCYTHSLDGAGLFLFDHAAEEYEHAKKLIIFLNENNVPVQLTSISAPEHKFEGLTQIFQKAYEHEQHISESINNIVDHAIKSKDHATFNFLQWYVAEQHEEEVLFKDILDKIELIGNENHGLYLADQYVKGIAKSRKS

SEQ ID NO: 5392 - protein, 1379 aa, Artificial Sequence
  SARS-CoV-2/Belgium/BC-03016/2020__EPI_ISL_415157 spike protein (1-1211)(F970C_G999C) Ferritin construct
MFVFLVLLPLVSSQCVNLTTRTQLPPAYTNSFTRGVYYPDKVFRSSVLHSTQDLFLPFFSNVTWFHAIHVSGTNGTKRFDNPVLPFNDGVYFASTEKSNIIRGWIFGTTLDSKTQSLLIVNNATNVVIKVCEFQFCNDPFLGVYYHKNNKSWMESEFRVYSSANNCTFEYVSQPFLMDLEGKQGNFKNLREFVFKNIDGYFKIYSKHTPINLVRDLPQGFSALEPLVDLPIGINITRFQTLLALHRSYLTPGDSSSGWTAGAAAYYVGYLQPRTFLLKYNENGTITDAVDCALDPLSETKCTLKSFTVEKGIYQTSNFRVQPTESIVRFPNITNLCPFGEVFNATRFASVYAWNRKRISNCVADYSVLYNSASFSTFKCYGVSPTKLNDLCFTNVYADSFVIRGDEVRQIAPGQTGKIADYNYKLPDDFTGCVIAWNSNNLDSKVGGNYNYLYRLFRKSNLKPFERDISTEIYQAGSTPCNGVEGFNCYFPLQSYGFQPTNGVGYQPYRVVVLSFELLHAPATVCGPKKSTNLVKNKCVNFNFNGLTGTGVLTESNKKFLPFQQFGRDIADTTDAVRDPQTLEILDITPCSFGGVSVITPGTNTSNQVAVLYQGVNCTEVPVAIHADQLTPTWRVYSTGSNVFQTRAGCLIGAEHVNNSYECDIPIGAGICASYQTQTNSPRRARSVASQSIIAYTMSLGAENSVAYSNNSIAIPTNFTISVTTEILPVSMTKTSVDCTMYICGDSTECSNLLLQYGSFCTQLNRALTGIAVEQDKNTQEVFAQVKQIYKTPPIKDFGGFNFSQILPDPSKPSKRSFIEDLLFNKVTLADAGFIKQYGDCLGDIAARDLICAQKFNGLTVLPPLLTDEMIAQYTSALLAGTITSGWTFGAGAALQIPFAMQMAYRFNGIGVTQNVLYENQKLIANQFNSAIGKIQDSLSSTAPALGKLQDVVNQNAQALNTLVKQLSSNCGAISSVLNDILSRLDKVEAEVQIDRLITCRLQSLQTYVTQQLIRAAEIRASANLAATKMSECVLGQSKRVDFCGKGYHLMSFPQSAPHGVVFLHVTYVPAQEKNFTTAPAICHDGKAHFPREGVFVSNGTHWFVTQRNFYEPQIITTDNTFVSGNCDVVIGIVNNTVYDPLQPELDSFKEELDKYFKNHTSPDVDLGDISGINASVVNIQKEIDRLNEVAKNLNESLIDLQELGKYEQYIKGGGGSDIIKLLNEQVNKEMQSSNLYMSMSSWCYTHSLDGAGLFLFDHAAEEYEHAKKLIIFLNENNVPVQLTSISAPEHKFEGLTQIFQKAYEHEQHISESINNIVDHAIKSKDHATFNFLQWYVAEQHEEEVLFKDILDKIELIGNENHGLYLADQYVKGIAKSRKS

SEQ ID NO: 5393 - protein, 1379 aa, Artificial Sequence
  SARS-CoV-2/Germany/BavPat3/2020__EPI_ISL_414521 spike protein (1-1211)(F970C_G999C) Ferritin construct
MFVFLVLLPLVSSQCVNLTTRTQLPPAYTNSFTRGVYYPDKVFRSSVLHSTQDLFLPFFSNVTWFHAIHVSGTNGTKRFDNPVLPFNDGVYFASTEKSNIIRGWIFGTTLDSKTQSLLIVNNATNVVIKVCEFQFCNDPFLGVYYHKNNKSWMESEFRVYSSANNCTFEYVSQPFLMDLEGKQGNFKNLREFVFKNIDGYFKIYSKHTPINLVRDLPQGFSALEPLVDLPIGINITRFQTLLALHRSYLTPGDSSSGWTAGAAAYYVGYLQPRTFLLKYNENGTITDAVDCALDPLSETKCTLKSFTVEKGIYQTSNFRVQPTESIVRFPNITNLCPFGEVFNATRFASVYAWNRKRISNCVADYSVLYNSASFSTFKCYGVSPTKLNDLCFTNVYADSFVIRGDEVRQIAPGQTGKIADYNYKLPDDFTGCVIAWNSNNLDSKVGGNYNYLYRLFRKSNLKPFERDISTEIYQAGSTPCNGVEGFNCYFPLQSYGFQPTNGVGYQPYRVVVLSFELLHAPATVCGPKKSTNLVKNKCVNFNFNGLTGTGVLTESNKKFLPFQQFGRDIADTTDAVRDPQTLEILDITPCSFGGVSVITPGTNTSNQVAVLYQDVNCTEVPVAIHADQLTPTWRVYSTGSNVFQTRAGCLIGAEHVNNSYECDIPIGAGICASYQTQTNSPRRARSVASQSIIAYTMSLGAENSVAYSNNSIAIPTNFTISVTTEILPVSMTKTSVDCTMYICGDSTECSNLLLQYGSFCTQLNRALTGIAVEQDKNTQQVFAQVKQIYKTPPIKDFGGFNFSQILPDPSKPSKRSFIEDLLFNKVTLADAGFIKQYGDCLGDIAARDLICAQKFNGLTVLPPLLTDEMIAQYTSALLAGTITSGWTFGAGAALQIPFAMQMAYRFNGIGVTQNVLYENQKLIANQFNSAIGKIQDSLSSTASALGKLQDVVNQNAQALNTLVKQLSSNCGAISSVLNDILSRLDKVEAEVQIDRLITCRLQSLQTYVTQQLIRAAEIRASANLAATKMSECVLGQSKRVDFCGKGYHLMSFPQSAPHGVVFLHVTYVPAQEKNFTTAPAICHDGKAHFPREGVFVSNGTHWFVTQRNFYEPQIITTDNTFVSGNCDVVIGIVNNTVYDPLQPELDSFKEELDKYFKNHTSPDVDLGDISGINASVVNIQKEIDRLNEVAKNLNESLIDLQELGKYEQYIKGGGGSDIIKLLNEQVNKEMQSSNLYMSMSSWCYTHSLDGAGLFLFDHAAEEYEHAKKLIIFLNENNVPVQLTSISAPEHKFEGLTQIFQKAYEHEQHISESINNIVDHAIKSKDHATFNFLQWYVAEQHEEEVLFKDILDKIELIGNENHGLYLADQYVKGIAKSRKS

SEQ ID NO: 5394 - protein, 1379 aa, Artificial Sequence
  SARS-CoV-2/France/HF1805/2020__EPI_ISL_414628 spike protein (1-1211)(F970C_G999C) Ferritin construct
MFVFLVLLPLVSSQCVNLTTRTQLPPAYTNSFTRGVYYPDKVFRSSVLHSTQDLFLPFFSNVTWFHAIHVSGTNGTKRFDNPVLPFNDGVYFASTEKSNIIRGWIFGTTLDSKTQSLLIVNNATNVVIKVCEFQFCNDPFLGVYYHKNNKSWMESEFRVYSSANNCTFEYVSQPFLMDLEGKQGNFKNLREFVFKNIDGYFKIYSKHTPINLVRDLPQGFSALEPLVDLPIGINITRFQTLLALHRSYLTPGDSSSGWTAGAAAYYVGYLQPRTFLLKYNENGTITDAVDCALDPLSETKCTLKSFTVEKGIYQTSNFRVQPTESIVRFPNITNLCPFGEVFNATRFASVYAWNRKRISNCVADYSVLYNSASFSTFKCYGVSPTKLNDLCFTNVYADSFVIRGDEVRQIAPGQTGKIADYNYKLPDDFTGCVIAWNSNNLDSKVGGNYNYLYRLFRKSNLKPFERDISTEIYQAGSTPCNGVEGFNCYFPLQSYGFQPTNGVGYQPYRVVVLSFELLHAPATVCGPKKSTNLVKNKCVNFNFNGLTGTGVLTESNKKFLPFQQFGRDIADTTDAVRDPQTLEILDITPCSFGGVSVITPGTNTSNQVAVLYQGVNCTEVPVAIHADQLTPTWRVYSTGSNVFQTRAGCLIGAEHVNNSYECDIPIGAGICASYQTQTNSPRRARSVASQSIIAYTMSLGAENSVAYSNNSIAIPTNFTISVTTEILPVSMTKTSVDCTMYICGDSTECSNLLLQYGSFCTQLNRALTGIAVEQDKNTQEVFAQVKQIYKTPPIKDFGGFNFSQILPDPSKPSKRSFIEDLLFNKVTLADAGFIKQYGDCLGDIAARDLICAQKFNGLTVLPPLLTDEMIAQYTSALLAGTITSGWTFGAGAALQIPFAMQMAYRFNGIGVTQNVLYENQKLIANQFNSAIGKIQDSLSSTASALGKLQDVVNQNAQALNTLVKQLSSNCGAISSVLNDILSRLDKVEAEVQIDRLITCRLQSLQTYVTQQLIRAAEIRASANLAATKMSECVLGQSKRVDFCGKGYHLMSFPQSAPHGVVFLHVTYVPAQEKNFTTAPAICHDGKAHFPREGVFVSNGTHWFVTQRNFYEPQIITTDNTFVSGNCDVVIGVVNNTVYDPLQPELDSFKEELDKYFKNHTSPDVDLGDISGINASVVNIQKEIDRLNEVAKNLNESLIDLQELGKYEQYIKGGGGSDIIKLLNEQVNKEMQSSNLYMSMSSWCYTHSLDGAGLFLFDHAAEEYEHAKKLIIFLNENNVPVQLTSISAPEHKFEGLTQIFQKAYEHEQHISESINNIVDHAIKSKDHATFNFLQWYVAEQHEEEVLFKDILDKIELIGNENHGLYLADQYVKGIAKSRKS

SEQ ID NO: 5395 - protein, 1379 aa, Artificial Sequence
  SARS-CoV-2/Netherlands/ZuidHolland_9/2020__EPI_ISL_414445 spike protein (1-1211)(F970C_G999C) Ferritin construct
MFVFLVLLPLVSSQCVNLTTRTQLPPAYTNSFTRGVYYPDKVFRSSVLHSTQDLFLPFFSNVTWFHAIHVSGTNGTKRFDNPVLPFNDGVYFASTEKSNIIRGWIFGTTLDSKTQSLLIVNNATNVVIKVCEFQFCNDPFLGVYYHKNNKSWMESEFRVYSSANNCTFEYVSQPFLMDLEGKQGNFKNLREFVFKNIDGYFKIYSKHTPINLVRDLPQGFSALEPLVDLPIGINITRFQTLLALHRSYLTPGDSSSGWTAGAAAYYVGYLQPRTFLLKYNENGTITDAVDCALDPLSETKCTLKSFTVEKGIYQTSNFRVQPTESIVRFPNITNLCPFGEVFNATRFASVYAWNRKRISNCVADYSVLYNSASFSTFKCYGVSPTKLNDLCFTNVYADSFVIRGDEVRQIAPGQTGKIADYNYKLPDDFTGCVIAWNSNNLDSKVGGNYNYLYRLFRKSNLKPFERDISTEIYQAGSTPCNGVEGFNCYFPLQSYGFQPTNGVGYQPYRVVVLSFELLHAPATVCGPKKSTNLVKNKCVNFNFNGLTGTGVLTESNKKFLPFQQFGRDIADTTDAVRDPQTLEILDITPCSFGGVSVITPGTNTSNQVAVLYQGVNCTEVPVAIHADQLTPTWRVYSTGSNVFQTRAGCLIGAEHVNNSYECDIPIGAGICASYQTQTNSPRRARSVASQSIIAYTMSLGAENSVAYSNNSIAIPTNFTISVTTEILPVSMTKTSVDCTMYICGDSTECSNLLLQYGSFCTQLNRALTGIAVEQDKNTQEVFAQVKQIYKTPPIKDFGGFNFSQILPDPSKPSKRSFIEDLLFNKVTLADAGFIKQYGDCLGDIAARDLICVQKFNGLTVLPPLLTDEMIAQYTSALLAGTITSGWTFGAGAALQIPFAMQMAYRFNGIGVTQNVLYENQKLIANQFNSAIGKIQDSLSSTASALGKLQDVVNQNAQALNTLVKQLSSNCGAISSVLNDILSRLDKVEAEVQIDRLITCRLQSLQTYVTQQLIRAAEIRASANLAATKMSECVLGQSKRVDFCGKGYHLMSFPQSAPHGVVFLHVTYVPAQEKNFTTAPAICHDGKAHFPREGVFVSNGTHWFVTQRNFYEPQIITTDNTFVSGNCDVVIGIVNNTVYDPLQPELDSFKEELDKYFKNHTSPDVDLGDISGINASVVNIQKEIDRLNEVAKNLNESLIDLQELGKYEQYIKGGGGSDIIKLLNEQVNKEMQSSNLYMSMSSWCYTHSLDGAGLFLFDHAAEEYEHAKKLIIFLNENNVPVQLTSISAPEHKFEGLTQIFQKAYEHEQHISESINNIVDHAIKSKDHATFNFLQWYVAEQHEEEVLFKDILDKIELIGNENHGLYLADQYVKGIAKSRKS

SEQ ID NO: 5396 - protein, 1379 aa, Artificial Sequence
  SARS-CoV-2/Finland/FIN03032020A/2020__EPI_ISL_413602 spike protein (1-1211)(F970C_G999C) Ferritin construct
MFVFLVLLPLVSSQCVNLTTRTQLPPAYTNSFTRGVYYPDKVFRSSVLHSTQDLFLPFFSNVTWFHAIHVSGTNGTKRFDNPVLPFNDGVYFASTEKSNIIRGWIFGTTLDSKTQSLLIVNNATNVVIKVCEFQFCNDPFLGVYYHKNNKSWMESEFRVYSSANNCTFEYVSQPFLMDLEGKQGNFKNLREFVFKNIDGYFKIYSKHTPINLVRDLPQGFSALEPLVDLPIGINITRFQTLLALHRSYLTPGDSSSGWTAGAAAYYVGYLQPRTFLLKYNENGTITDAVDCALDPLSETKCTLKSFTVEKGIYQTSNFRVQPTESIVRFPNITNLCPFGEVFNATRFASVYAWNRKRISNCVADYSVLYNSASFSTFKCYGVSPTKLNDLCFTNVYADSFVIRGDEVRQIAPGQTGKIADYNYKLPDDFTGCVISWNSNNLDSKVGGNYNYLYRLFRKSNLKPFERDISTEIYQAGSTPCNGVEGFNCYFPLQSYGFQPTNGVGYQPYRVVVLSFELLHAPATVCGPKKSTNLVKNKCVNFNFNGLTGTGVLTESNKKFLPFQQFGRDIADTTDAVRDPQTLEILDITPCSFGGVSVITPGTNTSNQVAVLYQGVNCTEVPVAIHADQLTPTWRVYSTGSNVFQTRAGCLIGAEHVNNSYECDIPIGAGICASYQTQTNSPRRARSVASQSIIAYTMSLGAENSVAYSNNSIAIPTNFTISVTTEILPVSMTKTSVDCTMYICGDSTECSNLLLQYGSFCTQLNRALTGIAVEQDKNTQEVFAQVKQIYKTPPIKDFGGFNFSQILPDPSKPSKRSFIEDLLFNKVTLADAGFIKQYGDCLGDIAARDLICAQKFNGLTVLPPLLTDEMIAQYTSALLAGTITSGWTFGAGAALQIPFAMQMAYRFNGIGVTQNVLYENQKLIANQFNSAIGKIQDSLSSTASALGKLQDVVNQNAQALNTLVKQLSSNCGAISSVLNDILSRLDKVEAEVQIDRLITCRLQSLQTYVTQQLIRAAEIRASANLAATKMSECVLGQSKRVDFCGKGYHLMSFPQSAPHGVVFLHVTYVPAQEKNFTTAPAICHDGKAHFPREGVFVSNGTHWFVTQRNFYEPQIITTDNTFVSGNCDVVIGIVNNTVYDPLQPELDSFKEELDKYFKNHTSPDVDLGDISGINASVVNIQKEIDRLNEVAKNLNESLIDLQELGKYEQYIKGGGGSDIIKLLNEQVNKEMQSSNLYMSMSSWCYTHSLDGAGLFLFDHAAEEYEHAKKLIIFLNENNVPVQLTSISAPEHKFEGLTQIFQKAYEHEQHISESINNIVDHAIKSKDHATFNFLQWYVAEQHEEEVLFKDILDKIELIGNENHGLYLADQYVKGIAKSRKS

SEQ ID NO: 5397 - protein, 1379 aa, Artificial Sequence
  SARS-CoV-2/France/GE1977/2020__EPI_ISL_414632 spike protein (1-1211)(F970C_G999C) Ferritin construct
MFVFLVLLPLVSSQCVNLTTRTQLPPAYTNSFTRGVYYPDKVFRSSVLHSTQDLFLPFFSNVTWFHAIHVSGTNGTKRFDNPVLPFNDGVYFASTEKSNIIRGWIFGTTLDSKTQSLLIVNNATNVVIKVCEFQFCNDPFLGVYYHKNNKSWMESEFRVYSSANNCTFEYVSQPFLMDLEGKQGNFKNLREFVFKNIDGYFKIYSKHTPINLVRDLPQGFSALEPLVDLPIGINITRFQTLLALHRSYLTPGDSSSGWTAGAAAYYVGYLQPRTFLLKYNENGTITDAVDCALDPLSETKCTLKSFTVEKGIYQTSNFRVQPTESIVRFPNITNLCPFGEVFNATRFASVYAWNRKRISNCVADYSVLYNSASFSTFKCYGVSPTKLNDLCFTNVYADSFVIRGDEVRQIAPGQTGKIADYNYKLPDDFTGCVIAWNSNNLDSKVGGNYNYLYRLFRKSNLKPFERDISTEIYQAGSTPCNGVEGFNCYFPLQSYGFQPTNGVGYQPYRVVVLSFELLHAPATVCGPKKSTNLVKNKCVNFNFNGLTGTGVLTESNKKFLPFQQFGRDIADTTDAVRDPQTLEILDITPCSFGGVSVITPGTNTSNQVAVLYQGVNCTEVPVAIHADQLTPTWRVYSTGSNVFQTRAGCLIGAEHVNNSYECDIPIGAGICASYQTQTNSPRRARSVASQSIIAYTMSLGAENSVAYSNNSIAIPTNFTISVTTEILPVSMTKTSVDCTMYICGDSTECSNLLLQYGSFCTQLNRALTGIAVEQDKNTQEVFAQVKQIYKTPPIKDFGGFNFSQILPDPSKPSKRSFIEDLLFNKVTLADAGFIKQYGDCLGDIAARDLICAQKFNGLTVLPPLLTDEMIAQYTSALLAGTITSGWTFGAGAALQIPFAMQMAYRFNGIGVTQNVLYENQKLIANQFNSAIGKIQDSLFSTASALGKLQDVVNQNAQALNTLVKQLSSNCGAISSVLNDILSRLDKVEAEVQIDRLITCRLQSLQTYVTQQLIRAAEIRASANLAATKMSECVLGQSKRVDFCGKGYHLMSFPQSAPHGVVFLHVTYVPAQEKNFTTAPAICHDGKAHFPREGVFVSNGTHWFVTQRNFYEPQIITTDNTFVSGNCDVVIGIVNNTVYDPLQPELDSFKEELDKYFKNHTSPDVDLGDISGINASVVNIQKEIDRLNEVAKNLNESLIDLQELGKYEQYIKGGGGSDIIKLLNEQVNKEMQSSNLYMSMSSWCYTHSLDGAGLFLFDHAAEEYEHAKKLIIFLNENNVPVQLTSISAPEHKFEGLTQIFQKAYEHEQHISESINNIVDHAIKSKDHATFNFLQWYVAEQHEEEVLFKDILDKIELIGNENHGLYLADQYVKGIAKSRKS

SEQ ID NO: 5398 - protein, 1379 aa, Artificial Sequence
  SARS-CoV-2/Finland/FIN-313/2020__EPI_ISL_414641 spike protein (1-1211)(F970C_G999C) Ferritin construct
MFVFLVLLPLVSSQCVNLTTRTQLPPAYTNSFTRGVYYPDKVFRSSVLHSTQDLFLPFFSNVTWFHAIHVSGTNGTKRFDNPVLPFNDGVYFASTEKSNIIRGWIFGTTLDSKTQSLLIVNNATNVVIKVCEFQFCNDPFLGVYYHKNNKSWMESEFRVYSSANNCTFEYVSQPFLMDLEGKQGNFKNLREFVFKNIDGYFKIYSKHTPINLVRDLPQGFSALEPLVDLPIGINITRFKTLLALHRSYLTPGDSSSGWTAGAAAYYVGYLQPRTFLLKYNENGTITDAVDCALDPLSETKCTLKSFTVEKGIYQTSNFRVQPTESIVRFPNITNLCPFGEVFNATRFASVYAWNRKRISNCVADYSVLYNSASFSTFKCYGVSPTKLNDLCFTNVYADSFVIRGDEVRQIAPGQTGKIADYNYKLPDDFTGCVIAWNSNNLDSKVGGNYNYLYRLFRKSNLKPFERDISTEIYQAGSTPCNGVEGFNCYFPLQSYGFQPTNGVGYQPYRVVVLSFELLHAPATVCGPKKSTNLVKNKCVNFNFNGLTGTGVLTESNKKFLPFQQFGRDIADTTDAVRDPQTLEILDITPCSFGGVSVITPGTNTSNQVAVLYQGVNCTEVPVAIHADQLTPTWRVYSTGSNVFQTRAGCLIGAEHVNNSYECDIPIGAGICASYQTQTNSPRRARSVASQSIIAYTMSLGAENSVAYSNNSIAIPTNFTISVTTEILPVSMTKTSVDCTMYICGDSTECSNLLLQYGSFCTQLNRALTGIAVEQDKNTQEVFAQVKQIYKTPPIKDFGGFNFSQILPDPSKPSKRSFIEDLLFNKVTLADAGFIKQYGDCLGDIAARDLICAQKFNGLTVLPPLLTDEMIAQYTSALLAGTITSGWTFGAGAALQIPFAMQMAYRFNGIGVTQNVLYENQKLIANQFNSAIGKIQDSLSSTASALGKLQDVVNQNAQALNTLVKQLSSNCGAISSVLNDILSRLDKVEAEVQIDRLITCRLQSLQTYVTQQLIRAAEIRASANLAATKMSECVLGQSKRVDFCGKGYHLMSFPQSAPHGVVFLHVTYVPAQEKNFTTAPAICHDGKAHFPREGVFVSNGTHWFVTQRNFYEPQIITTDNTFVSGNCDVVIGIVNNTVYDPLQPELDSFKEELDKYFKNHTSPDVDLGDISGINASVVNIQKEIDRLNEVAKNLNESLIDLQELGKYEQYIKGGGGSDIIKLLNEQVNKEMQSSNLYMSMSSWCYTHSLDGAGLFLFDHAAEEYEHAKKLIIFLNENNVPVQLTSISAPEHKFEGLTQIFQKAYEHEQHISESINNIVDHAIKSKDHATFNFLQWYVAEQHEEEVLFKDILDKIELIGNENHGLYLADQYVKGIAKSRKS

SEQ ID NO: 5399 - protein, 1379 aa, Artificial Sequence
  SARS-CoV-2/Netherlands/ZuidHolland_2/2020__EPI_ISL_414556 spike protein (1-1211)(F970C_G999C) Ferritin construct
MFVFLVLLPLVSSQCVNLTTRTQLPPAYTNSFTRGVYYPDKVFRSSVLHSTQDLFLPFFSNVTWFHAIHVSGTNGTKRFDNPVLPFNDGVYFASTEKSNIIRGWIFGTTLDSKTQSLLIVNNATNVVIKVCEFQFCNDPFLGVYYHKNNKSWMESEFRVYSSANNCTFEYVSQPFLMDLEGKQGNFKNLREFVFKNIDGYFKIYSKHTPINLVRDLPQGFSALEPLVDLPIGINITRFQTLLALHRSYLTPGDSSSGWTAGAAAYYVGYLQPRTFLLKYNENGTITDAVDCALDPLSETKCTLKSFTVEKGIYQTSNFRVQPTESIVRFPNITNLCPFGEVFNATRFASVYAWNRKRISNCVADYSVLYNSASFSTFKCYGVSPTKLNDLCFTNVYADSFVIRGDEVRQIAPGQTGKIADYNYKLPDDFTGCVIAWNSNNLDSKVGGNYNYLYRLFRKSNLKPFERDISTEIYQAGSTPCNGVEGFNCYFPLQSYGFQPTNGVGYQPYRVVVLSFELLHAPATVCGPKKSTNLVKNKCVNFNFNGLTGTGVLTESNKKFLPFQQFGRDIADTTDAVRDPQTLEILDITPCSFGGVSVITPGTNTSNQVAVLYQGVNCTEVPVAIHADQLTPTWRVYSTGSNVFQTRAGCLIGAEHVNNSYECDIPIGAGICASYQTQTNSPRRARSVASQSIIAYTMSLGAENSVAYSNNSIAIPTNFTISVTTEILPVSMTKTSVDCTMYICGDSTECSNLLLQYGSFCTQLNRALTGIALEQDKNTQEVFAQVKQIYKTPPIKDFGGFNFSQILPDPSKPSKRSFIEDLLFNKVTLADAGFIKQYGDCLGDIAARDLICAQKFNGLTVLPPLLTDEMIAQYTSALLAGTITSGWTFGAGAALQIPFAMQMAYRFNGIGVTQNVLYENQKLIANQFNSAIGKIQDSLSSTASALGKLQDVVNQNAQALNTLVKQLSSNCGAISSVLNDILSRLDKVEAEVQIDRLITCRLQSLQTYVTQQLIRAAEIRASANLAATKMSECVLGQSKRVDFCGKGYHLMSFPQSAPHGVVFLHVTYVPAQEKNFTTAPAICHDGKAHFPREGVFVSNGTHWFVTQRNFYEPQIITTDNTFVSGNCDVVIGIVNNTVYDPLQPELDSFKEELDKYFKNHTSPDVDLGDISGINASVVNIQKEIDRLNEVAKNLNESLIDLQELGKYEQYIKGGGGSDIIKLLNEQVNKEMQSSNLYMSMSSWCYTHSLDGAGLFLFDHAAEEYEHAKKLIIFLNENNVPVQLTSISAPEHKFEGLTQIFQKAYEHEQHISESINNIVDHAIKSKDHATFNFLQWYVAEQHEEEVLFKDILDKIELIGNENHGLYLADQYVKGIAKSRKS

SEQ ID NO: 5400 - protein, 1379 aa, Artificial Sequence
  SARS-CoV-2/USA/WA-UW31/2020__EPI_ISL_414618 spike protein (1-1211)(F970C_G999C) Ferritin construct
MFVFLVLLPLVSSQCVNLTTRTQLPPAYTNSFTRGVYYPDKVFRSSVLHSTQDLFLPFFSNVTWFHAIHVSGTNGTKRFDNPVLPFNDGVYFASTEKSNIIRGWIFGTTLDSKTQSLLIVNNATNVVIKVCEFQFCNDPFLGVYYHKNNKSWMESEFRVYSSANNCTFEYVSQPFLMDLEGKQGNFKNLREFVFKNIDGYFKIYSKHTPINLVRDLPQGFSALEPLVDLPIGINITRFQTLLALHRSYLTPGDSSSGWTAGAAAYYVGYLQPRTFLLKYNENGTITDAVDCALDPLSETKCTLKSFTVEKGIYQTSNFRVQPTESIVRFPNITNLCPFGEVFNATRFASVYAWNRKRISNCVADYSVLYNSASFSTFKCYGVSPTKLNDLCFTNVYADSFVIRGDEVRQIAPGQTGKIADYNYKLPDDFTGCVIAWNSNNLDSKVGGNYNYLYRLFRKSNLKPFERDISTEIYQAGSTPCNGAEGFNCYFPLQSYGFQPTNGVGYQPYRVVVLSFELLHAPATVCGPKKSTNLVKNKCVNFNFNGLTGTGVLTESNKKFLPFQQFGRDIADTTDAVRDPQTLEILDITPCSFGGVSVITPGTNTSNQVAVLYQDVNCTEVPVAIHADQLTPTWRVYSTGSNVFQTRAGCLIGAEHVNNSYECDIPIGAGICASYQTQTNSPRRARSVASQSIIAYTMSLGAENSVAYSNNSIAIPTNFTISVTTEILPVSMTKTSVDCTMYICGDSTECSNLLLQYGSFCTQLNRALTGIAVEQDKNTQEVFAQVKQIYKTPPIKDFGGFNFSQILPDPSKPSKRSFIEDLLFNKVTLADAGFIKQYGDCLGDIAARDLICAQKFNGLTVLPPLLTDEMIAQYTSALLAGTITSGWTFGAGAALQIPFAMQMAYRFNGIGVTQNVLYENQKLIANQFNSAIGKIQDSLSSTASALGKLQDVVNQNAQALNTLVKQLSSNCGAISSVLNDILSRLDKVEAEVQIDRLITCRLQSLQTYVTQQLIRAAEIRASANLAATKMSECVLGQSKRVDFCGKGYHLMSFPQSAPHGVVFLHVTYVPAQEKNFTTAPAICHDGKAHFPREGVFVSNGTHWFVTQRNFYEPQIITTDNTFVSGNCDVVIGIVNNTVYDPLQPELDSFKEELDKYFKNHTSPDVDLGDISGINASVVNIQKEIDRLNEVAKNLNESLIDLQELGKYEQYIKGGGGSDIIKLLNEQVNKEMQSSNLYMSMSSWCYTHSLDGAGLFLFDHAAEEYEHAKKLIIFLNENNVPVQLTSISAPEHKFEGLTQIFQKAYEHEQHISESINNIVDHAIKSKDHATFNFLQWYVAEQHEEEVLFKDILDKIELIGNENHGLYLADQYVKGIAKSRKS

SEQ ID NO: 5401 - protein, 1379 aa, Artificial Sequence
  SARS-CoV-2/South Korea/SNU01/2020__EPI_ISL_411929 spike protein (1-1211)(F970C_G999C) Ferritin construct
MFVFLVLLPLVSSQCVNLTTRTQLPPAYTNSFTRGVYYPDKVFRSSVLHSTQDLFLPFFSNVTWFHAIHVSGTNGTKRFDNPVLPFNDGVYFASTEKSNIIRGWIFGTTLDSKTQSLLIVNNATNVVIKVCEFQFCNDPFLGVYYHKNNKSWMESEFRVYSSANNCTFEYVSQPFLMDLEGKQGNFKNLREFVFKNIDGYFKIYSKHTPINLVRDLPQGFWALEPLVDLPIGINITRFQTLLALHRSYLTPGDSSSGWTAGAAAYYVGYLQPRTFLLKYNENGTITDAVDCALDPLSETKCTLKSFTVEKGIYQTSNFRVQPTESIVRFPNITNLCPFGEVFNATRFASVYAWNRKRISNCVADYSVLYNSASFSTFKCYGVSPTKLNDLCFTNVYADSFVIRGDEVRQIAPGQTGKIADYNYKLPDDFTGCVIAWNSNNLDSKVGGNYNYLYRLFRKSNLKPFERDISTEIYQAGSTPCNGVEGFNCYFPLQSYGFQPTNGVGYQPYRVVVLSFELLHAPATVCGPKKSTNLVKNKCVNFNFNGLTGTGVLTESNKKFLPFQQFGRDIADTTDAVRDPQTLEILDITPCSFGGVSVITPGTNTSNQVAVLYQDVNCTEVPVAIHADQLTPTWRVYSTGSNVFQTRAGCLIGAEHVNNSYECDIPIGAGICASYQTQTNSPRRARSVASQSIIAYTMSLGAENSVAYSNNSIAIPTNFTISVTTEILPVSMTKTSVDCTMYICGDSTECSNLLLQYGSFCTQLNRALTGIAVEQDKNTQEVFAQVKQIYKTPPIKDFGGFNFSQILPDPSKPSKRSFIEDLLFNKVTLADAGFIKQYGDCLGDIAARDLICAQKFNGLTVLPPLLTDEMIAQYTSALLAGTITSGWTFGAGAALQIPFAMQMAYRFNGIGVTQNVLYENQKLIANQFNSAIGKIQDSLSSTASALGKLQDVVNQNAQALNTLVKQLSSNCGAISSVLNDILSRLDKVEAEVQIDRLITCRLQSLQTYVTQQLIRAAEIRASANLAATKMSECVLGQSKRVDFCGKGYHLMSFPQSAPHGVVFLHVTYVPAQEKNFTTAPAICHDGKAHFPREGVFVSNGTHWFVTQRNFYEPQIITTDNTFVSGNCDVVIGIVNNTVYDPLQPELDSFKEELDKYFKNHTSPDVDLGDISGINASVVNIQKEIDRLNEVAKNLNESLIDLQELGKYEQYIKGGGGSDIIKLLNEQVNKEMQSSNLYMSMSSWCYTHSLDGAGLFLFDHAAEEYEHAKKLIIFLNENNVPVQLTSISAPEHKFEGLTQIFQKAYEHEQHISESINNIVDHAIKSKDHATFNFLQWYVAEQHEEEVLFKDILDKIELIGNENHGLYLADQYVKGIAKSRKS

SEQ ID NO: 5402 - protein, 1379 aa, Artificial Sequence
  SARS-CoV-2/China/WF0004/2020__EPI_ISL_413694 spike protein (1-1211)(F970C_G999C) Ferritin construct
MFVFLVLLPLVSSQCVNLTTRTQLPPAYTNSFTRGVYYPDKVFRSSVLHSTQDLFLPFFSNVTWFHAIHVSGTNGTKRFDNPVLPFNDGVYFASTEKSNIIRGWIFGTTLDSKTQSLLIVNNATNVVIKVCEFQFCNDPFLGVYYHKNNKSWTESEFRVYSSANNCTFEYVSQPFLMDLEGKQGNFKNLREFVFKNIDGYFKIYSKHTPINLVRDLPQGFSALEPLVDLPIGINITRFQTLLALHRSYLTPGDSSSGWTAGAAAYYVGYLQPRTFLLKYNENGTITDAVDCALDPLSETKCTLKSFTVEKGIYQTSNFRVQPTESIVRFPNITNLCPFGEVFNATRFASVYAWNRKRISNCVADYSVLYNSASFSTFKCYGVSPTKLNDLCFTNVYADSFVIRGDEVRQIAPGQTGKIADYNYKLPDDFTGCVIAWNSNNLDSKVGGNYNYLYRLFRKSNLKPFERDISTEIYQAGSTPCNGVEGFNCYFPLQSYGFQPTNGVGYQPYRVVVLSFELLHAPATVCGPKKSTNLVKNKCVNFNFNGLTGTGVLTESNKKFLPFQQFGRDIADTTDAVRDPQTLEILDITPCSFGGVSVITPGTNTSNQVAVLYQDVNCTEVPVAIHADQLTPTWRVYSTGSNVFQTRAGCLIGAEHVNNSYECDIPIGAGICASYQTQTNSPRRARSVASQSIIAYTMSLGAENSVAYSNNSIAIPTNFTISVTTEILPVSMTKTSVDCTMYICGDSTECSNLLLQYGSFCTQLNRALTGIAVEQDKNTQEVFAQVKQIYKTPPIKDFGGFNFSQILPDPSKPSKRSFIEDLLFNKVTLADAGFIKQYGDCLGDIAARDLICAQKFNGLTVLPPLLTDEMIAQYTSALLAGTITSGWTFGAGAALQIPFAMQMAYRFNGIGVTQNVLYENQKLIANQFNSAIGKIQDSLSSTASALGKLQDVVNQNAQALNTLVKQLSSNCGAISSVLNDILSRLDKVEAEVQIDRLITCRLQSLQTYVTQQLIRAAEIRASANLAATKMSECVLGQSKRFDFCGKGYHLMSFPQSAPHGVVFLHVTYVPAQEKNFTTAPAICHDGKAHFPREGVFVSNGTHWFVTQRNFYEPQIITTDNTFVSGNCDVVIGIVNNTVYDPLQPELDSFKEELDKYFKNHTSPDVDLGDISGINASVVNIQKEIDRLNEVAKNLNESLIDLQELGKYEQYIKGGGGSDIIKLLNEQVNKEMQSSNLYMSMSSWCYTHSLDGAGLFLFDHAAEEYEHAKKLIIFLNENNVPVQLTSISAPEHKFEGLTQIFQKAYEHEQHISESINNIVDHAIKSKDHATFNFLQWYVAEQHEEEVLFKDILDKIELIGNENHGLYLADQYVKGIAKSRKS

SEQ ID NO: 5403 - protein, 1379 aa, Artificial Sequence
  SARS-CoV-2/China/WF0028/2020__EPI_ISL_413791 spike protein (1-1211)(F970C_G999C) Ferritin construct
MFVFLVLLPLVSSQCVNLTTRTQLPPAYTNSFTRGVYYPDKVFRSSVLHSTQDLFLPFFSNVTWFHAIHVSGTNGTKRFDNPVLPFNDGVYFASTEKSNIIRGWIFGTTLDSKTQSLLIVNNATNVVIKVCEFQFCNDPFLGVYYHKNNKSWMESEFRVYSSANNCTFEYVSQPFLMDLEGKQGNFKNLREFVFKNIDGYFKIYSKHTPINLVRDLPQGFSALEPLVDLPIGINITRFQTLLALHRSYLTPGDSSSGWTAGAAAYYVGYLQPRTFLLKYNENGTITDAVDCALDPLSETKCTLKSFTVEKGIYQTSNFRVQPTESIVRFPNITNLCPFGEVFNATRFASVYAWNRKRISNCVADYSVLYNSASFSTFKCYGVSPTKLNDLCFTNVYADSFVIRGDEVRQIAPGQTGKIADYNYKLPDDFTGCVIAWNSNNLDSKVGGNYNYLYRLFRKSNLKPFERDISTEIYQAGSTPCNGVEGFNCYFPLQSYGFQPTNGVGYQPYRVVVLSFELLHAPATVCGPKKSTNLVKNKCVNFNFNGLTGTGVLTESNKKFLPFQQFGRDIADTTDAVRDPQTLEILDITPCSFGGVSVITPGTNTSNQVAVLYQDVNCTEVPVAIHADQLTPTWRVYSTGSNVFQTRAGCLIGAEHVNNSYECDIPIGAGICASYQTQTNSPRRARSVASQSIIAYTMSLGAENSVAYSNNSIAIPTNFTISVTTEILPVSMTKTSVDCTMYICGDSTECSNLLLQYGSFCTQLNRALTGIAVEQDKNTQEVFAQVKQIYKTPPIKDFGGFNFSQILPDPSKPSKRSFIEDLLFNKVTLADAGFIKQYGDCLGDIAARDLICAQKFNGLTVLPPLLTDEMIAQYTSALLAGTITSGWTFGAGAALQIPFAMQMAYRFNGIGVTQNVLYENQKLIANQFNSAIGKIQDSLSSTASALGKLQDVVNQNAQALNTLVKQLSSNCGAISSVLNDILSRLDKVEAEVQIDRLITCRLQSLQTYVTQQLIRAAEIRASANLAATKMSECVLGQSKRVDFCGKGYHLMSFPQSAPHGVVFLHVTYVPAQEKNFTTAPAICHDGKAHFPREGVFVSNGTHWFVTQRNFYEPQIITTDNTFVSGNCDVVIGIVNNTVYDPLQPELESFKEELDKYFKNHTSPDVDLGDISGINASVVNIQKEIDRLNEVAKNLNESLIDLQELGKYEQYIKGGGGSDIIKLLNEQVNKEMQSSNLYMSMSSWCYTHSLDGAGLFLFDHAAEEYEHAKKLIIFLNENNVPVQLTSISAPEHKFEGLTQIFQKAYEHEQHISESINNIVDHAIKSKDHATFNFLQWYVAEQHEEEVLFKDILDKIELIGNENHGLYLADQYVKGIAKSRKS

SEQ ID NO: 5404 - protein, 1379 aa, Artificial Sequence
  SARS-CoV-2/2019-nCoV/USA-CruiseA-18/2020__MT159716.1 spike protein (1-1211)(F970C_G999C) Ferritin construct
MFVFLVLLPLVSSQCVNLTTRTQLPPAYTNSFTRGVYYPDKVFRSSVLHSTQDLFLPFFSNVTWFHAIHVSGTNGTKRFDNPVLPFNDGVYFASTEKSNIIRGWIFGTTLDSKTQSLLIVNNATNVVIKVCEFQFCNDPFLGVYYHKNNKSWMESELRVYSSANNCTFEYVSQPFLMDLEGKQGNFKNLREFVFKNIDGYFKIYSKHTPINLVRDLPQGFSALEPLVDLPIGINITRFQTLLALHRSYLTPGDSSSGWTAGAAAYYVGYLQPRTFLLKYNENGTITDAVDCALDPLSETKCTLKSFTVEKGIYQTSNFRVQPTESIVRFPNITNLCPFGEVFNATRFASVYAWNRKRISNCVADYSVLYNSASFSTFKCYGVSPTKLNDLCFTNVYADSFVIRGDEVRQIAPGQTGKIADYNYKLPDDFTGCVIAWNSNNLDSKVGGNYNYLYRLFRKSNLKPFERDISTEIYQAGSTPCNGVEGFNCYFPLQSYGFQPTNGVGYQPYRVVVLSFELLHAPATVCGPKKSTNLVKNKCVNFNFNGLTGTGVLTESNKKFLPFQQFGRDIADTTDAVRDPQTLEILDITPCSFGGVSVITPGTNTSNQVAVLYQDVNCTEVPVAIHADQLTPTWRVYSTGSNVFQTRAGCLIGAEHVNNSYECDIPIGAGICASYQTQTNSPRRARSVASQSIIAYTMSLGAENSVAYSNNSIAIPTNFTISVTTEILPVSMTKTSVDCTMYICGDSTECSNLLLQYGSFCTQLNRALTGIAVEQDKNTQEVFAQVKQIYKTPPIKDFGGFNFSQILPDPSKPSKRSFIEDLLFNKVTLADAGFIKQYGDCLGDIAARDLICAQKFNGLTVLPPLLTDEMIAQYTSALLAGTITSGWTFGAGAALQIPFAMQMAYRFNGIGVTQNVLYENQKLIANQFNSAIGKIQDSLSSTASALGKLQDVVNQNAQALNTLVKQLSSNCGAISSVLNDILSRLDKVEAEVQIDRLITCRLQSLQTYVTQQLIRAAEIRASANLAATKMSECVLGQSKRVDFCGKGYHLMSFPQSAPHGVVFLHVTYVPAQEKNFTTAPAICHDGKAHFPREGVFVSNGTHWFVTQRNFYEPQIITTDNTFVSGNCDVVIGIVNNTVYDPLQPELDSFKEELDKYFKNHTSPDVDLGDISGINASVVNIQKEIDRLNEVAKNLNESLIDLQELGKYEQYIKGGGGSDIIKLLNEQVNKEMQSSNLYMSMSSWCYTHSLDGAGLFLFDHAAEEYEHAKKLIIFLNENNVPVQLTSISAPEHKFEGLTQIFQKAYEHEQHISESINNIVDHAIKSKDHATFNFLQWYVAEQHEEEVLFKDILDKIELIGNENHGLYLADQYVKGIAKSRKS

SEQ ID NO: 5405 - protein, 1379 aa, Artificial Sequence
  SARS-CoV-2/SARS-CoV-2/Yunnan-01/human/2020/CHN__MT049951.1 spike protein (1-1211)(F970C_G999C) Ferritin construct
MFVFLVLLPLVSSQCVNLTTRTQLPPANTNSFTRGVYYPDKVFRSSVLHSTQDLFLPFFSNVTWFHAIHVSGTNGTKRFDNPVLPFNDGVYFASTEKSNIIRGWIFGTTLDSKTQSLLIVNNATNVVIKVCEFQFCNDPFLGVYYHKNNKSWMESEFRVYSSANNCTFEYVSQPFLMDLEGKQGNFKNLREFVFKNIDGYFKIYSKHTPINLVRDLPQGFSALEPLVDLPIGINITRFQTLLALHRSYLTPGDSSSGWTAGAAAYYVGYLQPRTFLLKYNENGTITDAVDCALDPLSETKCTLKSFTVEKGIYQTSNFRVQPTESIVRFPNITNLCPFGEVFNATRFASVYAWNRKRISNCVADYSVLYNSASFSTFKCYGVSPTKLNDLCFTNVYADSFVIRGDEVRQIAPGQTGKIADYNYKLPDDFTGCVIAWNSNNLDSKVGGNYNYLYRLFRKSNLKPFERDISTEIYQAGSTPCNGVEGFNCYFPLQSYGFQPTNGVGYQPYRVVVLSFELLHAPATVCGPKKSTNLVKNKCVNFNFNGLTGTGVLTESNKKFLPFQQFGRDIADTTDAVRDPQTLEILDITPCSFGGVSVITPGTNTSNQVAVLYQDVNCTEVPVAIHADQLTPTWRVYSTGSNVFQTRAGCLIGAEHVNNSYECDIPIGAGICASYQTQTNSPRRARSVASQSIIAYTMSLGAENSVAYSNNSIAIPTNFTISVTTEILPVSMTKTSVDCTMYICGDSTECSNLLLQYGSFCTQLNRALTGIAVEQDKNTQEVFAQVKQIYKTPPIKDFGGFNFSQILPDPSKPSKRSFIEDLLFNKVTLADAGFIKQYGDCLGDIAARDLICAQKFNGLTVLPPLLTDEMIAQYTSALLAGTITSGWTFGAGAALQIPFAMQMAYRFNGIGVTQNVLYENQKLIANQFNSAIGKIQDSLSSTASALGKLQDVVNQNAQALNTLVKQLSSNCGAISSVLNDILSRLDKVEAEVQIDRLITCRLQSLQTYVTQQLIRAAEIRASANLAATKMSECVLGQSKRVDFCGKGYHLMSFPQSAPHGVVFLHVTYVPAQEKNFTTAPAICHDGKAHFPREGVFVSNGTHWFVTQRNFYEPQIITTDNTFVSGNCDVVIGIVNNTVYDPLQPELDSFKEELDKYFKNHTSPDVDLGDISGINASVVNIQKEIDRLNEVAKNLNESLIDLQELGKYEQYIKGGGGSDIIKLLNEQVNKEMQSSNLYMSMSSWCYTHSLDGAGLFLFDHAAEEYEHAKKLIIFLNENNVPVQLTSISAPEHKFEGLTQIFQKAYEHEQHISESINNIVDHAIKSKDHATFNFLQWYVAEQHEEEVLFKDILDKIELIGNENHGLYLADQYVKGIAKSRKS

SEQ ID NO: 5406 - protein, 1379 aa, Artificial Sequence
  SARS-CoV-2/USA/WA-UW292/2020__EPI_ISL_418077 spike protein (1-1211)(F970C_G999C) Ferritin construct
MFVFLVLLPLVSSQCVNLTTRTQLPPAYTNSFTRGVYYPDKVFRSSVLHSTQDLFLPFFSNVTWFHAIHVSGTNGTKRFDNPVLPFNDGVYFASTEKSNIIRGWIFGTTLDSKTQSLLIVNNATNVVIKVCEFQFCNDPFLGVYYHKNNKSWMESEFRVYSSANNCTFEYVSQPFLMDLEGKQGNFKNLREFVFKNIDGYFKIYSKHTPINLVRDLPQGFSALEPLVDLPIGINITRFQTLLALHRSYLTPGDSSSGWTAGAAAYYVGYLQPRTFLLKYNENGTITDAVDCALDPLSETKCTLKSFTVEKGIYQTSNFRVQPTESIVRFPNITNLCPFGEVFNATRFASVYAWNRKRISNCVADYSVLYNSASFSTFKCYGVSPTKLNDLCFTNVYADSFVIRGDEVRQIAPGQTGKIADYNYKLPDDFTGCVIAWNSNNLDSKVGGNYNYLYRLFRKSNLKPFERDISTEIYQASSTPCNGVEGFNCYFPLQSYGFQPTNGVGYQPYRVVVLSFELLHAPATVCGPKKSTNLVKNKCVNFNFNGLTGTGVLTESNKKFLPFQQFGRDIADTTDAVRDPQTLEILDITPCSFGGVSVITPGTNTSNQVAVLYQDVNCTEVPVAIHADQLTPTWRVYSTGSNVFQTRAGCLIGAEHVNNSYECDIPIGAGICASYQTQTNSPRRARSVASQSIIAYTMSLGAENSVAYSNNSIAIPTNFTISVTTEILPVSMTKTSVDCTMYICGDSTECSNLLLQYGSFCTQLNRALTGIAVEQDKNTQEVFAQVKQIYKTPPIKDFGGFNFSQILPDPSKPSKRSFIEDLLFNKVTLADAGFIKQYGDCLGDIAARDLICAQKFNGLTVLPPLLTDEMIAQYTSALLAGTITSGWTFGAGAALQIPFAMQMAYRFNGIGVTQNVLYENQKLIANQFNSAIGKIQDSLSSTASALGKLQDVVNQNAQALNTLVKQLSSNCGAISSVLNDILSRLDKVEAEVQIDRLITCRLQSLQTYVTQQLIRAAEIRASANLAATKMSECVLGQSKRVDFCGKGYHLMSFPQSAPHGVVFLHVTYVPAQEKNFTTAPAICHDGKAHFPREGVFVSNGTHWFVTQRNFYEPQIITTDNTFVSGNCDVVIGIVNNTVYDPLQPELDSFKEELDKYFKNHTSPDVDLGDISGINASVVNIQKEIDRLNEVAKNLNESLIDLQELGKYEQYIKGGGGSDIIKLLNEQVNKEMQSSNLYMSMSSWCYTHSLDGAGLFLFDHAAEEYEHAKKLIIFLNENNVPVQLTSISAPEHKFEGLTQIFQKAYEHEQHISESINNIVDHAIKSKDHATFNFLQWYVAEQHEEEVLFKDILDKIELIGNENHGLYLADQYVKGIAKSRKS

SEQ ID NO: 5407 - protein, 1379 aa, Artificial Sequence
  SARS-CoV-2/Iceland/192/2020__EPI_ISL_417819 spike protein (1-1211)(F970C_G999C) Ferritin construct
MFVFFVLLPLVSSQCVNLTTRTQLPPAYTNSFTRGVYYPDKVFRSSVLHSTQDLFLPFFSNVTWFHAIHVSGTNGTKRFDNPVLPFNDGVYFASTEKSNIIRGWIFGTTLDSKTQSLLIVNNATNVVIKVCEFQFCNDPFLGVYYHKNNKSWMESEFRVYSSANNCTFEYVSQPFLMDLEGKQGNFKNLREFVFKNIDGYFKIYSKHTPINLVRDLPQGFSALEPLVDLPIGINITRFQTLLALHRSYLTPGDSSSGWTAGAAAYYVGYLQPRTFLLKYNENGTITDAVDCALDPLSETKCTLKSFTVEKGIYQTSNFRVQPTESIVRFPNITNLCPFGEVFNATRFASVYAWNRKRISNCVADYSVLYNSASFSTFKCYGVSPTKLNDLCFTNVYADSFVIRGDEVRQIAPGQTGKIADYNYKLPDDFTGCVIAWNSNNLDSKVGGNYNYLYRLFRKSNLKPFERDISTEIYQAGSTPCNGVEGFNCYFPLQSYGFQPTNGVGYQPYRVVVLSFELLHAPATVCGPKKSTNLVKNKCVNFNFNGLTGTGVLTESNKKFLPFQQFGRDIADTTDAVRDPQTLEILDITPCSFGGVSVITPGTNTSNQVAVLYQGVNCTEVPVAIHADQLTPTWRVYSTGSNVFQTRAGCLIGAEHVNNSYECDIPIGAGICASYQTQTNSPRRARSVASQSIIAYTMSLGAENSVAYSNNSIAIPTNFTISVTTEILPVSMTKTSVDCTMYICGDSTECSNLLLQYGSFCTQLNRALTGIAVEQDKNTQEVFAQVKQIYKTPPIKDFGGFNFSQILPDPSKPSKRSFIEDLLFNKVTLADAGFIKQYGDCLGDIAARDLICAQKFNGLTVLPPLLTDEMIAQYTSALLAGTITSGWTFGAGAALQIPFAMQMAYRFNGIGVTQNVLYENQKLIANQFNSAIGKIQDSLSSTASALGKLQDVVNQNAQALNTLVKQLSSNCGAISSVLNDILSRLDKVEAEVQIDRLITCRLQSLQTYVTQQLIRAAEIRASANLAATKMSECVLGQSKRVDFCGKGYHLMSFPQSAPHGVVFLHVTYVPAQEKNFTTAPAICHDGKAHFPREGVFVSNGTHWFVTQRNFYEPQIITTDNTFVSGNCDVVIGIVNNTVYDPLQPELDSFKEELDKYFKNHTSPDVDLGDISGINASVVNIQKEIDRLNEVAKNLNESLIDLQELGKYEQYIKGGGGSDIIKLLNEQVNKEMQSSNLYMSMSSWCYTHSLDGAGLFLFDHAAEEYEHAKKLIIFLNENNVPVQLTSISAPEHKFEGLTQIFQKAYEHEQHISESINNIVDHAIKSKDHATFNFLQWYVAEQHEEEVLFKDILDKIELIGNENHGLYLADQYVKGIAKSRKS

SEQ ID NO: 5408 - protein, 1379 aa, Artificial Sequence
  SARS-CoV-2/Belgium/ULG-6939/2020__EPI_ISL_417020 spike protein (1-1211)(F970C_G999C) Ferritin construct
MFVFLVLLPLVSSQCVNLTTRTQLPPAYTNSFTRGVYYPDKVFRSSVLHSTQDLFLPFFSNVTWFHAIHVSGTNGTKRFDNPVLPFNDGVYFASTEKSNIIRGWIFGTTLDSKTQSLLIVNNATNVVIKVCEFQFCNDPFLGVYYHKNNKSWMESEFRVYSSANNCTFEYVSQPFLMDLEGKQGNFKNLREFVFKNIDGYFKIYSKHTPINLVRDLPQGFSALEPLVDLPIGINITRFQTLLALHRSYLTPGDSSSGWTAGAAAYYVGYLQPRTFLLKYNENGTITDAVDCALDPLSETKCTLKSFTVEKGIYQTSNFRVQPTESIVRFPNITNLCPFGEVFNATRFASVYAWNRKRISNCVADYSVLYNSASFSTFKCYGVSPTKLNDLCFTNVYADSFVIRGDEVRQIAPGQTGKIADYNYKLPDDFTGCVIAWNSNNLDSKVGGNYNYLYRLFRKSNLKPFERDISTEIYQAGSTPCNGVEGFNCYFPLQSYGFQPTNGVGYQPYRVVVLSFELLHAPATVCGPKKSTNLVKNKCVNFNFNGLTGTGVLTESNKKFLPFQQFGRDIADTTDAVRDPQTLEILDITPCSFGGVSVITPGTNTSNQVAVLYQGVNCTEVPVAIHADQLTPTWRVYSTGSNVFQTRAGCLIGAEHVNNSYECDIPIGAGICASYQTQTNSPRRARSVASQSIIAYTMSLGAENSVVYSNNSIAIPTNFTISVTTEILPVSMTKTSVDCTMYICGDSTECSNLLLQYGSFCTQLNRALTGIAVEQDKNTQEVFAQVKQIYKTPPIKDFGGFNFSQILPDPSKPSKRSFIEDLLFNKVTLADAGFIKQYGDCLGDIAARDLICAQKFNGLTVLPPLLTDEMIAQYTSALLAGTITSGWTFGAGAALQIPFAMQMAYRFNGIGVTQNVLYENQKLIANQFNSAIGKIQDSLSSTASALGKLQDVVNQNAQALNTLVKQLSSNCGAISSVLNDILSRLDKVEAEVQIDRLITCRLQSLQTYVTQQLIRAAEIRASANLAATKMSECVLGQSKRVDFCGKGYHLMSFPQSAPHGVVFLHVTYVPAQEKNFTTAPAICHDGKAHFPREGVFVSNGTHWFVTQRNFYEPQIITTDNTFVSGNCDVVIGIVNNTVYDPLQPELDSFKEELDKYFKNHTSPDVDLGDISGINASVVNIQKEIDRLNEVAKNLNESLIDLQELGKYEQYIKGGGGSDIIKLLNEQVNKEMQSSNLYMSMSSWCYTHSLDGAGLFLFDHAAEEYEHAKKLIIFLNENNVPVQLTSISAPEHKFEGLTQIFQKAYEHEQHISESINNIVDHAIKSKDHATFNFLQWYVAEQHEEEVLFKDILDKIELIGNENHGLYLADQYVKGIAKSRKS

SEQ ID NO: 5409 - protein, 1379 aa, Artificial Sequence
  SARS-CoV-2/France/HF2496/2020__EPI_ISL_418231 spike protein (1-1211)(F970C_G999C) Ferritin construct
MFVFLVLLPLVSSQCVNLTTRTQLPPAYTNSFTRGVYYPDKVFRSSVLHSTQDLFLPFFSNVTWFHAIHVSGTNGTKRFDNPVLPFNDGVYFASTEKSNIIRGWIFGTTLDSKTQSLLIVNNATNVVIKVCEFQFCNDPFLGVYYHKNNKSWMESEFRVYSSANNCTFEYVSQPFLMDLEGKQGNFKNLREFVFKNIDGYFKIYSKHTPINLVRDLPQGFSALEPLVDLPIGINITRFQTLLALHRSYLTPGDSSSGWTAGAAAYYVGYLQPRTFLLKYNENGTITDAVDCALDPLSETKCTLKSFTVEKGIYQTSNFRVQPTESIVRFPNITNLCPFGEVFNATRFASVYAWNRKRISNCVADYSVLYNSASFSTFKCYGVSPTKLNDLCFTNVYADSFVIRGDEVRQIAPGQTGKIADYNYKLPDDFTGCVIAWNSNNLDSKVGGNYNYLYRLFRKSNLKPFERDISTEIYQAGSTPCNGVEGFNCYFPLQSYGFQPTNGVGYQPYRVVVLSFELLHAPATVCGPKKSTNLVKNKCVNFNFNGLTGTGVLTESNKKFLPFQQFGRDIADTTDAVRDPQTLEILDITPCSFGGVSVITPGTNTSNQVAVLYQGVNCTEVPVAIHADQLTPTWRVYSTGSNVFQTRAGCLIGAEHVNNSYECDIPIGAGICASYQTQTNSPRRARSVASQSIIAYTMSLGAENSVAYSNNSIAIPTNFTISVTTEILPVSMTKTSVDCTMYICGDSTECSNLLLQYGSFCTQLNRALTGIAVEQDKNTQEVFAQVKQIYKTPPIKDFGGFNFSQILPDPSKPSKRSFIEDLLFNKVTLADAGFIKQYGDCLGDIVARDLICAQKFNGLTVLPPLLTDEMIAQYTSALLAGTITSGWTFGAGAALQIPFAMQMAYRFNGIGVTQNVLYENQKLIANQFNSAIGKIQDSLSSTASALGKLQDVVNQNAQALNTLVKQLSSNCGAISSVLNDILSRLDKVEAEVQIDRLITCRLQSLQTYVTQQLIRAAEIRASANLAATKMSECVLGQSKRVDFCGKGYHLMSFPQSAPHGVVFLHVTYVPAQEKNFTTAPAICHDGKAHFPREGVFVSNGTHWFVTQRNFYEPQIITTDNTFVSGNCDVVIGIVNNTVYDPLQPELDSFKEELDKYFKNHTSPDVDLGDISGINASVVNIQKEIDRLNEVAKNLNESLIDLQELGKYEQYIKGGGGSDIIKLLNEQVNKEMQSSNLYMSMSSWCYTHSLDGAGLFLFDHAAEEYEHAKKLIIFLNENNVPVQLTSISAPEHKFEGLTQIFQKAYEHEQHISESINNIVDHAIKSKDHATFNFLQWYVAEQHEEEVLFKDILDKIELIGNENHGLYLADQYVKGIAKSRKS

SEQ ID NO: 5410 - protein, 1379 aa, Artificial Sequence
  SARS-CoV-2/USA/WA-UW291/2020__EPI_ISL_418076 spike protein (1-1211)(F970C_G999C) Ferritin construct
MFVFLVLLPLVSSQCVNLTTRTQLPPAYTNSFTRGVYYPDKVFRSSVLHSTQDLFLPFFSNVTWFHAIHVSGTNGTKRFDNPVLPFNDGVYFASTEKSNIIRGWIFGTTLDSKTQSLLIVNNATNVVIKVCEFQFCNDPFLGVYYHKNNKSWMESEFRVYSSANNCTFEYVSQPFLMDLEGKQGNFKNLREFVFKNIDGYFKIYSKHTPINLVRDLPQGFSALEPLVDLPIGINITRFQTLLALHRSYLTPGDSSSGWTAGAAAYYVGYLQPRTFLLKYNENGTITDAVDCALDPLSETKCTLKSFTVEKGIYQTSNFRVQPTESIVRFPNITNLCPFGEVFNATRFASVYAWNRKRISNCVADYSVLYNSASFSTFKCYGVSPTKLNDLCFTNVYADSFVIRGDEVRQIAPGQTGKIADYNYKLPDDFTGCVIAWNSNNLDSKVGGNYNYLYRLFRKSNLKPFERDISTEIYQAGSTPCNGVEGFNCYFPLQSYGFQPTNGVGYQPYRVVVLSFELLHAPATVCGPKKSTNLVKNKCVNFNFNGLTGTGVLTESNKKFLPFQQFGRDIADTTDAVRDPQTLEILDITPCSFGGVSVITPGTNTSNQVAVLYQGVNCTEVPVAIHADQLTPTWRVYSTGSNVFQTRAGCLIGAEHVNNSYECDIPIGAGICASYQTQTNSPRRARSVASQSIIAYTMSLGAENSVAYSNNSIAIPTNFTISVTTEILPVSMTKTSVDCTMYICGDSTECSNLLLQYGSFCTQLNRALTGIAVEQDKNTQEVFAQVKQIYKTPPIKDFGGFNFSQILPDPSKPSKRSFIEDLLFNKVTLADAGFIKQYGDCLGDIAARDLICAQKFNGLTVLPPLLTDEMIAQYTSALLAGTITSGWTFGAGAALQIPFAMQMAYRFNGIGVTQNVLYENQKLIANQFNSAIGKIQYSLSSTASALGKLQDVVNQNAQALNTLVKQLSSNCGAISSVLNDILSRLDKVEAEVQIDRLITCRLQSLQTYVTQQLIRAAEIRASANLAATKMSECVLGQSKRVDFCGKGYHLMSFPQSAPHGVVFLHVTYVPAQEKNFTTAPAICHDGKAHFPREGVFVSNGTHWFVTQRNFYEPQIITTDNTFVSGNCDVVIGIVNNTVYDPLQPELDSFKEELDKYFKNHTSPDVDLGDISGINASVVNIQKEIDRLNEVAKNLNESLIDLQELGKYEQYIKGGGGSDIIKLLNEQVNKEMQSSNLYMSMSSWCYTHSLDGAGLFLFDHAAEEYEHAKKLIIFLNENNVPVQLTSISAPEHKFEGLTQIFQKAYEHEQHISESINNIVDHAIKSKDHATFNFLQWYVAEQHEEEVLFKDILDKIELIGNENHGLYLADQYVKGIAKSRKS

SEQ ID NO: 5411 - protein, 1379 aa, Artificial Sequence; identical to SEQ ID NO: 5374
  SARS-CoV-2/Portugal/PT0034/2020__EPI_ISL_418019 spike protein (1-1211)(F970C_G999C) Ferritin construct

SEQ ID NO: 5412 - protein, 1379 aa, Artificial Sequence
  SARS-CoV-2/Iceland/202/2020__EPI_ISL_417750 spike protein (1-1211)(F970C_G999C) Ferritin construct
MFVFLVLLPLVSSQCVNLTTRTQLPPAYTNSFTRGVYYPDKVFRSSVLHSTQDLFLPFFSNVTWFHAIHVSGTNGTKRFDNPVLPFNDGVYFASTEKSNIIRGWIFGTTLDSKTQSLLIVNNATNVVIKVCEFQFCNDPFLGVYYHKNNKSWMESEFRVYSSANNCTFEYVSQPFLMDLEGKQGNFKNLREFVFKNIDGYFKIYSKHTPINLVRDLPQGFSALEPLVDLPIGINITRFQTLLALHRSYLTPGDSSSGWTAGAAAYYVGYLQPRTFLLKYNENGTITDAVDCALDPLSETKCTLKSFTVEKGIYQTSNFRVQPTESIVRFPNITNLCPFGEVFNATRFASVYAWNRKRISNCVADYSVLYNSASFSTFKCYGVSPTKLNDLCFTNVYADSFVIRGDEVRQIAPGQTGKIADYNYKLPDDFTGCVIAWNSNNLDSKVGGNYNYLYRLFRKSNLKPFERDISTEIYQAGSTPCNGVEGFNCYFPLQSYGFQPTNGVGYQPYRVVVLSFELLHAPATVCGPKKSTNLVKNKCVNFNFNGLTGTGVLTESNKKFLPFQQFGRDIADTTDAVRDPQTLEILDITPCSFGGVSVITPGTNTSNQVAVLYQDVNCTEVPVAIHADQLTPTWRVYSTGSNVFQTRAGCLIGAEHVNNSYECDIPIGAGICASYQTQTNSPRRARSVASQSIIAYTMSLGAENSVAYSNNSIAIPTNFTISVTTEILPVSMTKTSVDCTMYICGDSTECSNLLLQYGSFCTQLNRALTGIAVEQDKNTQEVFAQVKQIYKTPPIKDFGGFNFSQILPDPSKPSKRSFIEDLLFNKVTLADAGFIKQYGDCLGDIAARDLICAQKFNGLTVLPPLLTDEMIAQYTSALLAGTITSGWTFGAGAALQIPFAMQMAYRFNGIGVTQNVLYENQKLIANQFNSAIGKIQDSLSSTASALGKLQDVVNQNAQALNTLVKQLSSNCGAISSVLNDILSRLDKVEAEVQIDRLITCRLQSLQTYVTQQLIRAAEIRASANLAATKMSECVLGQSKRVDFCGKGYHLMSFPQSAPHGVVFLHVTYVPAQEKNFTTAPAICHDGKAHFPREGVFVSNGTHWFVTQRNFYEPQIITTDNTFVSGNCDVVIGIVNNTVYDPLQPELDSFKEELDKYFKNHTSPDVDLGDIPGINASVVNIQKEIDRLNEVAKNLNESLIDLQELGKYEQYIKGGGGSDIIKLLNEQVNKEMQSSNLYMSMSSWCYTHSLDGAGLFLFDHAAEEYEHAKKLIIFLNENNVPVQLTSISAPEHKFEGLTQIFQKAYEHEQHISESINNIVDHAIKSKDHATFNFLQWYVAEQHEEEVLFKDILDKIELIGNENHGLYLADQYVKGIAKSRKS

SEQ ID NO: 5413 - protein, 1379 aa, Artificial Sequence
  SARS-CoV-2/USA/WA-UW261/2020__EPI_ISL_418046 spike protein (1-1211)(F970C_G999C) Ferritin construct
MFVFLVLLPLVSSQCVNLTTRTQLPPAYTNSFTRGVYYPDKVFRSSVLHSTQDLFLPFFSNVTWFHAIHVSGTNGTKRFDNPVLPFNDGVYFASTEKSNIIRGWIFGTTLDSKTQSLLIVNNATNVVIKVCEFQFCNDPFLGVYYHKNNKSWMESEFRVYSSANNCTFEYVSQPFLMDLEGKQGNFKNLREFVFKNIDGYFKIYSKHTPINLVRDLPQGFSALEPLVDLPIGINITRFQTLLALHRSYLTPGDSSSGWTAGAAAYYVGYLQPRTFLLKYNENGTITDAVDCALDPLSETKCTLKSFTVEKGIYQTSNFRVQPTESIVRFPNITNLCPFGEVFNATRFTSVYAWNRKRISNCVADYSVLYNSASFSTFKCYGVSPTKLNDLCFTNVYADSFVIRGDEVRQIAPGQTGKIADYNYKLPDDFTGCVIAWNSNNLDSKVGGNYNYLYRLFRKSNLKPFERDISTEIYQAGSTPCNGVEGFNCYFPLQSYGFQPTNGVGYQPYRVVVLSFELLHAPATVCGPKKSTNLVKNKCVNFNFNGLTGTGVLTESNKKFLPFQQFGRDIADTTDAVRDPQTLEILDITPCSFGGVSVITPGTNTSNQVAVLYQDVNCTEVPVAIHADQLTPTWRVYSTGSNVFQTRAGCLIGAEHVNNSYECDIPIGAGICASYQTQTNSPRRARSVASQSIIAYTMSLGAENSVAYSNNSIAIPTNFTISVTTEILPVSMTKTSVDCTMYICGDSTECSNLLLQYGSFCTQLNRALTGIAVEQDKNTQEVFAQVKQIYKTPPIKDFGGFNFSQILPDPSKPSKRSFIEDLLFNKVTLADAGFIKQYGDCLGDIAARDLICAQKFNGLTVLPPLLTDEMIAQYTSALLAGTITSGWTFGAGAALQIPFAMQMAYRFNGIGVTQNVLYENQKLIANQFNSAIGKIQDSLSSTASALGKLQDVVNQNAQALNTLVKQLSSNCGAISSVLNDILSRLDKVEAEVQIDRLITCRLQSLQTYVTQQLIRAAEIRASANLAATKMSECVLGQSKRVDFCGKGYHLMSFPQSAPHGVVFLHVTYVPAQEKNFTTAPAICHDGKAHFPREGVFVSNGTHWFVTQRNFYEPQIITTDNTFVSGNCDVVIGIVNNTVYDPLQPELDSFKEELDKYFKNHTSPDVDLGDISGINASVVNIQKEIDRLNEVAKNLNESLIDLQELGKYEQYIKGGGGSDIIKLLNEQVNKEMQSSNLYMSMSSWCYTHSLDGAGLFLFDHAAEEYEHAKKLIIFLNENNVPVQLTSISAPEHKFEGLTQIFQKAYEHEQHISESINNIVDHAIKSKDHATFNFLQWYVAEQHEEEVLFKDILDKIELIGNENHGLYLADQYVKGIAKSRKS

SEQ ID NO: 5414 - protein, 1379 aa, Artificial Sequence
  SARS-CoV-2/Portugal/PT0035/2020__EPI_ISL_418020 spike protein (1-1211)(F970C_G999C) Ferritin construct
MFVFLVLLPLVSSQCVNLTTRTQLPPAYTNSFTRGVYYPDKVFRSSVLHSTQDLFLPFFSNVTWFHAIHVSGTNGTKRFDNPVLPFNDGVYFASTEKSNIIRGWIFGTTLDSKTQSLLIVNNATNVVIKVCEFQFCNDPFLGVYYHKNNKSWMESEFRVYSSANNCTFEYVSQPFLMDLEGKQGNFKNLREFVFKNIDGYFKIYSKHTPINLVRDLPQGFSALEPLVDLPIGINITRFQTLLALHRSYLTPGDSSSGWTAGAAAYYVGYLQPRTFLLKYNENGTITDAVDCALDPLSETKCTLKSFTVEKGIYQTSNFRVQPTESIVRFPNITNLCPFGEVFNATRFASVYAWNRKRISNCVADYSVLYNSASFSTFKCYGVSPTKLNDLCFTNVYADSFVIRGDEVRQIAPGQTGKIADYNYKLPDDFTGCVIAWNSNNLDSKVGGNYNYLYRLFRKSNLKPFERDISTEIYQAGSTPCNGVEGFNCYFPLQSYGFQPTNGVGYQPYRVVVLSFELLHAPATVCGPKKSTNLVKNKCVNFNFNGLTGTGVLTESNKKFLPFQQFGRDIADTTDAVRDPQTLEILDITPCSFGGVSVITPGTNTSNQVAVLYQDVNCTEVPVAIHADQLTPTWRVYSTGSNVFQTRAGCLIGAEHVNNSYECDIPIGAGICASYQTQTNSPRRARSVASQSIIAYTMSLGAENSVAYSNNSIAIPTNFTISVTTEILPVSMTKTSVDCTMYICGDSTECSNLLLQYGSFCTQLNRALTGIAVEQDKNTQEVFAQVKQIYKTPPIKDFGGFNFSQILPDPSKPSKRSFIEDLLFNKVTLADAGFIKQYGDCLGDISARDLICAQKFNGLTVLPPLLTDEMIAQYTSALLAGTITSGWTFGAGAALQIPFAMQMAYRFNGIGVTQNVLYENQKLIANQFNSAIGKIQDSLSSTASALGKLQDVVNQNAQALNTLVKQLSSNCGAISSVLNDILSRLDKVEAEVQIDRLITCRLQSLQTYVTQQLIRAAEIRASANLAATKMSECVLGQSKRVDFCGKGYHLMSFPQSAPHGVVFLHVTYVPAQEKNFTTAPAICHDGKAHFPREGVFVSNGTHWFVTQRNFYEPQIITTDNTFVSGNCDVVIGIVNNTVYDPLQPELDSFKEELDKYFKNHTSPDVDLGDISGINASVVNIQKEIDRLNEVAKNLNESLIDLQELGKYEQYIKGGGGSDIIKLLNEQVNKEMQSSNLYMSMSSWCYTHSLDGAGLFLFDHAAEEYEHAKKLIIFLNENNVPVQLTSISAPEHKFEGLTQIFQKAYEHEQHISESINNIVDHAIKSKDHATFNFLQWYVAEQHEEEVLFKDILDKIELIGNENHGLYLADQYVKGIAKSRKS

SEQ ID NO: 5415 - protein, 1379 aa, Artificial Sequence
  SARS-CoV-2/USA/NY-NYUMC7/2020__EPI_ISL_418192 spike protein (1-1211)(F970C_G999C) Ferritin construct
MFVFLVLLPLVSSQCVNLTTRTQLPPAYTNSFTRGVYYPDKVFRSSVLHSTQDLFLPFFSNVTWFHAIHVSGTNGTKRFDNPVLPFNDGVYFASTEKSNIIRGWIFGTTLDSKTQSLLIVNNATNVVIKVCEFQFCNDPFLGVYHHKNNKSWMESEFRVYSSANNCTFEYVSQPFLMDLEGKQGNFKNLREFVFKNIDGYFKIYSKHTPINLVRDLPQGFSALEPLVDLPIGINITRFQTLLALHRSYLTPGDSSSGWTAGAAAYYVGYLQPRTFLLKYNENGTITDAVDCALDPLSETKCTLKSFTVEKGIYQTSNFRVQPTESIVRFPNITNLCPFGEVFNATRFASVYAWNRKRISNCVADYSVLYNSASFSTFKCYGVSPTKLNDLCFTNVYADSFVIRGDEVRQIAPGQTGKIADYNYKLPDDFTGCVIAWNSNNLDSKVGGNYNYLYRLFRKSNLKPFERDISTEIYQAGSTPCNGVEGFNCYFPLQSYGFQPTNGVGYQPYRVVVLSFELLHAPATVCGPKKSTNLVKNKCVNFNFNGLTGTGVLTESNKKFLPFQQFGRDIADTTDAVRDPQTLEILDITPCSFGGVSVITPGTNTSNQVAVLYQGVNCTEVPVAIHADQLTPTWRVYSTGSNVFQTRAGCLIGAEHVNNSYECDIPIGAGICASYQTQTNSPRRARSVASQSIIAYTMSLGAENSVAYSNNSIAIPTNFTISVTTEILPVSMTKTSVDCTMYICGDSTECSNLLLQYGSFCTQLNRALTGIAVEQDKNTQEVFAQVKQIYKTPPIKDFGGFNFSQILPDPSKPSKRSFIEDLLFNKVTLADAGFIKQYGDCLGDIAARDLICAQKFNGLTVLPPLLTDEMIAQYTSALLAGTITSGWTFGAGAALQIPFAMQMAYRFNGIGVTQNVLYENQKLIANQFNSAIGKIQDSLSSTASALGKLQDVVNQNAQALNTLVKQLSSNCGAISSVLNDILSRLDKVEAEVQIDRLITCRLQSLQTYVTQQLIRAAEIRASANLAATKMSECVLGQSKRVDFCGKGYHLMSFPQSAPHGVVFLHVTYVPAQEKNFTTAPAICHDGKAHFPREGVFVSNGTHWFVTQRNFYEPQIITTDNTFVSGNCDVVIGIVNNTVYDPLQPELDSFKEELDKYFKNHTSPDVDLGDISGINASVVNIQKEIDRLNEVAKNLNESLIDLQELGKYEQYIKGGGGSDIIKLLNEQVNKEMQSSNLYMSMSSWCYTHSLDGAGLFLFDHAAEEYEHAKKLIIFLNENNVPVQLTSISAPEHKFEGLTQIFQKAYEHEQHISESINNIVDHAIKSKDHATFNFLQWYVAEQHEEEVLFKDILDKIELIGNENHGLYLADQYVKGIAKSRKS

SEQ ID NO: 5416 - protein, 1379 aa, Artificial Sequence
  SARS-CoV-2/Iceland/189/2020__EPI_ISL_417709 spike protein (1-1211)(F970C_G999C) Ferritin construct
MFVFLVLLPLVSSQCVNLTTRTQLPPAYTNSFTRGVYYPDKVFRSSVLHSTQDLFLPFFSNVTWFHAIHVSGTNGTKRFDNPVLPFNDGVYFASTEKSNIIRGWIFGTTLDSKTQSLLIVNNATNVVIKVCEFQFCNDPFLGVYYHKNNKSWMESEFRVYSSANNCTFEYVSQPFLMDLEGKQGNFKNLREFVFKNIDGYFKIYSKHTPINLVRDLPQGFSALEPLVDLPIGINITRFQTLLALHRSYLTPGDSSSGWTAGAAAYYVGYLQPRTFLLKYNENGTITDAVDCALDPLSETKCTLKSFTVEKGIYQTSNFRVQPTESIVRFPNITNLCPFGEVFNATRFASVYAWNRKRISNCVADYSVLYNSASFSTFKCYGVSPTKLNDLCFTNVYADSFVIRGDEVRQIAPGQTGKIADYNYKLPDDFTGCVIAWNSNNLDSKVGGNYNYLYRLFRKSNLKPFERDISTEIYQAGSTPCNGVEGFNCYFPLQSYGFQPTNGVGYQPYRVVVLSFELLHAPATVCGPKKSTNLVKNKCVNFNFNGLTGTGVLTESNKKFLPFQQFGRDIADTTDAVRDPQTLEILDITPCSFGGVSVITPGTNTSNQVAVLYQGVNCTEVPVAIHADQLTPTWRVYSTGSNVFQTRAGCLIGAEHVNNSYECDIPIGAGICASYQTQTNSPRRARSVASQSIIAYTMSLGAENSVAYSNNSIAIPTNFTISVTTEILPVSMTKTSVDCTMYICGDSTECSNLLLQYGSFCTQLNRALTGIAVEQDKNTQEVFAQVKQIYKTPPIKDFGGFNFSQILPDPSKPSKRSFIEDLLFNKVTLADAGFTKQYGDCLGDIAARDLICAQKFNGLTVLPPLLTDEMIAQYTSALLAGTITSGWTFGAGAALQIPFAMQMAYRFNGIGVTQNVLYENQKLIANQFNSAIGKIQDSLSSTASALGKLQDVVNQNAQALNTLVKQLSSNCGAISSVLNDILSRLDKVEAEVQIDRLITCRLQSLQTYVTQQLIRAAEIRASANLAATKMSECVLGQSKRVDFCGKGYHLMSFPQSAPHGVVFLHVTYVPAQEKNFTTAPAICHDGKAHFPREGVFVSNGTHWFVTQRNFYEPQIITTDNTFVSGNCDVVIGIVNNTVYDPLQPELDSFKEELDKYFKNHTSPDVDLGDISGINASVVNIQKEIDRLNEVAKNLNESLIDLQELGKYEQYIKGGGGSDIIKLLNEQVNKEMQSSNLYMSMSSWCYTHSLDGAGLFLFDHAAEEYEHAKKLIIFLNENNVPVQLTSISAPEHKFEGLTQIFQKAYEHEQHISESINNIVDHAIKSKDHATFNFLQWYVAEQHEEEVLFKDILDKIELIGNENHGLYLADQYVKGIAKSRKS

SEQ ID NO: 5417 - protein, 1379 aa, Artificial Sequence
  SARS-CoV-2/Australia/NSW56/2020__EPI_ISL_417408 spike protein (1-1211)(F970C_G999C) Ferritin construct
MFVFLVLLPLVSSQCVNLTTRTQLPPAYTNSFTRGVYYPDKVFRSSVLHSTQDLFLPFFSNVTWFHAIHVSGTNGTKRFDNPVLPFNDGVYFASTEKSNIIRGWIFGTTLDSKTQSLLIVNNATNVVIKVCEFQFCNDPFLGVYYHKNNKSWMESEFRVYSSANNCTFEYVSQPFLMDLEGKQGNFKNLREFVFKNIDGYFKIYSKHTPINLVRDLPQGFSALEPLVDLPIGINITRFQTLLALHRSYLTPGDSSSGWTAGAAAYYVGYLQPRTFLLKYNENGTITDAVDCALDPLSETKCTLKSFTVEKGIYQTSNFRVQPTESIVRFPNITNLCPFGEVFNATRFASVYAWNRKRISNCVADYSVLYNSASFSTFKCYGVSPTKLNDLCFTNVYADSFVIRGDEVRQIAPGQTGKIADYNYKLPDDFTGCVIAWNSNNLDSKVGGNYNYLYRLFRKSNLKPFERDISTEIYQAGSTPCNGVEGFNCYFPLQSYGFQPTNGVGYQPYRVVVLSFELLHAPATVCGPKKSTNLVKNKCVNFNFNGLTGTGVLTESNKKFLPFQQFGRDIADTTDAVRDPQTLEILDITPCSFGGVSVITPGTNTSNQVAVLYQDVNCTEVPVAIHADQLTPTWRVYSTGSNVFQTRAGCLIGAEHVNNSYECDIPIGAGICASYQTQTNSPRRARSVASQSIIAYTMSLGAENSVAYSNNSIAIPTNFTISVTTEILPVSMTKTSVDCTMYICGDSTECSNLLLQYGSFCTQLNRALTGIAVEQDKNTQEVFAQVKQIYKTPPIKDFGGFNFSQILPDSSKPSKRSFIEDLLFNKVTLADAGFIKQYGDCLGDIAARDLICAQKFNGLTVLPPLLTDEMIAQYTSALLAGTITSGWTFGAGAALQIPFAMQMAYRFNGIGVTQNVLYENQKLIANQFNSAIGKIQDSLSSTASALGKLQDVVNQNAQALNTLVKQLSSNCGAISSVLNDILSRLDKVEAEVQIDRLITCRLQSLQTYVTQQLIRAAEIRASANLAATKMSECVLGQSKRVDFCGKGYHLMSFPQSAPHGVVFLHVTYVPAQEKNFTTAPAICHDGKAHFPREGVFVSNGTHWFVTQRNFYEPQIITTDNTFVSGNCDVVIGIVNNTVYDPLQPELDSFKEELDKYFKNHTSPDVDLGDISGINASVVNIQKEIDRLNEVAKNLNESLIDLQELGKYEQYIKGGGGSDIIKLLNEQVNKEMQSSNLYMSMSSWCYTHSLDGAGLFLFDHAAEEYEHAKKLIIFLNENNVPVQLTSISAPEHKFEGLTQIFQKAYEHEQHISESINNIVDHAIKSKDHATFNFLQWYVAEQHEEEVLFKDILDKIELIGNENHGLYLADQYVKGIAKSRKS

SEQ ID NO: 5418 - protein, 1379 aa, Artificial Sequence
  SARS-CoV-2/Iceland/280/2020__EPI_ISL_417608 spike protein (1-1211)(F970C_G999C) Ferritin construct
MFVFLVLLPLVSSQCVNLTTRTQLPPAYTNSFTRGVYYPDKVFRSSVLHSTQDLFLPFFSNVTWFHAIHVSGTNGTKRFDNPVLPFNDGVYFASTEKSNIIRGWIFGTTLDSKTQSLLIVNNATNVVIKVCEFQFCNDPFLGVYYHKNNKSWMESEFRVYSSANNCTFEYVSQPFLMDLEGKQGNFKNLREFVFKNIDGYFKIYSKHTPINLVRDLPQGFSALEPLVDLPIGINITRFQTLLALHRSYLTPGDSSSGWTAGAAAYYVGYLQPRTFLLKYNENGTITDAVDCALDPLSETKCTLKSFTVEKGIYQTSNFRVQPTESIVRFPNITNLCPFGEVFNATRFASVYAWNRKRISNCVADYSVLYNSASFSTFKCYGVSPTKLNDLCFTNVYADSFVIRGDEVRQIAPGQTGKIADYNYKLPDDFTGCVIAWNSNNLDSKVGGNYNYLYRLFRKSNLKPFERDISTEIYQAGSTPCNGVEGFNCYFPLQSYGFQPTNGVGYQPYRVVVLSFELLHAPATVCGPKKSTNLVKNKCVNFNFNGLTGTGVLTESNKKFLPFQQFGRDIADTTDAVRDPQTLEILDITPCSFGGVSVITPGTNTSNQVAVLYQGVNCTEVPVAIHADQLTPTWRVYSTGSNVFQTRAGCLIGAEHVNNSYECDIPIGAGICASYHTQTNSPRRARSVASQSIIAYTMSLGAENSVAYSNNSIAIPTNFTISVTTEILPVSMTKTSVDCTMYICGDSTECSNLLLQYGSFCTQLNRALTGIAVEQDKNTQEVFAQVKQIYKTPPIKDFGGFNFSQILPDPSKPSKRSFIEDLLFNKVTLADAGFIKQYGDCLGDIAARDLICAQKFNGLTVLPPLLTDEMIAQYTSALLAGTITSGWTFGAGAALQIPFAMQMAYRFNGIGVTQNVLYENQKLIANQFNSAIGKIQDSLSSTASALGKLQDVVNQNAQALNTLVKQLSSNCGAISSVLNDILSRLDKVEAEVQIDRLITCRLQSLQTYVTQQLIRAAEIRASANLAATKMSECVLGQSKRVDFCGKGYHLMSFPQSAPHGVVFLHVTYVPAQEKNFTTAPAICHDGKAHFPREGVFVSNGTHWFVTQRNFYEPQIITTDNTFVSGNCDVVIGIVNNTVYDPLQPELDSFKEELDKYFKNHTSPDVDLGDISGINASVVNIQKEIDRLNEVAKNLNESLIDLQELGKYEQYIKGGGGSDIIKLLNEQVNKEMQSSNLYMSMSSWCYTHSLDGAGLFLFDHAAEEYEHAKKLIIFLNENNVPVQLTSISAPEHKFEGLTQIFQKAYEHEQHISESINNIVDHAIKSKDHATFNFLQWYVAEQHEEEVLFKDILDKIELIGNENHGLYLADQYVKGIAKSRKS

SEQ ID NO: 5419 - protein, 1379 aa, Artificial Sequence; identical to SEQ ID NO: 5374
  SARS-CoV-2/Iceland/247/2020__EPI_ISL_417575 spike protein (1-1211)(F970C_G999C) Ferritin construct

SEQ ID NO: 5420 - protein, 1379 aa, Artificial Sequence
  SARS-CoV-2/Iceland/238/2020__EPI_ISL_417566 spike protein (1-1211)(F970C_G999C) Ferritin construct
MFVFLVLLPLVSSQCVNLTTRTQLPPAYTNSFTRGVYYPDKVFRSSVLHSTQDLFLPFFSNVTWFHAIHVSGTNGTKRFDNPVLPFNDGVYFASTEKSNIIRGWIFGTTLDSKTQSLLIVNNATNVVIKVCEFQFCNDPFLGVYYHKNNKSWMESEFRVYSSANNCTFEYVSQPFLMDLEGKQGNFKNLREFVFKNIDGYFKIYSKHTPINLVRDLPQGFSALEPLVDLPIGINITRFQTLLALHRSYLTPGDSSSGWTAGAAAYYVGYLQPRTFLLKYNENGTITDAVDCALDPLSETKCTLKSFTVEKGIYQTSNFRVQPTESIVRFPNITNLCPFGEVFNATRFASVYAWNRKRISNCVADYSVLYNSASFSTFKCYGVSPTKLNDLCFTNVYADSFVIRGDEVRQIAPGQTGKIADYNYKLPDDFTGCVIAWNSNNLDSKVGGNYNYLYRLFRKSNLKPFERDISTEIYQAGSTPCNGVEGFNCYFPLQSYGFQPTNGVGYQPYRVVVLSFELLHAPATVCGPKKSTNLVKNKCVNFNFNGLTGTGVLTESNKKFLPFQQFGRDIADTTDAVRDPQTLEILDITPCSFGGVSVITPGTNTSNQVAVLYQGVNCTEVPVAIHADQLTPTWRVYSTGSNVFQTRAGCLIGAEHVNNSYECDIPIGAGICASYQTQTNSPRRARSVASQSIIAYTMSLGAENSVAYSNNSIAIPTNFTISVTTEILPVSMTKTSVDCTMYICGDSTECSNLLLQYGSFCTQLNRALTGIAVEQDKNTQEVFAQVKQIYKTPPIKDFGGFNFSQILPDPSKPSKRSFIEDLLFNKVTLADVGFIKQYGDCLGDIAARDLICAQKFNGLTVLPPLLTDEMIAQYTSALLAGTITSGWTFGAGAALQIPFAMQMAYRFNGIGVTQNVLYENQKLIANQFNSAIGKIQDSLSSTASALGKLQDVVNQNAQALNTLVKQLSSNCGAISSVLNDILSRLDKVEAEVQIDRLITCRLQSLQTYVTQQLIRAAEIRASANLAATKMSECVLGQSKRVDFCGKGYHLMSFPQSAPHGVVFLHVTYVPAQEKNFTTAPAICHDGKAHFPREGVFVSNGTHWFVTQRNFYEPQIITTDNTFVSGNCDVVIGIVNNTVYDPLQPELDSFKEELDKYFKNHTSPDVDLGDISGINASVVNIQKEIDRLNEVAKNLNESLIDLQELGKYEQYIKGGGGSDIIKLLNEQVNKEMQSSNLYMSMSSWCYTHSLDGAGLFLFDHAAEEYEHAKKLIIFLNENNVPVQLTSISAPEHKFEGLTQIFQKAYEHEQHISESINNIVDHAIKSKDHATFNFLQWYVAEQHEEEVLFKDILDKIELIGNENHGLYLADQYVKGIAKSRKS

SEQ ID NO: 5421 - protein, 1379 aa, Artificial Sequence
  SARS-CoV-2/Greece/16/2020__EPI_ISL_418265 spike protein (1-1211)(F970C_G999C) Ferritin construct
MFVFLVLLPLVSSQCVNLTTRTQLPPAYTNSFTRGVYYPDKVFRSSVLHSTQDLFLPFFSNVTWFHAIHVSGTNGTKRFDNPVLPFNDGVYFASTEKSNIIRGWIFGTTLDSKTQSLLIVNNATNVVIKVCEFQFCNDPFLGVYYHKNNKSWMESEFRVYSSANNCTFEYVSQPFLMDLEGKQGNFKNLREFVFKNVDGYFKIYSKHTPINLVRDLPQGFSALEPLVDLPIGINITRFQTLLALHRSYLTPGDSSSGWTAGAAAYYVGYLQPRTFLLKYNENGTITDAVDCALDPLSETKCTLKSFTVEKGIYQTSNFRVQPTESIVRFPNITNLCPFGEVFNATRFASVYAWNRKRISNCVADYSVLYNSASFSTFKCYGVSPTKLNDLCFTNVYADSFVIRGDEVRQIAPGQTGKIADYNYKLPDDFTGCVIAWNSNNLDSKVGGNYNYLYRLFRKSNLKPFERDISTEIYQAGSTPCNGVEGFNCYFPLQSYGFQPTNGVGYQPYRVVVLSFELLHAPATVCGPKKSTNLVKNKCVNFNFNGLTGTGVLTESNKKFLPFQQFGRDIADTTDAVRDPQTLEILDITPCSFGGVSVITPGTNTSNQVAVLYQDVNCTEVPVAIHADQLTPTWRVYSTGSNVFQTRAGCLIGAEHVNNSYECDIPIGAGICASYQTQTNSPRRARSVASQSIIAYTMSLGAENSVAYSNNSIAIPTNFTISVTTEILPVSMTKTSVDCTMYICGDSTECSNLLLQYGSFCTQLNRALTGIAVEQDKNTQEVFAQVKQIYKTPPIKDFGGFNFSQILPDPSKPSKRSFIEDLLFNKVTLADAGFIKQYGDCLGDIAARDLICAQKFNGLTVLPPLLTDEMIAQYTSALLAGTITSGWTFGAGAALQIPFAMQMAYRFNGIGVTQNVLYENQKLIANQFNSAIGKIQDSLSSTASALGKLQDVVNQNAQALNTLVKQLSSNCGAISSVLNDILSRLDKVEAEVQIDRLITCRLQSLQTYVTQQLIRAAEIRASANLAATKMSECVLGQSKRVDFCGKGYHLMSFPQSAPHGVVFLHVTYVPAQEKNFTTAPAICHDGKAHFPREGVFVSNGTHWFVTQRNFYEPQIITTDNTFVSGNCDVVIGIVNNTVYDPLQPELDSFKEELDKYFKNHTSPDVDLGDISGINASVVNIQKEIDRLNEVAKNLNESLIDLQELGKYEQYIKGGGGSDIIKLLNEQVNKEMQSSNLYMSMSSWCYTHSLDGAGLFLFDHAAEEYEHAKKLIIFLNENNVPVQLTSISAPEHKFEGLTQIFQKAYEHEQHISESINNIVDHAIKSKDHATFNFLQWYVAEQHEEEVLFKDILDKIELIGNENHGLYLADQYVKGIAKSRKS

SEQ ID NO: 5422 - protein, 1379 aa, Artificial Sequence
  SARS-CoV-2/Iceland/319/2020__EPI_ISL_417648 spike protein (1-1211)(F970C_G999C) Ferritin construct
MFVFLVLLPLVSSQCVNLTTRTQLPPAYTNSFTRGVYYPDKVFRSSVLHSTQDLFLPFFSNVTWFHAIHVSGTNGTKRFDNPVLPFNDGVYFASTEKSNIIRGWIFGTTLDSKTQSLLIVNNATNVVIKVCEFQFCNDPFLGVYYHKNNKSWMESEFRVYSSANNCTFEYVSQPFLIDLEGKQGNFKNLREFVFKNIDGYFKIYSKHTPINLVRDLPQGFSALEPLVDLPIGINITRFQTLLALHRSYLTPGDSSSGWTAGAAAYYVGYLQPRTFLLKYNENGTITDAVDCALDPLSETKCTLKSFTVEKGIYQTSNFRVQPTESIVRFPNITNLCPFGEVFNATRFASVYAWNRKRISNCVADYSVLYNSASFSTFKCYGVSPTKLNDLCFTNVYADSFVIRGDEVRQIAPGQTGKIADYNYKLPDDFTGCVIAWNSNNLDSKVGGNYNYLYRLFRKSNLKPFERDISTEIYQAGSTPCNGVEGFNCYFPLQSYGFQPTNGVGYQPYRVVVLSFELLHAPATVCGPKKSTNLVKNKCVNFNFNGLTGTGVLTESNKKFLPFQQFGRDIADTTDAVRDPQTLEILDITPCSFGGVSVITPGTNTSNQVAVLYQGVNCTEVPVAIHADQLTPTWRVYSTGSNVFQTRAGCLIGAEHVNNSYECDIPIGAGICASYQTQTNSPRRARSVASQSIIAYTMSLGAENSVAYSNNSIAIPTNFTISVTTEILPVSMTKTSVDCTMYICGDSTECSNLLLQYGSFCTQLNRALTGIAVEQDKNTQEVFAQVKQIYKTPPIKDFGGFNFSQILPDPSKPSKRSFIEDLLFNKVTLADAGFIKQYGDCLGDIAARDLICAQKFNGLTVLPPLLTDEMIAQYTSALLAGTITSGWTFGAGAALQIPFAMQMAYRFNGIGVTQNVLYENQKLIANQFNSAIGKIQDSLSSTASALGKLQDVVNQNAQALNTLVKQLSSNCGAISSVLNDILSRLDKVEAEVQIDRLITCRLQSLQTYVTQQLIRAAEIRASANLAATKMSECVLGQSKRVDFCGKGYHLMSFPQSAPHGVVFLHVTYVPAQEKNFTTAPAICHDGKAHFPREGVFVSNGTHWFVTQRNFYEPQIITTDNTFVSGNCDVVIGIVNNTVYDPLQPELDSFKEELDKYFKNHTSPDVDLGDISGINASVVNIQKEIDRLNEVAKNLNESLIDLQELGKYEQYIKGGGGSDIIKLLNEQVNKEMQSSNLYMSMSSWCYTHSLDGAGLFLFDHAAEEYEHAKKLIIFLNENNVPVQLTSISAPEHKFEGLTQIFQKAYEHEQHISESINNIVDHAIKSKDHATFNFLQWYVAEQHEEEVLFKDILDKIELIGNENHGLYLADQYVKGIAKSRKS

SEQ ID NO: 5423 - protein, 1379 aa, Artificial Sequence
  SARS-CoV-2/Congo/94/2020__EPI_ISL_417947 spike protein (1-1211)(F970C_G999C) Ferritin construct
MFVFLVLLPLVSSQCVNLTTRTQLPPAYTNSFTRGVYYPDKVFRSSVLHSTQDLFLPFFSNVTWFHAIHVSGTNGTKRFDNPVLPFNDGVYFASTEKSNIIRGWIFGTTLDSKTQSLLIVNNATNVVIKVCEFQFCNDPFLGVYYHKNNKSWMESEFRVYSSANNCTFEYVSQPFLMDLEGKQGNFKNLREFVFKNIDGYFKIYSKHTPINLVRDLPQGFSALEPLVDLPIGINITRFQTLLALHRSYLTPGDSSSGWTAGAAAYYVGYLQPRTFLLKYNENGTITDAVDCALDPLSETKCTLKSFTVEKGIYQTSNFRVQPTESIVRFPNITNLCPFGEVFNATRFASVYAWNRKRISNCVADYSVLYNSASFSTFKCYGVSPTKLNDLCFTNVYADSFVIRGDEVRQIAPGQTGKIADYNYKLPDDFTGCVIAWNSNNLDSKVGGNYNYLYRLFRKSNLKPFERDISTEIYQAGSTPCNGVEGFNCYFPLQSYGFQPTNGVGYQPYRVVVLSFELLHAPATVCGPKKSTNLVKNKCVNFNFNGLTGTGVLTESNKKFLPFQQFGRDIADTTDAVRDPQTLEILDITPCSFGGVSVITPGTNTSNQVAVLYQGVNCTEVPVAIHADQLTPTWRVYSTGSNVFQTRAGCLIGAEHVNNSYECDIPIGAGICASYQTQTNSPRRARSVASQSIIAYTMSLGAENSVAYSNNSIAIPTNFTISVTTEILPVSMTKTSVDCTMYICGDSTECSNLLLQYGSFCTQLNRALTGIAVEQDKNTQEVFAQVKQIYKTPPIKDFGGFNFSQILPDPSKPSKRSFIEDILFNKVTLADAGFIKQYGDCLGDIAARDLICAQKFNGLTVLPPLLTDEMIAQYTSALLAGTITSGWTFGAGAALQIPFAMQMAYRFNGIGVTQNVLYENQKLIANQFNSAIGKIQDSLSSTASALGKLQDVVNQNAQALNTLVKQLSSNCGAISSVLNDILSRLDKVEAEVQIDRLITCRLQSLQTYVTQQLIRAAEIRASANLAATKMSECVLGQSKRVDFCGKGYHLMSFPQSAPHGVVFLHVTYVPAQEKNFTTAPAICHDGKAHFPREGVFVSNGTHWFVTQRNFYEPQIITTDNTFVSGNCDVVIGIVNNTVYDPLQPELDSFKEELDKYFKNHTSPDVDLGDISGINASVVNIQKEIDRLNEVAKNLNESLIDLQELGKYEQYIKGGGGSDIIKLLNEQVNKEMQSSNLYMSMSSWCYTHSLDGAGLFLFDHAAEEYEHAKKLIIFLNENNVPVQLTSISAPEHKFEGLTQIFQKAYEHEQHISESINNIVDHAIKSKDHATFNFLQWYVAEQHEEEVLFKDILDKIELIGNENHGLYLADQYVKGIAKSRKS

SEQ ID NO: 5424 - protein, 1379 aa, Artificial Sequence
  SARS-CoV-2/Congo/158/2020__EPI_ISL_417950 spike protein (1-1211)(F970C_G999C) Ferritin construct
MFVFLVLLPLVSSQCVNLTTRTQLPPAYTNSFTRGVYYPDKVFRSSVLHSTQDLFLPFFSNVTWFHAIHVSGTNGTKRFDNPVLPFNDGVYFASTEKSNIIRGWIFGTTLDSKTQSLLIVNNATNVVIKVCEFQFCNDPFLGVYYHKNNKSWMESEFRVYSSANNCTFEYVSQPFLMDLEGKQGNFKNLREFVFKNIDGYFKIYSKHTPINLVRDLPQGFSALEPLVDLPIGINITRFQTLLALHRSYLTPGDSSSGWTAGAAAYYVGYLQPRTFLLKYNENGTITDAVDCALDPLSETKCTLKSFTVEKGIYQTSNFRVQPTESIVRFPNITNLCPFGEVFNATRFASVYAWNRKRISNCVADYSVLYNSASFSTFKCYGVSPTKLNDLCFTNVYADSFVIRGDEVRQIAPGQTGKIADYNYKLPDDFTGCVIAWNSNNLDSKVGGNYNYLYRLFRKSNLKPFERDISTEIYQAGSTPCNGVEGFNCYFPLQSYGFQPTNGVGYQPYRVVVLSFELLHAPATVCGPKKSTNLVKNKCVNFNFNGLTGTGVLTESNKKFLPFQQFGRDIADTTDAVRDPQTLEILDITPCSFGGVSVITPGTNTSNQVAVLYQDVNCTEVPVAIHADQLTPTWRVYSTGSNVFQTRAGCLIGAEHVNNSYECDIPIGAGICASYQTQTNSPRRARSVASQSIIAYTMSLGAENSVAYSNNSIAIPTNFTISVTTEILPVSMTKTSVDCTMYICGDSTECSNLLLQYGSFCTQLNRALTGIAVEQDKNTQEVFAQVKQIYKTPPIKDFGGFNFSQILPDPSKPSKRSFIEDLLFNKVTLADAGFIKQYGDCLGDIAARDLICAQKFNGLTVLPPLLTDEMIAQYTSALLAGTITSGWTFGAGAALQIPFAMQMAYRFNGIGVTQNVLYENQKLIANQFNSAIGKIQDSLSSTASALGKLQDVVNQNAQALNTLVKQLSSNCGAISSVLNDILSRLDKVEAEVQIDRLITCRLQSLQTYVTQQLIRAAEIRASANLAATKMSECVLGQSKRVDFCGKGYHLMSFPQSAPHGVVFLHVTYVPAQEKNFTTAPAICHDGKAHFPREGVFVSNGTHWFVTQRNFYEPQIITTDNTFLSGNCDVVIGIVNNTVYDPLQPELDSFKEELDKYFKNHTSPDVDLGDISGINASVVNIQKEIDRLNEVAKNLNESLIDLQELGKYEQYIKGGGGSDIIKLLNEQVNKEMQSSNLYMSMSSWCYTHSLDGAGLFLFDHAAEEYEHAKKLIIFLNENNVPVQLTSISAPEHKFEGLTQIFQKAYEHEQHISESINNIVDHAIKSKDHATFNFLQWYVAEQHEEEVLFKDILDKIELIGNENHGLYLADQYVKGIAKSRKS

SEQ ID NO: 5425 - protein, 1379 aa, Artificial Sequence
  SARS-CoV-2/USA/UT-00034/2020__EPI_ISL_417977 spike protein (1-1211)(F970C_G999C) Ferritin construct
MFVFLVLLPLVSSQCVNLTTRTQLPPAYTNSFTRGVYYPDKVFRSSVLHSTQDLFLPFFSNVTWFHAIHVSGTNGTKRFDNPVLPFNDGVYFASTEKSNIIRGWIFGTTLDSKTQSLLIVNNATNVVIKVCEFQFCNDPFLGVYYYKNNKSWMESEFRVYSSANNCTFEYVSQPFLMDLEGKQGNFKNLREFVFKNIDGYFKIYSKHTPINLVRDLPQGFSALEPLVDLPIGINITRFQTLLALHRSYLTPGDSSSGWTAGAAAYYVGYLQPRTFLLKYNENGTITDAVDCALDPLSETKCTLKSFTVEKGIYQTSNFRVQPTESIVRFPNITNLCPFGEVFNATRFASVYAWNRKRISNCVADYSVLYNSASFSTFKCYGVSPTKLNDLCFTNVYADSFVIRGDEVRQIAPGQTGKIADYNYKLPDDFTGCVIAWNSNNLDSKVGGNYNYLYRLFRKSNLKPFERDISTEIYQAGSTPCNGVEGFNCYFPLQSYGFQPTNGVGYQPYRVVVLSFELLHAPATVCGPKKSTNLVKNKCVNFNFNGLTGTGVLTESNKKFLPFQQFGRDIADTTDAVRDPQTLEILDITPCSFGGVSVITPGTNTSNQVAVLYQGVNCTEVPVAIHADQLTPTWRVYSTGSNVFQTRAGCLIGAEHVNNSYECDIPIGAGICASYQTQTNSPRRARSVASQSIIAYTMSLGAENSVAYSNNSIAIPTNFTISVTTEILPVSMTKTSVDCTMYICGDSTECSNLLLQYGSFCTQLNRALTGIAVEQDKNTQEVFAQVKQIYKTPPIKDFGGFNFSQILPDPSKPSKRSFIEDLLFNKVTLADAGFIKQYGDCLGDIAARDLICAQKFNGLTVLPPLLTDEMIAQYTSALLAGTITSGWTFGAGAALQIPFAMQMAYRFNGIGVTQNVLYENQKLIANQFNSAIGKIQDSLSSTASALGKLQDVVNQNAQALNTLVKQLSSNCGAISSVLNDILSRLDKVEAEVQIDRLITCRLQSLQTYVTQQLIRAAEIRASANLAATKMSECVLGQSKRVDFCGKGYHLMSFPQSAPHGVVFLHVTYVPAQEKNFTTAPAICHDGKAHFPREGVFVSNGTHWFVTQRNFYEPQIITTDNTFVSGNCDVVIGIVNNTVYDPLQPELDSFKEELDKYFKNHTSPDVDLGDISGINASVVNIQKEIDRLNEVAKNLNESLIDLQELGKYEQYIKGGGGSDIIKLLNEQVNKEMQSSNLYMSMSSWCYTHSLDGAGLFLFDHAAEEYEHAKKLIIFLNENNVPVQLTSISAPEHKFEGLTQIFQKAYEHEQHISESINNIVDHAIKSKDHATFNFLQWYVAEQHEEEVLFKDILDKIELIGNENHGLYLADQYVKGIAKSRKS

SEQ ID NO: 5426 - protein, 1379 aa, Artificial Sequence
  SARS-CoV-2/USA/UT-00033/2020__EPI_ISL_417976 spike protein (1-1211)(F970C_G999C) Ferritin construct
MFVFLVLLPLVSSQCVNLTTRTQLPPAYTNSFTRGVYYPDKVFRSSVLHSTQDLFLPFFSNVTWFHAIHVSGTNGTKRFDNPVLPFNDGVYFASTEKSNIIRGWIFGTTLDSKTQSLLIVNNATNVVIKVCEFQFCNDPFLGVYYHKNNKSWMESEFRVYSSANNCTFEYVSQPFLMDLEGKQGNFKNLREFVFKNIDGYFKIYSKHTPINLVRDLPQGFSALEPLVDLPIGINITRFQTLLALHRSYLTPGDSSSGLTAGAAAYYVGYLQPRTFLLKYNENGTITDAVDCALDPLSETKCTLKSFTVEKGIYQTSNFRVQPTESIVRFPNITNLCPFGEVFNATRFASVYAWNRKRISNCVADYSVLYNSASFSTFKCYGVSPTKLNDLCFTNVYADSFVIRGDEVRQIAPGQTGKIADYNYKLPDDFTGCVIAWNSNNLDSKVGGNYNYLYRLFRKSNLKPFERDISTEIYQAGSTPCNGVEGFNCYFPLQSYGFQPTNGVGYQPYRVVVLSFELLHAPATVCGPKKSTNLVKNKCVNFNFNGLTGTGVLTESNKKFLPFQQFGRDIADTTDAVRDPQTLEILDITPCSFGGVSVITPGTNTSNQVAVLYQGVNCTEVPVAIHADQLTPTWRVYSTGSNVFQTRAGCLIGAEHVNNSYECDIPIGAGICASYQTQTNSPRRARSVASQSIIAYTMSLGAENSVAYSNNSIAIPTNFTISVTTEILPVSMTKTSVDCTMYICGDSTECSNLLLQYGSFCTQLNRALTGIAVEQDKNTQEVFAQVKQIYKTPPIKDFGGFNFSQILPDPSKPSKRSFIEDLLFNKVTLADAGFIKQYGDCLGDIAARDLICAQKFNGLTVLPPLLTDEMIAQYTSALLAGTITSGWTFGAGAALQIPFAMQMAYRFNGIGVTQNVLYENQKLIANQFNSAIGKIQDSLSSTASALGKLQDVVNQNAQALNTLVKQLSSNCGAISSVLNDILSRLDKVEAEVQIDRLITCRLQSLQTYVTQQLIRAAEIRASANLAATKMSECVLGQSKRVDFCGKGYHLMSFPQSAPHGVVFLHVTYVPAQEKNFTTAPAICHDGKAHFPREGVFVSNGTHWFVTQRNFYEPQIITTDNTFVSGNCDVVIGIVNNTVYDPLQPELDSFKEELDKYFKNHTSPDVDLGDISGINASVVNIQKEIDRLNEVAKNLNESLIDLQELGKYEQYIKGGGGSDIIKLLNEQVNKEMQSSNLYMSMSSWCYTHSLDGAGLFLFDHAAEEYEHAKKLIIFLNENNVPVQLTSISAPEHKFEGLTQIFQKAYEHEQHISESINNIVDHAIKSKDHATFNFLQWYVAEQHEEEVLFKDILDKIELIGNENHGLYLADQYVKGIAKSRKS

SEQ ID NO: 5427 - protein, 1379 aa, Artificial Sequence
  SARS-CoV-2/USA/WI-13/2020__EPI_ISL_417516 spike protein (1-1211)(F970C_G999C) Ferritin construct
MFVFLVLLPLVSSQCVNLTTRTQLPPAYTNSFTRGVYYPDKVFRSSVLHSTQDLFLPFFSNVTWFHAIHVSGTNGTKRFDNPVLPFNDGVYFASTEKSNIIRGWIFGTTLDSKTQSLLIVNNATNVVIKVCEFQFCNDPFLGVYYHKNNKSWMESEFRVYSSANNCTFEYVSQPFLMDLEGKQGNFKNLREFVFKNIDGYFKIYSKHTPINLVRDLPQGFSALEPLVDLPIGINITRFQTLLALHRSYLTPGDSSSGWTAGAAAYYVGYLQPRTFLLKYNENGTITDAVDCALDPLSETKCTLKSFTVEKGIYQTSNFRVLPTESIVRFPNITNLCPFGEVFNATRFASVYAWNRKRISNCVADYSVLYNSASFSTFKCYGVSPTKLNDLCFTNVYADSFVIRGDEVRQIAPGQTGKIADYNYKLPDDFTGCVIAWNSNNLDSKVGGNYNYLYRLFRKSNLKPFERDISTEIYQAGSTPCNGVEGFNCYFPLQSYGFQPTNGVGYQPYRVVVLSFELLHAPATVCGPKKSTNLVKNKCVNFNFNGLTGTGVLTESNKKFLPFQQFGRDIADTTDAVRDPQTLEILDITPCSFGGVSVITPGTNTSNQVAVLYQGVNCTEVPVAIHADQLTPTWRVYSTGSNVFQTRAGCLIGAEHVNNSYECDIPIGAGICASYQTQTNSPRRARSVASQSIIAYTMSLGAENSVAYSNNSIAIPTNFTISVTTEILPVSMTKTSVDCTMYICGDSTECSNLLLQYGSFCTQLNRALTGIAVEQDKNTQEVFAQVKQIYKTPPIKDFGGFNFSQILPDPSKPSKRSFIEDLLFNKVTLADAGFIKQYGDCLGDIAARDLICAQKFNGLTVLPPLLTDEMIAQYTSALLAGTITSGWTFGAGAALQIPFAMQMAYRFNGIGVTQNVLYENQKLIANQFNSAIGKIQDSLSSTASALGKLQDVVNQNAQALNTLVKQLSSNCGAISSVLNDILSRLDKVEAEVQIDRLITCRLQSLQTYVTQQLIRAAEIRASANLAATKMSECVLGQSKRVDFCGKGYHLMSFPQSAPHGVVFLHVTYVPAQEKNFTTAPAICHDGKAHFPREGVFVSNGTHWFVTQRNFYEPQIITTDNTFVSGNCDVVIGIVNNTVYDPLQPELDSFKEELDKYFKNHTSPDVDLGDISGINASVVNIQKEIDRLNEVAKNLNESLIDLQELGKYEQYIKGGGGSDIIKLLNEQVNKEMQSSNLYMSMSSWCYTHSLDGAGLFLFDHAAEEYEHAKKLIIFLNENNVPVQLTSISAPEHKFEGLTQIFQKAYEHEQHISESINNIVDHAIKSKDHATFNFLQWYVAEQHEEEVLFKDILDKIELIGNENHGLYLADQYVKGIAKSRKS

SEQ ID NO: 5428 - protein, 1378 aa, Artificial Sequence
  SARS-CoV-2/India/1-27/2020__EPI_ISL_413522 spike protein (1-1210)(F969C_G998C) Ferritin construct
MFVFLVLLPLVSSQCVNLTTRTQLPPAYTNSFTRGVYYPDKVFRSSVLHSTQDLFLPFFSNVTWFHAIHVSGTNGTKRFDNPVLPFNDGVYFASTEKSNIIRGWIFGTTLDSKTQSLLIVNNATNVVIKVCEFQFCNDPFLGVYHKNNKSWMESEFRVYSSANNCTFEYVSQPFLMDLEGKQGNFKNLREFVFKNIDGYFKIYSKHTPINLVRDLPQGFSALEPLVDLPIGINITRFQTLLALHRSYLTPGDSSSGWTAGAAAYYVGYLQPRTFLLKYNENGTITDAVDCALDPLSETKCTLKSFTVEKGIYQTSNFRVQPTESIVRFPNITNLCPFGEVFNATRFASVYAWNRKRISNCVADYSVLYNSASFSTFKCYGVSPTKLNDLCFTNVYADSFVIRGDEVIQIAPGQTGKIADYNYKLPDDFTGCVIAWNSNNLDSKVGGNYNYLYRLFRKSNLKPFERDISTEIYQAGSTPCNGVEGFNCYFPLQSYGFQPTNGVGYQPYRVVVLSFELLHAPATVCGPKKSTNLVKNKCVNFNFNGLTGTGVLTESNKKFLPFQQFGRDIADTTDAVRDPQTLEILDITPCSFGGVSVITPGTNTSNQVAVLYQDVNCTEVPVAIHADQLTPTWRVYSTGSNVFQTRAGCLIGAEHVNNSYECDIPIGAGICASYQTQTNSPRRARSVASQSIIAYTMSLGAENSVAYSNNSIAIPTNFTISVTTEILPVSMTKTSVDCTMYICGDSTECSNLLLQYGSFCTQLNRALTGIAVEQDKNTQEVFAQVKQIYKTPPIKDFGGFNFSQILPDPSKPSKRSFIEDLLFNKVTLADAGFIKQYGDCLGDIAARDLICAQKFNGLTVLPPLLTDEMIAQYTSALLAGTITSGWTFGAGAALQIPFAMQMAYRFNGIGVTQNVLYENQKLIANQFNSAIGKIQDSLSSTASALGKLQDVVNQNAQALNTLVKQLSSNCGAISSVLNDILSRLDKVEAEVQIDRLITCRLQSLQTYVTQQLIRAAEIRASANLAATKMSECVLGQSKRVDFCGKGYHLMSFPQSAPHGVVFLHVTYVPAQEKNFTTAPAICHDGKAHFPREGVFVSNGTHWFVTQRNFYEPQIITTDNTFVSGNCDVVIGIVNNTVYDPLQPELDSFKEELDKYFKNHTSPDVDLGDISGINASVVNIQKEIDRLNEVAKNLNESLIDLQELGKYEQYIKGGGGSDIIKLLNEQVNKEMQSSNLYMSMSSWCYTHSLDGAGLFLFDHAAEEYEHAKKLIIFLNENNVPVQLTSISAPEHKFEGLTQIFQKAYEHEQHISESINNIVDHAIKSKDHATFNFLQWYVAEQHEEEVLFKDILDKIELIGNENHGLYLADQYVKGIAKSRKS

SEQ ID NO: 5429 - protein, 1373 aa, Artificial Sequence
  SARS-CoV-2/pangolin/Guangxi/P4L/2017__EPI_ISL_410538 spike protein (1-1205)(F964C_G993C) Ferritin construct
MFVFLFVLPLVSSQCVNLTTRTGIPPGYTNSSTRGVYYPDKVFRSSILHLTQDLFLPFFSNVTWFNTINYQGGFKKFDNPVLPFNDGVYFASTEKSNIIRGWIFGTTLDARTQSLLIVNNATNVVIKVCEFQFCTDPFLGVYYHNNNKTWVENEFRVYSSANNCTFEYISQPFLMDLEGKQGNFKNLREFVFKNVDGYFKIYSKHTPIDLVRDLPRGFAALEPLVDLPIGINITRFQTLLALHRSYLTPGNLESGWTTGAAAYYVGYLQQRTFLLSYNQNGTITDAVDCSLDPLSETKCTLKSLTVEKGIYQTSNFRVQPTISIVRFPNITNLCPFGEVFNASKFASVYAWNRKRISNCVADYSVLYNSTSFSTFKCYGVSPTKLNDLCFTNVYADSFVVKGDEVRQIAPGQTGVIADYNYKLPDDFTGCVIAWNSVKQDALTGGNYGYLYRLFRKSKLKPFERDISTEIYQAGSTPCNGQVGLNCYYPLERYGFHPTTGVNYQPFRVVVLSFELLNGPATVCGPKLSTTLVKDKCVNFNFNGLTGTGVLTTSKKQFLPFQQFGRDISDTTDAVRDPQTLEILDITPCSFGGVSVITPGTNTSNQVAVLYQDVNCTEVPMAIHAEQLTPAWRVYSAGANVFQTRAGCLVGAEHVNNSYECDIPVGAGICASYHSMSSLRSVNQRSIIAYTMSLGAENSVAYSNNSIAIPTNFTISVTTEILPVSMTKTSVDCTMYICGDSIECSNLLLQYGSFCTQLNRALTGIAVEQDKNTQEVFAQVKQIYKTPPIKDFGGFNFSQILPDPSKPSKRSFIEDLLFNKVTLADAGFIKQYGDCLGDIAARDLICAQKFNGLTVLPPLLTDEMIAQYTSALLAGTITSGWTFGAGAALQIPFAMQMAYRFNGIGVTQNVLYENQKLIANQFNSAIGKIQDSLSSTASALGKLQDVVNQNAQALNTLVKQLSSNCGAISSVLNDILSRLDKVEAEVQIDRLITCRLQSLQTYVTQQLIRAAEIRASANLAATKMSECVLGQSKRVDFCGKGYHLMSFPQSAPHGVVFLHVTYVPAQEKNFTTAPAICHEGKAHFPREGVFVSNGTHWFITQRNFYEPQIITTDNTFVSGSCDVVIGIVNNTVYDPLQPELDSFKEELDKYFKNHTSPDVDLGDISGINASVVNIQKEIDRLNEVAKNLNESPIDLQELGKYEQYIKGGGGSDIIKLLNEQVNKEMQSSNLYMSMSSWCYTHSLDGAGLFLFDHAAEEYEHAKKLIIFLNENNVPVQLTSISAPEHKFEGLTQIFQKAYEHEQHISESINNIVDHAIKSKDHATFNFLQWYVAEQHEEEVLFKDILDKIELIGNENHGLYLADQYVKGIAKSRKS

SEQ ID NO: 5430 - protein, 1373 aa, Artificial Sequence
  SARS-CoV-2/pangolin/Guangxi/P5L/2017__EPI_ISL_410540 spike protein (1-1205)(F964C_G993C) Ferritin construct
MFVFLFVLPLVSSQCVNLTTRTGIPPGYTNSSTRGVYYPDKVFRSSILHLTQDLFLPFFSNVTWFNTINYQGGFKKFDNPVLPFNDGVYFASTEKSNIIRGWIFGTTLDARTQSLLIVNNATNVVIKVCEFQFCTDPFLGVYYHNNNKTWVENEFRVYSSANNCTFEYISQPFLMDLEGKQGNFKNLREFVFKNVDGYFKIYSKHTPIDLVRDLPRGFAALEPLVDLPIGINITRFQTLLALHRSYLTPGKLESGWTTGAAAYYVGYLQQRTFLLSYNQNGTITDAVDCSLDPLSETKCTLKSLTVEKGIYQTSNFRVQPTISIVRFPNITNLCPFGEVFNASKFASVYAWNRKRISNCVADYSVLYNSTSFSTFKCYGVSPTKLNDLCFTNVYADSFVVKGDEVRQIAPGQTGVIADYNYKLPDDFTGCVIAWNSVKQDALTGGNYGYLYRLFRKSKLKPFERDISTEIYQAGSTPCNGQVGLNCYYPLERYGFHPTTGVNYQPFRVVVLSFELLNGPATVCGPKLSTTLVKDKCVNFNFNGLTGTGVLTTSKKQFLPFQQFGRDISDTTDAVRDPQTLEILDITPCSFGGVSVITPGTNTSNQVAVLYQDVNCTEVPMAIHAEQLTPAWRVYSAGANVFQTRAGCLVGAEHVNNSYECDIPVGAGICASYHSMSSFRSVNQRSIIAYTMSLGAENSVAYSNNSIAIPTNFTISVTTEILPVSMTKTSVDCTMYICGDSIECSNLLLQYGSFCTQLNRALTGIAVEQDKNTQEVFAQVKQIYKTPPIKDFGGFNFSQILPDPSKPSKRSFIEDLLFNKVTLADAGFIKQYGDCLGDIAARDLICAQKFNGLTVLPPLLTDEMIAQYTSALLAGTITSGWTFGAGAALQIPFAMQMAYRFNGIGVTQNVLYENQKLIANQFNSAIGKIQDSLSSTASALGKLQDVVNQNAQALNTLVKQLSSNCGAISSVLNDILSRLDKVEAEVQIDRLITCRLQSLQTYVTQQLIRAAEIRASANLAATKMSECVLGQSKRVDFCGKGYHLMSFPQSAPHGVVFLHVTYVPAQEKNFTTAPAICHEGKAHFPREGVFVSNGTHWFITQRNFYEPQIITTDNTFVSGSCDVVIGIVNNTVYDPLQPELDSFKEELDKYFKNHTSPDVDLGDISGINASVVNIQKEIDRLNEVAKNLNESLIDLQELGKYEQYIKGGGGSDIIKLLNEQVNKEMQSSNLYMSMSSWCYTHSLDGAGLFLFDHAAEEYEHAKKLIIFLNENNVPVQLTSISAPEHKFEGLTQIFQKAYEHEQHISESINNIVDHAIKSKDHATFNFLQWYVAEQHEEEVLFKDILDKIELIGNENHGLYLADQYVKGIAKSRKS

SEQ ID NO: 5431 - protein, 1373 aa, Artificial Sequence
  SARS-CoV-2/pangolin/Guangxi/P5E/2017__EPI_ISL_410541 spike protein (1-1205)(F964C_G993C) Ferritin construct
MFVFLFVLPLVSSQCVNLTTRTGIPPGYTNSSTRGVYYPDKVFRSSILHLTQDLFLPFFSNVTWFNTITYQGGSKKFDNPVLPFNDGVYFASTEKSNIIRGWIFGTTLDARTQSLLIVNNATNVVIKVCEFQFCTDPFLGVYYHNNNKTWVENEFRVYSSANNCTFEYISQPFLMDLEGKQGNFKNLREFVFKNVDGYFKIYSKHTPIDLVRDLPRGFAALEPLVDLPIGINITRFQTLLALHRSYLTPGKLESGWTTGAAAYYVGYLQQRTFLLSYNQNGTITDAVDCSLDPLSETKCTLKSLTVEKGIYQTSNFRVQPTISIVRFPNITNLCPFGEVFNASKFASVYAWNRKRISNCVADYSVLYNSTSFSTFKCYGVSPTKLNDLCFTNVYADSFVVKGDEVRQIAPGQTGVIADYNYKLPDDFTGCVIAWNSVKQDALTGDNYGYLYRLFRKSKLKPFERDISTEIYQAGSTPCNGQVGLNCYYPLERYGFHPTTGVNYQPFRVVVLSFELLNGPATVCGPKLSTTLVKDKCVNFNFNGLTGTGVLTTSKKQFLPFQQFGRDISDTTDAVRDPQTLEILDITPCSFGGVSVITPGTNTSNQVAVLYQDVNCTEVPMAIHAEQLTPAWRVYSAGANVFQTRAGCLVGAEHVNNSYECDIPVGAGICASYHSMSSFRSVNQRSIIAYTMSLGAENSVAYSNNSIAIPTNFTISVTTEILPVSMTKTSVDCTMYICGDSIECSNLLLQYGSFCTQLNRALTGIAVEQDKNTQEVFAQVKQIYKTPPIKDFGGFNFSQILPDPSKPSKRSFIEDLLFNKVTLADAGFIKQYGDCLGDIAARDLICAQKFNGLTVLPPLLTDEMIAQYTSALLAGTITSGWTFGAGAALQIPFAMQMAYRFNGIGVTQNVLYENQKLIANQFNSAIGKIQDSLSSTASALGKLQDVVNQNAQALNTLVKQLSSNCGAISSVLNDILSRLDKVEAEVQIDRLITCRLQSLQTYVTQQLIRAAEIRASANLAATKMSECVLGQSKRVDFCGKGYHLMSFPQSAPHGVVFLHVTYVPAQEKNFTTAPAICHEGKAHFPREGVFVSNGTHWFITQRNFYEPQIITTDNTFVSGSCDVVIGIVNNTVYDPLQPELDSFKEELDKYFKNHTSPDVDLGDISGINASVVNIQKEIDRLNEVAKNLNESLIDLQELGKYEQYIKGGGGSDIIKLLNEQVNKEMQSSNLYMSMSSWCYTHSLDGAGLFLFDHAAEEYEHAKKLIIFLNENNVPVQLTSISAPEHKFEGLTQIFQKAYEHEQHISESINNIVDHAIKSKDHATFNFLQWYVAEQHEEEVLFKDILDKIELIGNENHGLYLADQYVKGIAKSRKS

SEQ ID NO: 5432 - protein, 1371 aa, Artificial Sequence
  SARS-CoV-2/pangolin/Guangxi/P1E/2017__EPI_ISL_410539 spike protein (1-1203)(F962C_G991C) Ferritin construct
MFVFLFVLPLVSSQCVNLTTRTGIQPGYTNSSTRGVYYPDKVFRSSILHLTQDLFLPFFSNVTWFNTINYQGGFKKFDNPVLPFNDGVYFASTEKSNIIRGWIFGTTLDARTQSLLIVNNATNVVIKVCEFQFCTDPFLGVYYHNNNKTWVENEFRVYSSANNCTFEYISQPFLMDLEGKQGNFKNLREFVFKNVDGYFKIYSKHTPIDLVRDLPRGFAALEPLVDLPIGINITRFQTLLALHRSYLTPGKLESGWTTGAAAYYVGYLQQRTFLLSYNQNGTITDAVDCSLDPLSETKCTLKSLTVEKGIYQTSNFRVQPTISIVRFPNITNLCPFGEVFNASKFASVYAWNRKRISNCVADYSVLYNSTSFSTFKCYGVSPTKLNDLCFTNVYADSFVVKGDEVRQIAPGQTGVIADYNYKLPDDFTGCVIAWNSVKQDALTGGNYLYRLFRKSKLKPFERDISTEIYQAGSTPCNGQVGLNCYYPLERYGFHPTTGVNYQPFRVVVLSFELLNGPATVCGPKLSTTLVKDKCVNFNFNGLTGTGVLTTSKKQFLPFQQFGRDISDTTDAVRDPQTLEILDITPCSFGGVSVITPGTNTSNQVAVLYQDVNCTEVPMAIHAEQLTPAWRVYSAGANVFQTRAGCLVGAEHVNNSYECDIPVGAGICASYHSMSSLRSVNQRSIIAYTMSLGAENSVAYSNNSIAIPTNFTISVTTEILPVSMTKTSVDCTMYICGDSIECSNLLLQYGSFCTQLNRALTGIAVEQDKNTQEVFAQVKQIYKTPPIKDFGGFNFSQILPDPSKPSKRSFIEDLLFNKVTLADAGFIKQYGDCLGDIAARDLICAQKFNGLTVLPPLLTDEMIAQYTSALLAGTITSGWTFGAGAALQIPFAMQMAYRFNGIGVTQNVLYENQKLIANQFNSAIGKIQDSLSSTASALGKLQDVVNQNAQALNTLVKQLSSNCGAISSVLNDILSRLDKVEAEVQIDRLITCRLQSLQTYVTQQLIRAAEIRASANLAATKMSECVLGQSKRVDFCGKGYHLMSFPQSAPHGVVFLHVTYVPAQEKNFTTAPAICHEGKAHFPREGVFVSNGTHWFITQRNFYEPQIITTDNTFVSGSCDVVIGIVNNTVYDPLQPELDSFKEELDKYFKNHTSPDVDLGDISGINASVVNIQKEIDRLNEVAKNLNESLIDLQELGKYEQYIKGGGGSDIIKLLNEQVNKEMQSSNLYMSMSSWCYTHSLDGAGLFLFDHAAEEYEHAKKLIIFLNENNVPVQLTSISAPEHKFEGLTQIFQKAYEHEQHISESINNIVDHAIKSKDHATFNFLQWYVAEQHEEEVLFKDILDKIELIGNENHGLYLADQYVKGIAKSRKS

SEQ ID NO: 5433 - protein, 1379 aa, Artificial Sequence
  SARS-CoV-2/Wuhan/WIV05/2019__EPI_ISL_402128 spike protein (1-1211)(A972C_R995C) Ferritin construct
MFVFLVLLPLVSSQCVNLTTRTQLPPAYTNSFTRGVYYPDKVFRSSVLHSTQDLFLPFFSNVTWFHAIHVSGTNGTKRFDNPVLPFNDGVYFASTEKSNIIRGWIFGTTLDSKTQSLLIVNNATNVVIKVCEFQFCNDPFLGVYYHKNNKSWMESEFRVYSSANNCTFEYVSQPFLMDLEGKQGNFKNLREFVFKNIDGYFKIYSKHTPINLVRDLPQGFSALEPLVDLPIGINITRFQTLLALHRSYLTPGDSSSGWTAGAAAYYVGYLQPRTFLLKYNENGTITDAVDCALDPLSETKCTLKSFTVEKGIYQTSNFRVQPTESIVRFPNITNLCPFGEVFNATRFASVYAWNRKRISNCVADYSVLYNSASFSTFKCYGVSPTKLNDLCFTNVYADSFVIRGDEVRQIAPGQTGKIADYNYKLPDDFTGCVIAWNSNNLDSKVGGNYNYLYRLFRKSNLKPFERDISTEIYQAGSTPCNGVEGFNCYFPLQSYGFQPTNGVGYQPYRVVVLSFELLHAPATVCGPKKSTNLVKNKCVNFNFNGLTGTGVLTESNKKFLPFQQFGRDIADTTDAVRDPQTLEILDITPCSFGGVSVITPGTNTSNQVAVLYQDVNCTEVPVAIHADQLTPTWRVYSTGSNVFQTRAGCLIGAEHVNNSYECDIPIGAGICASYQTQTNSPRRARSVASQSIIAYTMSLGAENSVAYSNNSIAIPTNFTISVTTEILPVSMTKTSVDCTMYICGDSTECSNLLLQYGSFCTQLNRALTGIAVEQDKNTQEVFAQVKQIYKTPPIKDFGGFNFSQILPDPSKPSKRSFIEDLLFNKVTLADAGFIKQYGDCLGDIAARDLICAQKFNGLTVLPPLLTDEMIAQYTSALLAGTITSGWTFGAGAALQIPFAMQMAYRFNGIGVTQNVLYENQKLIANQFNSAIGKIQDSLSSTASALGKLQDVVNQNAQALNTLVKQLSSNFGCISSVLNDILSRLDKVEAEVQIDCLITGRLQSLQTYVTQQLIRAAEIRASANLAATKMSECVLGQSKRVDFCGKGYHLMSFPQSAPHGVVFLHVTYVPAQEKNFTTAPAICHDGKAHFPREGVFVSNGTHWFVTQRNFYEPQIITTDNTFVSGNCDVVIGIVNNTVYDPLQPELDSFKEELDKYFKNHTSPDVDLGDISGINASVVNIQKEIDRLNEVAKNLNESLIDLQELGKYEQYIKGGGGSDIIKLLNEQVNKEMQSSNLYMSMSSWCYTHSLDGAGLFLFDHAAEEYEHAKKLIIFLNENNVPVQLTSISAPEHKFEGLTQIFQKAYEHEQHISESINNIVDHAIKSKDHATFNFLQWYVAEQHEEEVLFKDILDKIELIGNENHGLYLADQYVKGIAKSRKS

SEQ ID NO: 5434 - protein, 1375 aa, Artificial Sequence
  SARS-CoV-2/bat/Yunnan/RaTG13/2013__EPI_ISL_402131 spike protein (1-1207)(A968C_R991C) Ferritin construct
MFVFLVLLPLVSSQCVNLTTRTQLPPAYTNSSTRGVYYPDKVFRSSVLHLTQDLFLPFFSNVTWFHAIHVSGTNGIKRFDNPVLPFNDGVYFASTEKSNIIRGWIFGTTLDSKTQSLLIVNNATNVVIKVCEFQFCNDPFLGVYYHKNNKSWMESEFRVYSSANNCTFEYVSQPFLMDLEGKQGNFKNLREFVFKNIDGYFKIYSKHTPINLVRDLPPGFSALEPLVDLPIGINITRFQTLLALHRSYLTPGDSSSGWTAGAAAYYVGYLQPRTFLLKYNENGTITDAVDCALDPLSETKCTLKSFTVEKGIYQTSNFRVQPTDSIVRFPNITNLCPFGEVFNATTFASVYAWNRKRISNCVADYSVLYNSTSFSTFKCYGVSPTKLNDLCFTNVYADSFVITGDEVRQIAPGQTGKIADYNYKLPDDFTGCVIAWNSKHIDAKEGGNFNYLYRLFRKANLKPFERDISTEIYQAGSKPCNGQTGLNCYYPLYRYGFYPTDGVGHQPYRVVVLSFELLNAPATVCGPKKSTNLVKNKCVNFNFNGLTGTGVLTESNKKFLPFQQFGRDIADTTDAVRDPQTLEILDITPCSFGGVSVITPGTNASNQVAVLYQDVNCTEVPVAIHADQLTPTWRVYSTGSNVFQTRAGCLIGAEHVNNSYECDIPIGAGICASYQTQTNSRSVASQSIIAYTMSLGAENSVAYSNNSIAIPTNFTISVTTEILPVSMTKTSVDCTMYICGDSTECSNLLLQYGSFCTQLNRALTGIAVEQDKNTQEVFAQVKQIYKTPPIKDFGGFNFSQILPDPSKPSKRSFIEDLLFNKVTLADAGFIKQYGDCLGDIAARDLICAQKFNGLTVLPPLLTDEMIAQYTSALLAGTITSGWTFGAGAALQIPFAMQMAYRFNGIGVTQNVLYENQKLIANQFNSAIGKIQDSLSSTASALGKLQDVVNQNAQALNTLVKQLSSNFGCISSVLNDILSRLDKVEAEVQIDCLITGRLQSLQTYVTQQLIRAAEIRASANLAATKMSECVLGQSKRVDFCGKGYHLMSFPQSAPHGVVFLHVTYVPAQEKNFTTAPAICHDGKAHFPREGVFVSNGTHWFVTQRNFYEPQIITTDNTFVSGSCDVVIGIVNNTVYDPLQPELDSFKEELDKYFKNHTSPDVDLGDISGINASVVNIQKEIDRLNEVAKNLNESLIDLQELGKYEQYIKGGGGSDIIKLLNEQVNKEMQSSNLYMSMSSWCYTHSLDGAGLFLFDHAAEEYEHAKKLIIFLNENNVPVQLTSISAPEHKFEGLTQIFQKAYEHEQHISESINNIVDHAIKSKDHATFNFLQWYVAEQHEEEVLFKDILDKIELIGNENHGLYLADQYVKGIAKSRKS

SEQ ID NO: 5435 - protein, 1379 aa, Artificial Sequence
  SARS-CoV-2/Wuhan/HBCDC-HB-01/2019__EPI_ISL_402132 spike protein (1-1211)(A972C_R995C) Ferritin construct
MFVFLVLLPLVSSQCVNLTTRTQLPPAYTNSITRGVYYPDKVFRSSVLHSTQDLFLPFFSNVTWFHAIHVSGTNGTKRFDNPVLPFNDGVYFASTEKSNIIRGWIFGTTLDSKTQSLLIVNNATNVVIKVCEFQFCNDPFLGVYYHKNNKSWMESEFRVYSSANNCTFEYVSQPFLMDLEGKQGNFKNLREFVFKNIDGYFKIYSKHTPINLVRDLPQGFSALEPLVDLPIGINITRFQTLLALHRSYLTPGDSSSGWTAGAAAYYVGYLQPRTFLLKYNENGTITDAVDCALDPLSETKCTLKSFTVEKGIYQTSNFRVQPTESIVRFPNITNLCPFGEVFNATRFASVYAWNRKRISNCVADYSVLYNSASFSTFKCYGVSPTKLNDLCFTNVYADSFVIRGDEVRQIAPGQTGKIADYNYKLPDDFTGCVIAWNSNNLDSKVGGNYNYLYRLFRKSNLKPFERDISTEIYQAGSTPCNGVEGFNCYFPLQSYGFQPTNGVGYQPYRVVVLSFELLHAPATVCGPKKSTNLVKNKCVNFNFNGLTGTGVLTESNKKFLPFQQFGRDIADTTDAVRDPQTLEILDITPCSFGGVSVITPGTNTSNQVAVLYQDVNCTEVPVAIHADQLTPTWRVYSTGSNVFQTRAGCLIGAEHVNNSYECDIPIGAGICASYQTQTNSPRRARSVASQSIIAYTMSLGAENSVAYSNNSIAIPTNFTISVTTEILPVSMTKTSVDCTMYICGDSTECSNLLLQYGSFCTQLNRALTGIAVEQDKNTQEVFAQVKQIYKTPPIKDFGGFNFSQILPDPSKPSKRSFIEDLLFNKVTLADAGFIKQYGDCLGDIAARDLICAQKFNGLTVLPPLLTDEMIAQYTSALLAGTITSGWTFGAGAALQIPFAMQMAYRFNGIGVTQNVLYENQKLIANQFNSAIGKIQDSLSSTASALGKLQDVVNQNAQALNTLVKQLSSNFGCISSVLNDILSRLDKVEAEVQIDCLITGRLQSLQTYVTQQLIRAAEIRASANLAATKMSECVLGQSKRVDFCGKGYHLMSFPQSAPHGVVFLHVTYVPAQEKNFTTAPAICHDGKAHFPREGVFVSNGTHWFVTQRNFYEPQIITTDNTFVSGNCDVVIGIVNNTVYDPLQPELDSFKEELDKYFKNHTSPDVDLGDISGINASVVNIQKEIDRLNEVAKNLNESLIDLQELGKYEQYIKGGGGSDIIKLLNEQVNKEMQSSNLYMSMSSWCYTHSLDGAGLFLFDHAAEEYEHAKKLIIFLNENNVPVQLTSISAPEHKFEGLTQIFQKAYEHEQHISESINNIVDHAIKSKDHATFNFLQWYVAEQHEEEVLFKDILDKIELIGNENHGLYLADQYVKGIAKSRKS

SEQ ID NO: 5436 - protein, 1379 aa, Artificial Sequence
  SARS-CoV-2/Guangdong/20SF028/2020__EPI_ISL_403936 spike protein (1-1211)(A972C_R995C) Ferritin construct
MFVFLVLLPLVSSQCVNLTTRTQLPPAYTNSFTRGVYYPDKVFRSSVLYSTQDLFLPFFSNVTWFHAIHVSGTNGTKRFDNPVLPFNDGVYFASTEKSNIIRGWIFGTTLDSKTQSLLIVNNATNVVIKVCEFQFCNDPFLGVYYHKNNKSWMESEFRVYSSANNCTFEYVSQPFLMDLEGKQGNFKNLREFVFKNIDGYFKIYSKHTPINLVRDLPQGFSALEPLVDLPIGINITRFQTLLALHRSYLTPGDSSSGWTAGAAAYYVGYLQPRTFLLKYNENGTITDAVDCALDPLSETKCTLKSFTVEKGIYQTSNFRVQPTESIVRFPNITNLCPFGEVFNATRFASVYAWNRKRISNCVADYSVLYNSASFSTFKCYGVSPTKLNDLCFTNVYADSFVIRGDEVRQIAPGQTGKIADYNYKLPDDFTGCVIAWNSNNLDSKVGGNYNYLYRLFRKSNLKPFERDISTEIYQAGSTPCNGVEGFNCYFPLQSYGFQPTNGVGYQPYRVVVLSFELLHAPATVCGPKKSTNLVKNKCVNFNFNGLTGTGVLTESNKKFLPFQQFGRDIADTTDAVRDPQTLEILDITPCSFGGVSVITPGTNTSNQVAVLYQDVNCTEVPVAIHADQLTPTWRVYSTGSNVFQTRAGCLIGAEHVNNSYECDIPIGAGICASYQTQTNSPRRARSVASQSIIAYTMSLGAENSVAYSNNSIAIPTNFTISVTTEILPVSMTKTSVDCTMYICGDSTECSNLLLQYGSFCTQLNRALTGIAVEQDKNTQEVFAQVKQIYKTPPIKDFGGFNFSQILPDPSKPSKRSFIEDLLFNKVTLADAGFIKQYGDCLGDIAARDLICAQKFNGLTVLPPLLTDEMIAQYTSALLAGTITSGWTFGAGAALQIPFAMQMAYRFNGIGVTQNVLYENQKLIANQFNSAIGKIQDSLSSTASALGKLQDVVNQNAQALNTLVKQLSSNFGCISSVLNDILSRLDKVEAEVQIDCLITGRLQSLQTYVTQQLIRAAEIRASANLAATKMSECVLGQSKRVDFCGKGYHLMSFPQSAPHGVVFLHVTYVPAQEKNFTTAPAICHDGKAHFPREGVFVSNGTHWFVTQRNFYEPQIITTDNTFVSGNCDVVIGIVNNTVYDPLQPELDSFKEELDKYFKNHTSPDVDLGDISGINASVVNIQKEIDRLNEVAKNLNESLIDLQELGKYEQYIKGGGGSDIIKLLNEQVNKEMQSSNLYMSMSSWCYTHSLDGAGLFLFDHAAEEYEHAKKLIIFLNENNVPVQLTSISAPEHKFEGLTQIFQKAYEHEQHISESINNIVDHAIKSKDHATFNFLQWYVAEQHEEEVLFKDILDKIELIGNENHGLYLADQYVKGIAKSRKS

SEQ ID NO: 5437 - protein, 1379 aa, Artificial Sequence
  SARS-CoV-2/Shenzhen/SZTH-001/2020__EPI_ISL_406592 spike protein (1-1211)(A972C_R995C) Ferritin construct
MFVFLVLLPLVSSQCVNLTTRTQLPPAYTNSFTRGVYYPDKVFRSSVLHSTQDLFLPFFSNVTWFHAIHVSGTNGTKRFDNPVLPFNDGVYFASTEKSNIIRGWIFGTTLDSKTQSLLIVNNATNVVIKVCEFQFCNDPFLGVYYHKNNKSWMESEFRVYSSANNCTFEYVSQPFLMDLEGKQGNFKNLREFVFKNIDGYFKIYSKHTPINLVRDLPQGFSALEPLVDLPIGINITRFQTLLALHRSYLTPGDSSSGWTAGAAAYYVGYLQPRTFLLKYNENGTITDAVDCALDPLSETKCTLKSFTVEKGIYQTSNFRVQPTESIVRFPNITNLCPFGEVFNATRFASVYAWNRKRISNCVADYSVLYNSASFSTFKCYGVSPTKLNDLCFTNVYADSFVIRGDEVRQIAPGQTGKIADYNYKLPDDFTGCVIAWNSNNLDSKVGGNYNYLYRLFRKSNLKPFERDISTEIYQAGSTPCNGVEGFNCYFPLQSYGFQPTNGVGYQPYRVVVLSFELLHAPATVCGPKKSTNLVKNKCVNFNFNGLTGTGVLTESNKKFLPFQQFGRDIADTTDAVRDPQTLEILDITPCSFGGVSVITPGTNTSNQVAVLYQDVNCTEVPVAIHADQLTPTWRVYSTGSNVFQTRAGCLIGAEHVNNSYECDIPIGAGICASYQTQTNSPRRARSVASQSIIAYTMSLGAENSVAYSNNSIAIPTNFTISVTTEILPVSMTKTSVDCTMYICGDSTECSNLLLQYGSFCTQLNRALTGIAVEQDKNTQEVFAQVKQIYKTPPIKDFGGFNFSQILPDPSKPSKRSFIEDLLFNKVTLADAGFIKQYGDCLGDIAARDLICAQKFNGLTVLPPLLTDEMIAQYTSALLAGTITSGWTFGAGAALQIPFAMQMAYRFNGIGVTQNVLYENQKLIANQFNSAIGKIQDSLSSTASALGKLQDVVNQNAQALNTLVKQLSSNFGCISSVLNDILSRLDKVEAEVQIDCLITGRLQSLQTYVTQQLIRAAEIRASANLAATKMSECVLGQSKRVDFCGKGYHLMSFPQSAPHGVVFLHVTYVPAQEKNFTTAPAICHDGKAHFPREGVFVSNGTHWFVTQRNFYEPQIITTDNTFVSGNCDVLIGIVNNTVYDPLQPELDSFKEELDKYFKNHTSPDVDLGDISGINASVVNIQKEIDRLNEVAKNLNESLIDLQELGKYEQYIKGGGGSDIIKLLNEQVNKEMQSSNLYMSMSSWCYTHSLDGAGLFLFDHAAEEYEHAKKLIIFLNENNVPVQLTSISAPEHKFEGLTQIFQKAYEHEQHISESINNIVDHAIKSKDHATFNFLQWYVAEQHEEEVLFKDILDKIELIGNENHGLYLADQYVKGIAKSRKS

SEQ ID NO: 5438 - protein, 1379 aa, Artificial Sequence
  SARS-CoV-2/Shenzhen/SZTH-004/2020__EPI_ISL_406595 spike protein (1-1211)(A972C_R995C) Ferritin construct
MFVFLVLLPLVSSQCVNLTTRTQLPPAYTNSFTRGVYYPDKVFRSSVLHSTQDLFLPFFSNVTWFHAIHVSGTNGTKRFDNPVLPFNDGVYFASTEKSNIIRGWIFGTTLDSKTQSLLIVNNATNVVIKVCEFQFCNDPFLGVYYHKNNKSWMESEFRVYSSANNCTFEYVSQPFLMDLEGKQGNFKNLREFVFKNIDGYFKIYSKHTPINLVRDLPQGFSALEPLVDLPIGINITRFQTLLALHRSYLTPGDSSSGWTAGAAAYYVGYLQPRTFLLKYNENGTITDAVDCALDPLSETKCTLKSFTVEKGIYQTSNFRVQPTESIVRFPNITNLCPFGEVFNATRFASVYAWDRKRISNCVAYYSVLYNSASFSTFKCYGVSPTKLNDLCFTNVYADSFVIRGDEVRQIAPGQTGKIADYNYKLPDDFTGCVIAWNSNNLDSKVGGNYNYLYRLFRKSNLKPFERDISTEIYQAGSTPCNGVEGFNCYFPLQSYGFQPTNGVGYQPYRVVVLSFELLHAPATVCGPKKSTNLVKNKCVNFNFNGLTGTGVLTESNKKFLPFQQFGRDIADTTDAVRDPQTLEILDITPCSFGGVSVITPGTNTSNQVAVLYQDVNCTEVPVAIHADQLTPTWRVYSTGSNVFQTRAGCLIGAEHVNNSYECDIPIGAGICASYQTQTNSPRRARSVASQSIIAYTMSLGAENSVAYSNNSIAIPTNFTISVTTEILPVSMTKTSVDCTMYICGDSTECSNLLLQYGSFCTQLNRALTGIAVEQDKNTQEVFAQVKQIYKTPPIKDFGGFNFSQILPDPSKPSKRSFIEDLLFNKVTLADAGFIKQYGDCLGDIAARDLICAQKFNGLTVLPPLLTDEMIAQYTSALLAGTITSGWTFGAGAALQIPFAMQMAYRFNGIGVTQNVLYENQKLIANQFNSAIGKIQDSLSSTASALGKLQDVVNQNAQALNTLVKQLSSNFGCISSVLNDILSRLDKVEAEVQIDCLITGRLQSLQTYVTQQLIRAAEIRASANLAATKMSECVLGQSKRVDFCGKGYHLMSFPQSAPHGVVFLHVTYVPAQEKNFTTAPAICHDGKAHFPREGVFVSNGTHWFVTQRNFYEPQIITTDNTFVSGNCDVVIGIVNNTVYDPLQPELDSFKEELDKYFKNHTSPDVDLGDISGINASVVNIQKEIDRLNEVAKNLNESLIDLQELGKYEQYIKGGGGSDIIKLLNEQVNKEMQSSNLYMSMSSWCYTHSLDGAGLFLFDHAAEEYEHAKKLIIFLNENNVPVQLTSISAPEHKFEGLTQIFQKAYEHEQHISESINNIVDHAIKSKDHATFNFLQWYVAEQHEEEVLFKDILDKIELIGNENHGLYLADQYVKGIAKSRKS

SEQ ID NO: 5439 - protein, 1379 aa, Artificial Sequence
  SARS-CoV-2/France/IDF0372/2020__EPI_ISL_406596 spike protein (1-1211)(A972C_R995C) Ferritin construct
MFVFLVLLPLVSSQCVNLTTRTQLPPAYTNSFTRGVYYPDKVFRSSVLHSTQDLFLPFFSNVTWFHAIHVSGTNGTKRFDNPVLPFNDGVYFASTEKSNIIRGWIFGTTLDSKTQSLLIVNNATNVVIKVCEFQFCNDPFLGVYYHKNNKSWMESEFRVYSSANNCTFEYVSQPFLMDLEGKQGNFKNLREFVFKNIDGYFKIYSKHTPINLVRDLPQGFSALEPLVDLPIGINITRFQTLLALHRSYLTPGDSSSGWTAGAAAYYVGYLQPRTFLLKYNENGTITDAVDCALDPLSETKCTLKSFTVEKGIYQTSNFRVQPTESIVRFPNITNLCPFGEVFNATRFASVYAWNRKRISNCVADYSFLYNSASFSTFKCYGVSPTKLNDLCFTNVYADSFVIRGDEVRQIAPGQTGKIADYNYKLPDDFTGCVIAWNSNNLDSKVGGNYNYLYRLFRKSNLKPFERDISTEIYQAGSTPCNGVEGFNCYFPLQSYGFQPTNGVGYQPYRVVVLSFELLHAPATVCGPKKSTNLVKNKCVNFNFNGLTGTGVLTESNKKFLPFQQFGRDIADTTDAVRDPQTLEILDITPCSFGGVSVITPGTNTSNQVAVLYQDVNCTEVPVAIHADQLTPTWRVYSTGSNVFQTRAGCLIGAEHVNNSYECDIPIGAGICASYQTQTNSPRRARSVASQSIIAYTMSLGAENSVAYSNNSIAIPTNFTISVTTEILPVSMTKTSVDCTMYICGDSTECSNLLLQYGSFCTQLNRALTGIAVEQDKNTQEVFAQVKQIYKTPPIKDFGGFNFSQILPDPSKPSKRSFIEDLLFNKVTLADAGFIKQYGDCLGDIAARDLICAQKFNGLTVLPPLLTDEMIAQYTSALLAGTITSGWTFGAGAALQIPFAMQMAYRFNGIGVTQNVLYENQKLIANQFNSAIGKIQDSLSSTASALGKLQDVVNQNAQALNTLVKQLSSNFGCISSVLNDILSRLDKVEAEVQIDCLITGRLQSLQTYVTQQLIRAAEIRASANLAATKMSECVLGQSKRVDFCGKGYHLMSFPQSAPHGVVFLHVTYVPAQEKNFTTAPAICHDGKAHFPREGVFVSNGTHWFVTQRNFYEPQIITTDNTFVSGNCDVVIGIVNNTVYDPLQPELDSFKEELDKYFKNHTSPDVDLGDISGINASVVNIQKEIDRLNEVAKNLNESLIDLQELGKYEQYIKGGGGSDIIKLLNEQVNKEMQSSNLYMSMSSWCYTHSLDGAGLFLFDHAAEEYEHAKKLIIFLNENNVPVQLTSISAPEHKFEGLTQIFQKAYEHEQHISESINNIVDHAIKSKDHATFNFLQWYVAEQHEEEVLFKDILDKIELIGNENHGLYLADQYVKGIAKSRKS

SEQ ID NO: 5440 - protein, 1379 aa, Artificial Sequence
  SARS-CoV-2/Australia/VIC01/2020__EPI_ISL_406844 spike protein (1-1211)(A972C_R995C) Ferritin construct
MFVFLVLLPLVSSQCVNLTTRTQLPPAYTNSFTRGVYYPDKVFRSSVLHSTQDLFLPFFSNVTWFHAIHVSGTNGTKRFDNPVLPFNDGVYFASTEKSNIIRGWIFGTTLDSKTQSLLIVNNATNVVIKVCEFQFCNDPFLGVYYHKNNKSWMESEFRVYSSANNCTFEYVSQPFLMDLEGKQGNFKNLREFVFKNIDGYFKIYSKHTPINLVRDLPQGFSALEPLVDLPIGINITRFQTLLALHRRYLTPGDSSSGWTAGAAAYYVGYLQPRTFLLKYNENGTITDAVDCALDPLSETKCTLKSFTVEKGIYQTSNFRVQPTESIVRFPNITNLCPFGEVFNATRFASVYAWNRKRISNCVADYSVLYNSASFSTFKCYGVSPTKLNDLCFTNVYADSFVIRGDEVRQIAPGQTGKIADYNYKLPDDFTGCVIAWNSNNLDSKVGGNYNYLYRLFRKSNLKPFERDISTEIYQAGSTPCNGVEGFNCYFPLQSYGFQPTNGVGYQPYRVVVLSFELLHAPATVCGPKKSTNLVKNKCVNFNFNGLTGTGVLTESNKKFLPFQQFGRDIADTTDAVRDPQTLEILDITPCSFGGVSVITPGTNTSNQVAVLYQDVNCTEVPVAIHADQLTPTWRVYSTGSNVFQTRAGCLIGAEHVNNSYECDIPIGAGICASYQTQTNSPRRARSVASQSIIAYTMSLGAENSVAYSNNSIAIPTNFTISVTTEILPVSMTKTSVDCTMYICGDSTECSNLLLQYGSFCTQLNRALTGIAVEQDKNTQEVFAQVKQIYKTPPIKDFGGFNFSQILPDPSKPSKRSFIEDLLFNKVTLADAGFIKQYGDCLGDIAARDLICAQKFNGLTVLPPLLTDEMIAQYTSALLAGTITSGWTFGAGAALQIPFAMQMAYRFNGIGVTQNVLYENQKLIANQFNSAIGKIQDSLSSTASALGKLQDVVNQNAQALNTLVKQLSSNFGCISSVLNDILSRLDKVEAEVQIDCLITGRLQSLQTYVTQQLIRAAEIRASANLAATKMSECVLGQSKRVDFCGKGYHLMSFPQSAPHGVVFLHVTYVPAQEKNFTTAPAICHDGKAHFPREGVFVSNGTHWFVTQRNFYEPQIITTDNTFVSGNCDVVIGIVNNTVYDPLQPELDSFKEELDKYFKNHTSPDVDLGDISGINASVVNIQKEIDRLNEVAKNLNESLIDLQELGKYEQYIKGGGGSDIIKLLNEQVNKEMQSSNLYMSMSSWCYTHSLDGAGLFLFDHAAEEYEHAKKLIIFLNENNVPVQLTSISAPEHKFEGLTQIFQKAYEHEQHISESINNIVDHAIKSKDHATFNFLQWYVAEQHEEEVLFKDILDKIELIGNENHGLYLADQYVKGIAKSRKS

SEQ ID NO: 5441 - protein, 1379 aa, Artificial Sequence
  SARS-CoV-2/Germany/BavPat1/2020__EPI_ISL_406862 spike protein (1-1211)(A972C_R995C) Ferritin construct
MFVFLVLLPLVSSQCVNLTTRTQLPPAYTNSFTRGVYYPDKVFRSSVLHSTQDLFLPFFSNVTWFHAIHVSGTNGTKRFDNPVLPFNDGVYFASTEKSNIIRGWIFGTTLDSKTQSLLIVNNATNVVIKVCEFQFCNDPFLGVYYHKNNKSWMESEFRVYSSANNCTFEYVSQPFLMDLEGKQGNFKNLREFVFKNIDGYFKIYSKHTPINLVRDLPQGFSALEPLVDLPIGINITRFQTLLALHRSYLTPGDSSSGWTAGAAAYYVGYLQPRTFLLKYNENGTITDAVDCALDPLSETKCTLKSFTVEKGIYQTSNFRVQPTESIVRFPNITNLCPFGEVFNATRFASVYAWNRKRISNCVADYSVLYNSASFSTFKCYGVSPTKLNDLCFTNVYADSFVIRGDEVRQIAPGQTGKIADYNYKLPDDFTGCVIAWNSNNLDSKVGGNYNYLYRLFRKSNLKPFERDISTEIYQAGSTPCNGVEGFNCYFPLQSYGFQPTNGVGYQPYRVVVLSFELLHAPATVCGPKKSTNLVKNKCVNFNFNGLTGTGVLTESNKKFLPFQQFGRDIADTTDAVRDPQTLEILDITPCSFGGVSVITPGTNTSNQVAVLYQGVNCTEVPVAIHADQLTPTWRVYSTGSNVFQTRAGCLIGAEHVNNSYECDIPIGAGICASYQTQTNSPRRARSVASQSIIAYTMSLGAENSVAYSNNSIAIPTNFTISVTTEILPVSMTKTSVDCTMYICGDSTECSNLLLQYGSFCTQLNRALTGIAVEQDKNTQEVFAQVKQIYKTPPIKDFGGFNFSQILPDPSKPSKRSFIEDLLFNKVTLADAGFIKQYGDCLGDIAARDLICAQKFNGLTVLPPLLTDEMIAQYTSALLAGTITSGWTFGAGAALQIPFAMQMAYRFNGIGVTQNVLYENQKLIANQFNSAIGKIQDSLSSTASALGKLQDVVNQNAQALNTLVKQLSSNFGCISSVLNDILSRLDKVEAEVQIDCLITGRLQSLQTYVTQQLIRAAEIRASANLAATKMSECVLGQSKRVDFCGKGYHLMSFPQSAPHGVVFLHVTYVPAQEKNFTTAPAICHDGKAHFPREGVFVSNGTHWFVTQRNFYEPQIITTDNTFVSGNCDVVIGIVNNTVYDPLQPELDSFKEELDKYFKNHTSPDVDLGDISGINASVVNIQKEIDRLNEVAKNLNESLIDLQELGKYEQYIKGGGGSDIIKLLNEQVNKEMQSSNLYMSMSSWCYTHSLDGAGLFLFDHAAEEYEHAKKLIIFLNENNVPVQLTSISAPEHKFEGLTQIFQKAYEHEQHISESINNIVDHAIKSKDHATFNFLQWYVAEQHEEEVLFKDILDKIELIGNENHGLYLADQYVKGIAKSRKS

SEQ ID NO: 5442 - protein, 1379 aa, Artificial Sequence
  SARS-CoV-2/Wuhan/HBCDC-HB-02/2020__EPI_ISL_412978 spike protein (1-1211)(A972C_R995C) Ferritin construct
MFVFLVLLPLVSSQCVNLTTRTQLPPAYTNSFTRGVYYPDKVFRSSVLHSTQDLFLPFFSNVTWFHAIHVSGTNGTKRFDNPVLPFNDGVYFASTEKSNIIRGWIFGTTLDSKTQSLLIVNNATNVVIKVCEFQFCNDPFLGVYYHKNNKSWMESEFRVYSSANNCTFEYVSQPFLMDLEGKQGNFKNLREFVFKNIDGYFKIYSKHTPINLVRDLPQGFSALEPLVDLPIGINITRFQTLLALHRSYLTPGDSSSGWTAGAAAYYVGYLQPRTFLLKYNENGTITDAVDCALDPLSETKCTLKSFTVEKGIYQTSNFRVQPTESIVRFPNITNLCPFGEVFNATRFASVYAWNRKRISNCVADYSVLYNSASFSTFKCYGVSPTKLNDLCFTNVYADSFVIRGDEVRQIAPGQTGKIADYNYKLPDDFTGCVIAWNSNNLDSKVGGNYNYLYRLFRKSNLKPFERDISTEIYQAGSTPCNGVEGFNCYFPLQSYGFQPTNGVGYQPYRVVVLSFELLHAPATVCGPKKSTNLVKNKCVNFNFNGLTGTGVLTESNKKFLPFQQFGRDIADTTDAVRDPQTLEILDITPCSFGGVSVITPGTNTSNQVAVLYQDVNCTEVPVAIHADQLTPTWRVYSTGSNVFQTRAGCLIGAEHVNNSYECDIPIGAGICASYQTQTNSPRRARSVASQSIIAYTMSLGAENSVAYSNNSIAIPTNFTISVTTEILPVSMTKTSVDCTMYICGDSTECSNFLLQYGSFCTQLNRALTGIAVEQDKNTQEVFAQVKQIYKTPPIKDFGGFNFSQILPDPSKPSKRSFIEDLLFNKVTLADAGFIKQYGDCLGDIAARDLICAQKFNGLTVLPPLLTDEMIAQYTSALLAGTITSGWTFGAGAALQIPFAMQMAYRFNGIGVTQNVLYENQKLIANQFNSAIGKIQDSLSSTASALGKLQDVVNQNAQALNTLVKQLSSNFGCISSVLNDILSRLDKVEAEVQIDCLITGRLQSLQTYVTQQLIRAAEIRASANLAATKMSECVLGQSKRVDFCGKGYHLMSFPQSAPHGVVFLHVTYVPAQEKNFTTAPAICHDGKAHFPREGVFVSNGTHWFVTQRNFYEPQIITTDNTFVSGNCDVVIGIVNNTVYDPLQPELDSFKEELDKYFKNHTSPDVDLGDISGINASVVNIQKEIDRLNEVAKNLNESLIDLQELGKYEQYIKGGGGSDIIKLLNEQVNKEMQSSNLYMSMSSWCYTHSLDGAGLFLFDHAAEEYEHAKKLIIFLNENNVPVQLTSISAPEHKFEGLTQIFQKAYEHEQHISESINNIVDHAIKSKDHATFNFLQWYVAEQHEEEVLFKDILDKIELIGNENHGLYLADQYVKGIAKSRKS

SEQ ID NO: 5443 - protein, 1379 aa, Artificial Sequence
  SARS-CoV-2/Australia/QLD02/2020__EPI_ISL_407896 spike protein (1-1211)(A972C_R995C) Ferritin construct
MFVFLVLLPLVSSQCVNLTTRTQLPPAYTNSFTRGVYYPDKVFRSSVLHSTQDLFLPFFSNVTWFHAIHVSGTNGTKRFDNPVLPFNDGVYFASTEKSNIIRGWIFGTTLDSKTQSLLIVNNATNVVIKVCEFQFCNDPFLGVYYHKNNKSWMESEFRVYSSANNCTFEYVSQPFLMDLEGKQGNFKNLREFVFKNIDGYFKIYSKHTPINLVRDLPQGFSALEPLVDLPIGINITRFQTLLALHRSYLTPGDSSSGWTAGAAAYYVGYLQPRTFLLKYNENGTITDAVDCALDPLSETKCTLKSFTVEKGIYQTSNFRVQPTESIVRFPNITNLCPFGEVFNATRFASVYAWNRKRISNCVADYSVLYNSASFSTFKCYGVSPTKLNDLCFTNVYADSFVIRGDEVRQIAPGQTGKIADYNYKLPDDFTGCVIAWNSNNLDSKVGGNYNYLYRLFRKSNLKPFERDISTEIYQAGSTPCNGVEGFNCYFPLQSYGFQPTNGVGYQPYRVVVLSFELLHAPATVCGPKKSTNLVKNKCVNFNFNGLTGTGVLTESNKKFLPFQQFGRDIADTTDAVRDPQTLEILDITPCSFGGVSVITPGTNTSNQVAVLYQDVNCTEVPVAIHADQLTPTWRVYSTGSNVFQTRAGCLIGAEHVNNSYECDIPIGAGICASYQTQTNSPRRARSVASQSIIAYTMSLGAENSVAYSNNSIAIPTNFTISVTTEILPVSMTKTSVDCTMYICGDSTECSNLLLQYGSFCTQLNRALTGIAVEQDKNTQEVFAQVKQIYKTPPIKDFGGFNFSQILPDPSKPSKRSFIEDLLFNKVTLADAGFIKQYGDCLGDIAARDLICAQKFNGLTVLPPLLTDEMIAQYTSALLAGTITSGWTFGAGAALQIPFAMQMAYRFNGIGVTQNVLYENQKLIANQFNSAIGKIQDSLSSTASALGKLQDVVNQNAQALNTLVKQLSSNFGCISSVLNDILSRLDKVEAEVQIDCLITGRLQSLQTYVTQQLIRAAEIRASANLAATKMSECVLGQSKRVDFCGKGYHLMSFPQSAPHGVVFLHVTYVPAQEKNFTTAPAICHDGKAHFPREGVFVSNGTHWFVTQRNFYEPQIITTDNTFVSGNCDVVIGIVNNTVYDPLQLELDSFKEELDKYFKNHTSPDVDLGDISGINASVVNIQKEIDRLNEVAKNLNESLIDLQELGKYEQYIKGGGGSDIIKLLNEQVNKEMQSSNLYMSMSSWCYTHSLDGAGLFLFDHAAEEYEHAKKLIIFLNENNVPVQLTSISAPEHKFEGLTQIFQKAYEHEQHISESINNIVDHAIKSKDHATFNFLQWYVAEQHEEEVLFKDILDKIELIGNENHGLYLADQYVKGIAKSRKS

SEQ ID NO: 5444 - protein, 1379 aa, Artificial Sequence
  SARS-CoV-2/India/1-31/2020__EPI_ISL_413523 spike protein (1-1211)(A972C_R995C) Ferritin construct
MFVFLVLLPLVSSQCVNLTTRTQLPPAYTNSFTRGVYYPDKVFRSSVLHSTQDLFLPFFSNVTWFHAIHVSGTNGTKRFDNPVLPFNDGVYFASTEKSNIIRGWIFGTTLDSKTQSLLIVNNATNVVIKVCEFQFCNDPFLGVYYHKNNKSWMESEFRVYSSANNCTFEYVSQPFLMDLEGKQGNFKNLREFVFKNIDGYFKIYSKHTPINLVRDLPQGFSALEPLVDLPIGINITRFQTLLALHRSYLTPGDSSSGWTAGAAAYYVGYLQPRTFLLKYNENGTITDAVDCALDPLSETKCTLKSFTVEKGIYQTSNFRVQPTESIVRFPNITNLCPFGEVFNATRFASVYAWNRKRISNCVADYSVLYNSASFSTFKCYGVSPTKLNDLCFTNVYADSFVIRGDEVRQIAPGQTGKIADYNYKLPDDFTGCVIAWNSNNLDSKVGGNYNYLYRLFRKSNLKPFERDISTEIYQAGSTPCNGVEGFNCYFPLQSYGFQPTNGVGYQPYRVVVLSFELLHAPATVCGPKKSTNLVKNKCVNFNFNGLTGTGVLTESNKKFLPFQQFGRDIADTTDAVRDPQTLEILDITPCSFGGVSVITPGTNTSNQVAVLYQDVNCTEVPVAIHADQLTPTWRVYSTGSNVFQTRAGCLIGAEHVNNSYECDIPIGAGICASYQTQTNSPRRARSVASQSIIAYTMSLGAENSVAYSNNSIAIPTNFTISVTTEILPVSMTKTSVDCTMYICGDSTECSNLLLQYGSFCTQLNRALTGIAVEQDKNTQEVFAQVKQIYKTPPIKDFGGFNFSQILPDPSKPSKRSFIEDLLFNKVTLADAGFIKQYGDCLGDIAARDLICAQKFNGLTVLPPLLTDEMIAQYTSALLAGTITSGWTFGAGAALQIPFAMQMAYRFNGIGVTQNVLYENQKLIANQFNSVIGKIQDSLSSTASALGKLQDVVNQNAQALNTLVKQLSSNFGCISSVLNDILSRLDKVEAEVQIDCLITGRLQSLQTYVTQQLIRAAEIRASANLAATKMSECVLGQSKRVDFCGKGYHLMSFPQSAPHGVVFLHVTYVPAQEKNFTTAPAICHDGKAHFPREGVFVSNGTHWFVTQRNFYEPQIITTDNTFVSGNCDVVIGIVNNTVYDPLQPELDSFKEELDKYFKNHTSPDVDLGDISGINASVVNIQKEIDRLNEVAKNLNESLIDLQELGKYEQYIKGGGGSDIIKLLNEQVNKEMQSSNLYMSMSSWCYTHSLDGAGLFLFDHAAEEYEHAKKLIIFLNENNVPVQLTSISAPEHKFEGLTQIFQKAYEHEQHISESINNIVDHAIKSKDHATFNFLQWYVAEQHEEEVLFKDILDKIELIGNENHGLYLADQYVKGIAKSRKS

SEQ ID NO: 5445 - protein, 1379 aa, Artificial Sequence
  SARS-CoV-2/Guangdong/GD2020087-P0008/2020__EPI_ISL_413863 spike protein (1-1211)(A972C_R995C) Ferritin construct
MFVFLVLLPLVSSQCVNLTTRTQLPPAYTNSFTRGVYYPDKVFRSSVLHSTQDLFLPFFSNVTWFHAIHVSGTNGTKRFDNPVLPFNDGVYFASTEKSNIIRGWIFGTTLDSKTQSLLIVNNATNVVIKVCEFQFCNDPFLGVYYHKNNKSWMESEFRVYSSANNCTFEYVSQPFLMDLEGKQGNFKNLREFVFKNIDGYFKIYSKHTPINLVRDLPQGFSALEPLVDLPIGINITRFQTLLALHRSYLTPGDSSSGWTAGAAAYYVGYLQPRTFLLKYNENGTITDAVDCALDPLSETKCTLKSFTVEKGIYQTSNFRVQPTESIVRFPNITNLCPFGEVFNATRFASVYAWNRKRISNCVADYSVLYNSASFSTFKCYGVSPTKLNDLCFTNVYADSFVIRGDEVREIAPGQTGKIADYNYKLPDDFTGCVIAWNSNNLDSKVGGNYNYLYRLFRKSNLKPFERDISTEIYQAGSTPCNGVEGFNCYFPLQSYGFQPTNGVGYQPYRVVVLSFELLHAPATVCGPKKSTNLVKNKCVNFNFNGLTGTGVLTESNKKFLPFQQFGRDIADTTDAVRDPQTLEILDITPCSFGGVSVITPGTNTSNQVAVLYQDVNCTEVPVAIHADQLTPTWRVYSTGSNVFQTRAGCLIGAEHVNNSYECDIPIGAGICASYQTQTNSPRRARSVASQSIIAYTMSLGAENSVAYSNNSIAIPTNFTISVTTEILPVSMTKTSVDCTMYICGDSTECSNLLLQYGSFCTQLNRALTGIAVEQDKNTQEVFAQVKQIYKTPPIKDFGGFNFSQILPDPSKPSKRSFIEDLLFNKVTLADAGFIKQYGDCLGDIAARDLICAQKFNGLTVLPPLLTDEMIAQYTSALLAGTITSGWTFGAGAALQIPFAMQMAYRFNGIGVTQNVLYENQKLIANQFNSAIGKIQDSLSSTASALGKLQDVVNQNAQALNTLVKQLSSNFGCISSVLNDILSRLDKVEAEVQIDCLITGRLQSLQTYVTQQLIRAAEIRASANLAATKMSECVLGQSKRVDFCGKGYHLMSFPQSAPHGVVFLHVTYVPAQEKNFTTAPAICHDGKAHFPREGVFVSNGTHWFVTQRNFYEPQIITTDNTFVSGNCDVVIGIVNNTVYDPLQPELDSFKEELDKYFKNHTSPDVDLGDISGINASVVNIQKEIDRLNEVAKNLNESLIDLQELGKYEQYIKGGGGSDIIKLLNEQVNKEMQSSNLYMSMSSWCYTHSLDGAGLFLFDHAAEEYEHAKKLIIFLNENNVPVQLTSISAPEHKFEGLTQIFQKAYEHEQHISESINNIVDHAIKSKDHATFNFLQWYVAEQHEEEVLFKDILDKIELIGNENHGLYLADQYVKGIAKSRKS

SEQ ID NO: 5446 - protein, 1379 aa, Artificial Sequence
  SARS-CoV-2/Sweden/01/2020__EPI_ISL_411951 spike protein (1-1211)(A972C_R995C) Ferritin construct
MFVFLVLLPLVSSQCVNLTTRTQLPPAYTNSFTRGVYYPDKVFRSSVLHSTQDLFLPFFSNVTWFHAIHVSGTNGTKRFDNPVLPFNDGVYFASTEKSNIIRGWIFGTTLDSKTQSLLIVNNATNVVIKVCEFQFCNDPFLGVYYHKNNKSWMESEFRVYSSANNCTFEYVSQPFLMDLEGKQGNFKNLREFVFKNIDGYFKIYSKHTPINLVRDLPQGFSALEPLVDLPIGINITRFQTLLALHRSYLTPGDSSSGWTAGAAAYYVGYLQPRTFLLKYNENGTITDAVDCALDPLSETKCTLKSFTVEKGIYQTSNFRVQPTESIVRFPNITNLCPFGEVFNATRFASVYAWNRKRISNCVADYSVLYNSASFSTFKCYGVSPTKLNDLCFTNVYADSFVIRGDEVRQIAPGQTGKIADYNYKLPDDFTGCVIAWNSNNLDSKVGGNYNYLYRLFRKSNLKPFERDISTEIYQAGSTPCNGVEGFNCYFPLQSYGFQPTNGVGYQPYRVVVLSFELLHAPATVCGPKKSTNLVKNKCVNFNFNGLTGTGVLTESNKKFLPFQQFGRDIADTTDAVRDPQTLEILDITPCSFGGVSVITPGTNTSNQVAVLYQDVNCTEVPVAIHADQLTPTWRVYSTGSNVFQTRAGCLIGAEHVNNSYECDIPIGAGICASYQTQTNSPRRARSVASQSIIAYTMSLGAENSVAYSNNSIAIPTNFTISVTTEILPVSMTKTSVDCTMYICGDSTECSNLLLQYGSFCTQLNRALTGIAVEQDKNTQEVFAQVKQIYKTPPIKDCGGFNFSQILPDPSKPSKRSFIEDLLFNKVTLADAGFIKQYGDCLGDIAARDLICAQKFNGLTVLPPLLTDEMIAQYTSALLAGTITSGWTFGAGAALQIPFAMQMAYRFNGIGVTQNVLYENQKLIANQFNSAIGKIQDSLSSTASALGKLQDVVNQNAQALNTLVKQLSSNFGCISSVLNDILSRLDKVEAEVQIDCLITGRLQSLQTYVTQQLIRAAEIRASANLAATKMSECVLGQSKRVDFCGKGYHLMSFPQSAPHGVVFLHVTYVPAQEKNFTTAPAICHDGKAHFPREGVFVSNGTHWFVTQRNFYEPQIITTDNTFVSGNCDVVIGIVNNTVYDPLQPELDSFKEELDKYFKNHTSPDVDLGDISGINASVVNIQKEIDRLNEVAKNLNESLIDLQELGKYEQYIKGGGGSDIIKLLNEQVNKEMQSSNLYMSMSSWCYTHSLDGAGLFLFDHAAEEYEHAKKLIIFLNENNVPVQLTSISAPEHKFEGLTQIFQKAYEHEQHISESINNIVDHAIKSKDHATFNFLQWYVAEQHEEEVLFKDILDKIELIGNENHGLYLADQYVKGIAKSRKS

SEQ ID NO: 5447 - protein, 1379 aa, Artificial Sequence
  SARS-CoV-2/Tianmen/HBCDC-HB-07/2020__EPI_ISL_412983 spike protein (1-1211)(A972C_R995C) Ferritin construct
MFVFLVLLPLVSSQCVNLTTRTQLPPAYTNSFTRGVYYPDKVFRSSVLHSTQDLFLPFFSNVTWFHAIHVSGTNGTKRFDNPVLPFNDGVYFASTEKSNIIRGWIFGTTLDSKTQSLLIVNNATNVVIKVCEFQFCNDPFLGVYYHKNNKSWMESEFRVYSSANNCTFEYVSQPFLMDLEGKQGNFKNLREFVFKNIDGYFKIYSKHTPINLVRDLPQGFSALEPLVDLPIGINITRFQTLLALHRSYLTPGDSSSGWTAGAAAYYVGYLQPRTFLLKYNENGTITDAVDCALDPLSETKCTLKSFTVEKGIYQTSNFRVQPTESIVRFPNITNLCPFGEVFNATRFASVYAWNRKRISNCVADYSVLYNSASFSTFKCYGVSPTKLNDLCFTNVYADSFVIRGDEVRQIAPGQTGKIADYNYKLPDDFTGCVIAWNSNNLDSKVGGNYNYLYRLFRKSNLKPFERDISTEIYQAGSTPCNGVEGFNCYFPLQSYGFQPTNGVGYQPYRVVVLSFELLHAPATVCGPKKSTNLVKNKCVNFNFNGLTGTGVLTESNKKFLPFQQFGRDIADTTDAVRDPQTLEILDITPCSFGGVSVITPGTNTSNQVAVLYQDLNCTEVPVAIHADQLTPTWRVYSTGSNVFQTRAGCLIGAEHVNNSYECDIPIGAGICASYQTQTNSPRRARSVASQSIIAYTMSLGAENSVAYSNNSIAIPTNFTISVTTEILPVSMTKTSVDCTMYICGDSTECSNLLLQYGSFCTQLNRALTGIAVEQDKNTQEVFAQVKQIYKTPPIKDFGGFNFSQILPDPSKPSKRSFIEDLLFNKVTLADAGFIKQYGDCLGDIAARDLICAQKFNGLTVLPPLLTDEMIAQYTSALLAGTITSGWTFGAGAALQIPFAMQMAYRFNGIGVTQNVLYENQKLIANQFNSAIGKIQDSLSSTASALGKLQDVVNQNAQALNTLVKQLSSNFGCISSVLNDILSRLDKVEAEVQIDCLITGRLQSLQTYVTQQLIRAAEIRASANLAATKMSECVLGQSKRVDFCGKGYHLMSFPQSAPHGVVFLHVTYVPAQEKNFTTAPAICHDGKAHFPREGVFVSNGTHWFVTQRNFYEPQIITTDNTFVSGNCDVVIGIVNNTVYDPLQPELDSFKEELDKYFKNHTSPDVDLGDISGINASVVNIQKEIDRLNEVAKNLNESLIDLQELGKYEQYIKGGGGSDIIKLLNEQVNKEMQSSNLYMSMSSWCYTHSLDGAGLFLFDHAAEEYEHAKKLIIFLNENNVPVQLTSISAPEHKFEGLTQIFQKAYEHEQHISESINNIVDHAIKSKDHATFNFLQWYVAEQHEEEVLFKDILDKIELIGNENHGLYLADQYVKGIAKSRKS

SEQ ID NO: 5448 - protein, 1379 aa, Artificial Sequence
  SARS-CoV-2/Hong Kong/case42_VM20002493/2020__EPI_ISL_414527 spike protein (1-1211)(A972C_R995C) Ferritin construct
MFVFLVLLPLVSSQCVNLTTRTQLPPAYTNSFTRGVYYPDKVFRSSVLHSTQDLFLPFFSNVTWFHAIHVSGTNGTKRFDNPVLPFNDGVYFASTEKSNIIRGWIFGTTLDSKTQSLLIVNNATNVVIKVCEFQFCNDPFLGVYYHKNNKSWMESEFRVYSSANNCTFEYVSQPFLMDLEGKQGNFKNLREFVFKNIDGYFKIYSKHTPINLVRDLPQGFSALEPLVDLPIGINITRFQTLLALHRSYLTPGDSSSGWTAGAAAYYVGYLQPRTFLLKYNENGTITDAVDCALDPLSETKCTLKSFTVEKGIYQTSNFRVQPTESIVRFPNITNLCPFGEVFNATRFASVYAWNRKRISNCVADYSVLYNSASFSTFKCYGVSPTKLNDLCFTNVYADSFVIRGDEVRQIAPGQTGKIADYNYKLPDDFTGCVIAWNSNNLDSKVGGNYNYLYRLFRKSNLKPFERDISTEIYQAGSTPCNGVEGFNCYFPLQSYGFQPTNGVGYQPYRVVVLSFELLHAPATVCGPKKSTNLVKNKCVNFNFNGLTGTGVLTESNKKFLPFQQFGRDIADTTDAVRDPQTLEILDITPCSFGGVSVITPGTNTSNQVAVLYQDVNCTEVPVAIHADQLTPTWRVYSTGSNVFQTRAGCLIGAEHVNNSYECDIPIGAGICASYQTQTNSPRRARSVASQSIIAYTMSLGAENSVAYSNNSIAIPTNFAISVTTEILPVSMTKTSVDCTMYICGDSTECSNLLLQYGSFCTQLNRALTGIAVEQDKNTQEVFAQVKQIYKTPPIKDFGGFNFSQILPDPSKPSKRSFIEDLLFNKVTLADAGFIKQYGDCLGDIAARDLICAQKFNGLTVLPPLLTDEMIAQYTSALLAGTITSGWTFGAGAALQIPFAMQMAYRFNGIGVTQNVLYENQKLIANQFNSAIGKIQDSLSSTASALGKLQDVVNQNAQALNTLVKQLSSNFGCISSVLNDILSRLDKVEAEVQIDCLITGRLQSLQTYVTQQLIRAAEIRASANLAATKMSECVLGQSKRVDFCGKGYHLMSFPQSAPHGVVFLHVTYVPAQEKNFTTAPAICHDGKAHFPREGVFVSNGTHWFVTQRNFYEPQIITTDNTFVSGNCDVVIGIVNNTVYDPLQPELDSFKEELDKYFKNHTSPDVDLGDISGINASVVNIQKEIDRLNEVAKNLNESLIDLQELGKYEQYIKGGGGSDIIKLLNEQVNKEMQSSNLYMSMSSWCYTHSLDGAGLFLFDHAAEEYEHAKKLIIFLNENNVPVQLTSISAPEHKFEGLTQIFQKAYEHEQHISESINNIVDHAIKSKDHATFNFLQWYVAEQHEEEVLFKDILDKIELIGNENHGLYLADQYVKGIAKSRKS

SEQ ID NO: 5449 - protein, 1379 aa, Artificial Sequence
  SARS-CoV-2/USA/CruiseA-23/2020__EPI_ISL_414482 spike protein (1-1211)(A972C_R995C) Ferritin construct
MFVFLVLLPLVSSQCVNLTTRTQLPPAYTNSFTRGVYYPDKVFRSSVLHSTQDLFLPFFSNVTWFHAIHVSGTNGTKRFDNPVLPFNDGVYFASTEKSNIIRGWIFGTTLDSKTQSLLIVNNATNVVIKVCEFQFCNDPFLGVYYHKNNKSWMESEFRVYSSANNCTFEYVSQPFLMDLEVKQGNFKNLREFVFKNIDGYFKIYSKHTPINLVRDLPQGFSALEPLVDLPIGINITRFQTLLALHRSYLTPGDSSSGWTAGAAAYYVGYLQPRTFLLKYNENGTITDAVDCALDPLSETKCTLKSFTVEKGIYQTSNFRVQPTESIVRFPNITNLCPFGEVFNATRFASVYAWNRKRISNCVADYSVLYNSASFSTFKCYGVSPTKLNDLCFTNVYADSFVIRGDEVRQIAPGQTGKIADYNYKLPDDFTGCVIAWNSNNLDSKVGGNYNYLYRLFRKSNLKPFERDISTEIYQAGSTPCNGVEGFNCYFPLQSYGFQPTNGVGYQPYRVVVLSFELLHAPATVCGPKKSTNLVKNKCVNFNFNGLTGTGVLTESNKKFLPFQQFGRDIADTTDAVRDPQTLEILDITPCSFGGVSVITPGTNTSNQVAVLYQDVNCTEVPVAIHADQLTPTWRVYSTGSNVFQTRAGCLIGAEHVNNSYECDIPIGAGICASYQTQTNSPRRARSVASQSIIAYTMSLGAENSVAYSNNSIAIPTNFTISVTTEILPVSMTKTSVDCTMYICGDSTECSNLLLQYGSFCTQLNRALTGIAVEQDKNTQEVFAQVKQIYKTPPIKDFGGFNFSQILPDPSKPSKRSFIEDLLFNKVTLADAGFIKQYGDCLGDIAARDLICAQKFNGLTVLPPLLTDEMIAQYTSALLAGTITSGWTFGAGAALQIPFAMQMAYRFNGIGVTQNVLYENQKLIANQFNSAIGKIQDSLSSTASALGKLQDVVNQNAQALNTLVKQLSSNFGCISSVLNDILSRLDKVEAEVQIDCLITGRLQSLQTYVTQQLIRAAEIRASANLAATKMSECVLGQSKRVDFCGKGYHLMSFPQSAPHGVVFLHVTYVPAQEKNFTTAPAICHDGKAHFPREGVFVSNGTHWFVTQRNFYEPQIITTDNTFVSGNCDVVIGIVNNTVYDPLQPELDSFKEELDKYFKNHTSPDVDLGDISGINASVVNIQKEIDRLNEVAKNLNESLIDLQELGKYEQYIKGGGGSDIIKLLNEQVNKEMQSSNLYMSMSSWCYTHSLDGAGLFLFDHAAEEYEHAKKLIIFLNENNVPVQLTSISAPEHKFEGLTQIFQKAYEHEQHISESINNIVDHAIKSKDHATFNFLQWYVAEQHEEEVLFKDILDKIELIGNENHGLYLADQYVKGIAKSRKS

SEQ ID NO: 5450 - protein, 1379 aa, Artificial Sequence
  SARS-CoV-2/Hong Kong/case85_VM20002868/2020__EPI_ISL_414519 spike protein (1-1211)(A972C_R995C) Ferritin construct
MFVFLVLVPLVSSQCVNLTTRTQLPPAYTNSFTRGVYYPDKVFRSSVLHSTQDLFLPFFSNVTWFHAIHVSGTNGTKRFDNPVLPFNDGVYFASTEKSNIIRGWIFGTTLDSKTQSLLIVNNATNVVIKVCEFQFCNDPFLGVYYHKNNKSWMESEFRVYSSANNCTFEYVSQPFLMDLEGKQGNFKNLREFVFKNIDGYFKIYSKHTPINLVRDLPQGFSALEPLVDLPIGINITRFQTLLALHRSYLTPGDSSSGWTAGAAAYYVGYLQPRTFLLKYNENGTITDAVDCALDPLSETKCTLKSFTVEKGIYQTSNFRVQPTESIVRFPNITNLCPFGEVFNATRFASVYAWNRKRISNCVADYSVLYNSASFSTFKCYGVSPTKLNDLCFTNVYADSFVIRGDEVRQIAPGQTGKIADYNYKLPDDFTGCVIAWNSNNLDSKVGGNYNYLYRLFRKSNLKPFERDISTEIYQAGSTPCNGVEGFNCYFPLQSYGFQPTNGVGYQPYRVVVLSFELLHAPATVCGPKKSTNLVKNKCVNFNFNGLTGTGVLTESNKKFLPFQQFGRDIADTTDAVRDPQTLEILDITPCSFGGVSVITPGTNTSNQVAVLYQDVNCTEVPVAIHADQLTPTWRVYSTGSNVFQTRAGCLIGAEHVNNSYECDIPIGAGICASYQTQTNSPRRARSVASQSIIAYTMSLGAENSVAYSNNSIAIPTNFTISVTTEILPVSMTKTSVDCTMYICGDSTECSNLLLQYGSFCTQLNRALTGIAVEQDKNTQEVFAQVKQIYKTPPIKDFGGFNFSQILPDPSKPSKRSFIEDLLFNKVTLADAGFIKQYGDCLGDIAARDLICAQKFNGLTVLPPLLTDEMIAQYTSALLAGTITSGWTFGAGAALQIPFAMQMAYRFNGIGVTQNVLYENQKLIANQFNSAIGKIQDSLSSTASALGKLQDVVNQNAQALNTLVKQLSSNFGCISSVLNDILSRLDKVEAEVQIDCLITGRLQSLQTYVTQQLIRAAEIRASANLAATKMSECVLGQSKRVDFCGKGYHLMSFPQSAPHGVVFLHVTYVPAQEKNFTTAPAICHDGKAHFPREGVFVSNGTHWFVTQRNFYEPQIITTDNTFVSGNCDVVIGIVNNTVYDPLQPELDSFKEELDKYFKNHTSPDVDLGDISGINASVVNIQKEIDRLNEVAKNLNESLIDLQELGKYEQYIKGGGGSDIIKLLNEQVNKEMQSSNLYMSMSSWCYTHSLDGAGLFLFDHAAEEYEHAKKLIIFLNENNVPVQLTSISAPEHKFEGLTQIFQKAYEHEQHISESINNIVDHAIKSKDHATFNFLQWYVAEQHEEEVLFKDILDKIELIGNENHGLYLADQYVKGIAKSRKS

SEQ ID NO: 5451 - protein, 1379 aa, Artificial Sequence; identical to SEQ ID NO: 5441
  SARS-CoV-2/England/200990660/2020__EPI_ISL_414523 spike protein (1-1211)(A972C_R995C) Ferritin construct

SEQ ID NO: 5452 - protein, 1379 aa, Artificial Sequence
  SARS-CoV-2/Australia/NSW09/2020__EPI_ISL_413595 spike protein (1-1211)(A972C_R995C) Ferritin construct
MFVFLVLLPLVSSQCVNLTTRTQLPPAYTNSFTRGVYYPDKVFRSSVLHSTQDLFLPFFSNVTWFHAIHVSGTNGTKRFDNPVLPFNDGVYFASTEKSNIIRGWIFGTTLDSKTQSLLIVNNATNVVIKVCEFQFCNDPFLGVYYHKNNKSWMESEFRVYSSANNCTFEYVSQPFLMDLEGKQGNFKNLREFVFKNIDGYFKIYSKHTPINLVRDLPQGFSALEPLVDLPIGINITRFQTLLALHRSYLTPGDSSSGWTAGAAAYYVGYLQPRTFLLKYNENGTITDAVDCALDPLSETKCTLKSFTVEKGIYQTSNFRVQPTESIVRFPNITNLCPFGEVFNATRFASVYAWNRKRISNCVADYSVLYNSASFSTFKCYGVSPTKLNDLCFTNVYADSFVIRGDEVRQIAPGQTGKIADYNYKLPDDFTGCVIAWNSNNLDSKVGGNYNYLYRLFRKSNLKPFERDISTEIYQAGSTPCNGVEGFNCYFPLQSYGFQPTNGVGYQPYRVVVLSFELLHAPATVCGPKKSTNLVKNKCVNFNFNGLTGTGVLTESNKKFLPFQQFGRDIADTTDAVRDPQTLEILDITPCSFGGVSVITPGTNTSNQVAVLYQDVNCTEVPVAIHADQLTPTWRVYSTGSNVFQTRAGCLIGAEHVNNSYECDIPIGAGICASYQTQTNSPRRARSVASQSIIAYTMSLGAENSVAYSNNSIAIPTNFTISVTTEILPVSMTKTSVDCTMYICGDSTECSNLLLQYGSFCTQLNRALTGIAVEQDKNTQEVFAQVKQIYKTPPIKDFGGFNFSQILPDPSKPSKRSFIEDLLFNKVTLADAGFIKQYGDCLGDIAARDLICAQKFNGLTVLPPLLTDEMIAQYTSALLAGTITSGWTFGAGAALQIPFAMQMAYRFNGIGVTQNVLYENQKLIANQFNSAIGKIQDSLSFTASALGKLQDVVNQNAQALNTLVKQLSSNFGCISSVLNDILSRLDKVEAEVQIDCLITGRLQSLQTYVTQQLIRAAEIRASANLAATKMSECVLGQSKRVDFCGKGYHLMSFPQSAPHGVVFLHVTYVPAQEKNFTTAPAICHDGKAHFPREGVFVSNGTHWFVTQRNFYEPQIITTDNTFVSGNCDVVIGIVNNTVYDPLQPELDSFKEELDKYFKNHTSPDVDLGDISGINASVVNIQKEIDRLNEVAKNLNESLIDLQELGKYEQYIKGGGGSDIIKLLNEQVNKEMQSSNLYMSMSSWCYTHSLDGAGLFLFDHAAEEYEHAKKLIIFLNENNVPVQLTSISAPEHKFEGLTQIFQKAYEHEQHISESINNIVDHAIKSKDHATFNFLQWYVAEQHEEEVLFKDILDKIELIGNENHGLYLADQYVKGIAKSRKS

SEQ ID NO: 5453 - protein, 1379 aa, Artificial Sequence; identical to SEQ ID NO: 5433
  SARS-CoV-2/Australia/NSW10/2020__EPI_ISL_413596 spike protein (1-1211)(A972C_R995C) Ferritin construct

SEQ ID NO: 5454 - protein, 1379 aa, Artificial Sequence
  SARS-CoV-2/Switzerland/1000477797/2020__EPI_ISL_413023 spike protein (1-1211)(A972C_R995C) Ferritin construct
MFVFLVLLPLVSSQCVNLTTRTQLPPAYTNSFTRGVYYPDKVFRSSVLHSTQDLFLPFFSNVTWFHAIHVSGTNGTKRFDNPVLPFNDGVYFASTEKSNIIRGWIFGTTLDSKTQSLLIVNNATNVVIKVCEFQFCNDPFLGVYYHKNNKSWMESEFRVYSSANNCTFEYVSQPFLMDLEGKQGNFKNLREFVFKNIDGYFNIYSKHTPINLVRDLPQGFSALEPLVDLPIGINITRFQTLLALHRSYLTPGDSSSGWTAGAAAYYVGYLQPRTFLLKYNENGTITDAVDCALDPLSETKCTLKSFTVEKGIYQTSNFRVQPTESIVRFPNITNLCPFGEVFNATRFASVYAWNRKRISNCVADYSVLYNSASFSTFKCYGVSPTKLNDLCFTNVYADSFVIRGDEVRQIAPGQTGKIADYNYKLPDDFTGCVIAWNSNNLDSKVGGNYNYLYRLFRKSNLKPFERDISTEIYQAGSTPCNGVEGFNCYFPLQSYGFQPTNGVGYQPYRVVVLSFELLHAPATVCGPKKSTNLVKNKCVNFNFNGLTGTGVLTESNKKFLPFQQFGRDIADTTDAVRDPQTLEILDITPCSFGGVSVITPGTNTSNQVAVLYQGVNCTEVPVAIHADQLTPTWRVYSTGSNVFQTRAGCLIGAEHVNNSYECDIPIGAGICASYQTQTNSPRRARSVASQSIIAYTMSLGAENSVAYSNNSIAIPTNFTISVTTEILPVSMTKTSVDCTMYICGDSTECSNLLLQYGSFCTQLNRALTGIAVEQDKNTQEVFAQVKQIYKTPPIKDFGGFNFSQILPDPSKPSKRSFIEDLLFNKVTLADAGFIKQYGDCLGDIAARDLICAQKFNGLTVLPPLLTDEMIAQYTSALLAGTITSGWTFGAGAALQIPFAMQMAYRFNGIGVTQNVLYENQKLIANQFNSAIGKIQDSLSSTASALGKLQDVVNQNAQALNTLVKQLSSNFGCISSVLNDILSRLDKVEAEVQIDCLITGRLQSLQTYVTQQLIRAAEIRASANLAATKMSECVLGQSKRVDFCGKGYHLMSFPQSAPHGVVFLHVTYVPAQEKNFTTAPAICHDGKAHFPREGVFVSNGTHWFVTQRNFYEPQIITTDNTFVSGNCDVVIGIVNNTVYDPLQPELDSFKEELDKYFKNHTSPDVDLGDISGINASVVNIQKEIDRLNEVAKNLNESLIDLQELGKYEQYIKGGGGSDIIKLLNEQVNKEMQSSNLYMSMSSWCYTHSLDGAGLFLFDHAAEEYEHAKKLIIFLNENNVPVQLTSISAPEHKFEGLTQIFQKAYEHEQHISESINNIVDHAIKSKDHATFNFLQWYVAEQHEEEVLFKDILDKIELIGNENHGLYLADQYVKGIAKSRKS

SEQ ID NO: 5455 - protein, 1379 aa, Artificial Sequence
  SARS-CoV-2/Belgium/BA-02291/2020__EPI_ISL_415159 spike protein (1-1211)(A972C_R995C) Ferritin construct
MFVFLVLLPLVSSQCVNLTTRTQLPPAYTNSFTRGVYYPDKVFRSSVLHSTQDLFLPFFSNVTWFHAIHVSGTNGTKRFDNPVLPFNDGVYFASTEKSNIIRGWIFGTTLDSKTQSLLIVNNATNVVIKVCEFQFCNDPFLGVYYHKNNKSWMESEFRVYSSANNCTFEYVSQPFLMDLEGKQGNFKNLREFVFKNIDGYFKIYSKHTPINLVRDLPQGFSALEPLVDLPIGINITRFQTLLALHRSYLTPGDSSSGWTAGAAAYYVGYLQPRTFLLKYNENGTITDAVDCALDPLSETKCTLKSFTVEKGIYQTSNFRVQPTESIVRFPNITNLCPFGEVFNATRFASVYAWNRKRISNCVADYSVLYNSASFSTFKCYGVSPTKLNDLCFTNVYADSFVIRGDEVRQIAPGQTGKIADYNYKLPDDFTGCVIAWNSNNLDSKVGGNYNYLYRLFRRSNLKPFERDISTEIYQAGSTPCNGVEGFNCYFPLQSYGFQPTNGVGYQPYRVVVLSFELLPAPATVCGPKKSTNLVKNKCVNFNFNGLTGTGVLTESNKKFLPFQQFGRDIADTTDAVRDPQTLEILDITPCSFGGVSVITPGTNTSNQVAVLYQGVNCTEVPVAIHADQLTPTWRVYSTGSNVFQTRAGCLIGAEHVNNSYECDIPIGAGICASYQTQTNSPRRARSVASQSIIAYTMSLGAENSVAYSNNSIAIPTNFTISVTTEILPVSMTKTSVDCTMYICGDSTECSNLLLQYGSFCTQLNRALTGIAVEQDKNTQEVFAQVKQIYKTPPIKDFGGFNFSQILPDPSKPSKRSFIEDLLFNKVTLADAGFIKQYGDCLGDIAARDLICAQKFNGLTVLPPLLTDEMIAQYTSALLAGTITSGWTFGAGAALQIPFAMQMAYRFNGIGVTQNVLYENQKLIANQFNSAIGKIQDSLSSAAPALGKLQDVVNQNAQALNTLVKQLSSNFGCISSVLNDILSRLDKVEAEVQIDCLITGRLQSLQTYVTQQLIRAAEIRASANLAATKMSECVLGQSKRVDFCGKGYHLMSFPQSAPHGVVFLHVTYVPAQEKNFTTAPAICHDGKAHFPREGVFVSNGTHWFVTQRNFYEPQIITTDNTFVSGNCDVVIGIVNNTVYDPLQPELDSFKEELDKYFKNHTSPDVDLGDISGINASVVNIQKEIDRLNEVAKNLNESLIDLQELGKYEQYIKGGGGSDIIKLLNEQVNKEMQSSNLYMSMSSWCYTHSLDGAGLFLFDHAAEEYEHAKKLIIFLNENNVPVQLTSISAPEHKFEGLTQIFQKAYEHEQHISESINNIVDHAIKSKDHATFNFLQWYVAEQHEEEVLFKDILDKIELIGNENHGLYLADQYVKGIAKSRKS

SEQ ID NO: 5456 - protein, 1379 aa, Artificial Sequence
  SARS-CoV-2/USA/WA8-UW5/2020__EPI_ISL_413486 spike protein (1-1211)(A972C_R995C) Ferritin construct
MFVFLVLLPLVSSQCVNLTTRTQLPPAYTNSFTRGVYYPDKVFRSSVLHSTQDLFLPFFSNVTWFHAIHVSGTNGTKRFDNPVLPFNDGVYFASTEKSNIIRGWIFGTTLDSKTQSLLIVNNATNVVIKVCEFQFCNDPFLGVYYHKNNKSWMESEFRVYSSANNCTFEYVSQPFLMDLEGKQGNFKNLREFVFKNIDGYFKIYSKHTPINLVRDLPQGFSALEPLVDLPIGINITRFQTLLALHRSYLTPGDSSSGWTAGAAAYYVGYLQPRTFLLKYNENGTITDAVDCALDPLSETKCTLKSFTVEKGIYQTSNFRVQPTESIVRFPNITNLCPFGEVFNATRFASVYAWNRKRISNCVADYSVLYNSASFSTFKCYGVSPTKLNDLCFTNVYADSFVIRGDEVRQIAPGQTGKIADYNYKLPDDFTGCVIAWNSNNLDSKVGGNYNYLYRLFRKSNLKPFERDISTEIYQAGSTPCNGVEGFNCYFPLQSYGFQPTNGVGYQPYRVVVLSFELLHAPATVCGPKKSTNLVKNKCVNFNFNGLTGTGVLTESNKKFLPFQQFGRDIADTTDAVRDPQTLEILDITPCSFGGVSVITPGTNTSNQVAVLYQDVNCTEVPVAIHADQLTPTWRVYSTGSNVFQTRAGCLIGAEYVNNSYECDIPIGAGICASYQTQTNSPRRARSVASQSIIAYTMSLGAENSVAYSNNSIAIPTNFTISVTTEILPVSMTKTSVDCTMYICGDSTECSNLLLQYGSFCTQLNRALTGIAVEQDKNTQEVFAQVKQIYKTPPIKDFGGFNFSQILPDPSKPSKRSFIEDLLFNKVTLADAGFIKQYGDCLGDIAARDLICAQKFNGLTVLPPLLTDEMIAQYTSALLAGTITSGWTFGAGAALQIPFAMQMAYRFNGIGVTQNVLYENQKLIANQFNSAIGKIQDSLSSTASALGKLQDVVNQNAQALNTLVKQLSSNFGCISSVLNDILSRLDKVEAEVQIDCLITGRLQSLQTYVTQQLIRAAEIRASANLAATKMSECVLGQSKRVDFCGKGYHLMSFPQSAPHGVVFLHVTYVPAQEKNFTTAPAICHDGKAHFPREGVFVSNGTHWFVTQRNFYEPQIITTDNTFVSGNCDVVIGIVNNTVYDPLQPELDSFKEELDKYFKNHTSPDVDLGDISGINASVVNIQKEIDRLNEVAKNLNESLIDLQELGKYEQYIKGGGGSDIIKLLNEQVNKEMQSSNLYMSMSSWCYTHSLDGAGLFLFDHAAEEYEHAKKLIIFLNENNVPVQLTSISAPEHKFEGLTQIFQKAYEHEQHISESINNIVDHAIKSKDHATFNFLQWYVAEQHEEEVLFKDILDKIELIGNENHGLYLADQYVKGIAKSRKS

SEQ ID NO: 5457 - protein, 1379 aa, Artificial Sequence
  SARS-CoV-2/England/20102000506/2020__EPI_ISL_415147 spike protein (1-1211)(A972C_R995C) Ferritin construct
MFVFLVLLPLVSSQCVNLTTRTQLPPAYTNSFTRGVYYPDKVFRSSVLHSTQDLFLPFFSNVTWFHAIHVSGTNGTKRFDNPVLPFNDGVYFASTEKSNIIRGWIFGTTLDSKTQSLLIVNNATNVVIKVCEFQFCNDPFLGVYYHKNNKSWMESEFRVYSSANNCTFEYVSQPFLMDLEGKQGNFKNLREFVFKNIDGYFKIYSKHTPINLVRDLPQGFSALEPLVDLPIGINITRFQTLLALHRSYLTPGDSSSGWTAGAAAYYVGYLQPRTFLLKYNENGTITDAVDCALDPLSETKCTLKSFTVEKGIYQTSNFRVQPTESIVRFPNITNLCPFGEVFNATRFASVYAWNRKRISNCVADYSVLYNSASFSTFKCYGVSPTKLNDLCFTNVYADSFVIRGDEVRQIAPGQTGKIADYNYKLPDDFTGCVIAWNSNNLDSKVGGNYNYLYRLFRKSNLKPFERDISTEIYQAGSTPCNGVEGFNCYFPLQSYGFQPTNGVGYQPYRVVVLSFELLHAPATVCGPKKSTNLVKNKCVNFNFNGLTGTGVLTESNKKFLPFQQFGRDIADTTDAVRDPQTLEILDITPCSFGGVSVITPGTNTSNQVAVLYQGVNCTEVPVAIHADQLTPTWRVYSTGSNVFQTRAGCLIGAEHVNNSYECDIPIGAGICASYQTQTNSPRRARSVASQSIIAYTMSLGAENSVAYSNNSIAIPTNFTISVTTEILPVSMTKTSVDCTMYICGDSTECSNLLLQYGSFCTQLNRALTGIAVEQDKNTQEVFAQVKQIYKTPPIKDFGGFNFSQILPDPSKPSKRSFIEDLLFNKVTLADAGFIKQYGYCLGDIAARDLICAQKFNGLTVLPPLLTDEMIAQYTSALLAGTITSGWTFGAGAALQIPFAMQMAYRFNGIGVTQNVLYENQKLIANQFNSAIGKIQDSLSSTASALGKLQDVVNQNAQALNTLVKQLSSNFGCISSVLNDILSRLDKVEAEVQIDCLITGRLQSLQTYVTQQLIRAAEIRASANLAATKMSECVLGQSKRVDFCGKGYHLMSFPQSAPHGVVFLHVTYVPAQEKNFTTAPAICHDGKAHFPREGVFVSNGTHWFVTQRNFYEPQIITTDNTFVSGNCDVVIGIVNNTVYDPLQPELDSFKEELDKYFKNHTSPDVDLGDISGINASVVNIQKEIDRLNEVAKNLNESLIDLQELGKYEQYIKGGGGSDIIKLLNEQVNKEMQSSNLYMSMSSWCYTHSLDGAGLFLFDHAAEEYEHAKKLIIFLNENNVPVQLTSISAPEHKFEGLTQIFQKAYEHEQHISESINNIVDHAIKSKDHATFNFLQWYVAEQHEEEVLFKDILDKIELIGNENHGLYLADQYVKGIAKSRKS

SEQ ID NO: 5458 - protein, 1379 aa, Artificial Sequence
  SARS-CoV-2/Belgium/VAG-03013/2020__EPI_ISL_415155 spike protein (1-1211)(A972C_R995C) Ferritin construct
MFVFLVLLPLVSSQCVNLTTRTQLPPAYTNSFTRGVYYPDKVFRSSVLHSTQDLFLPFFSNVTWFHAIHVSGTNGTKRFDNPVLPFNDGVYFASTEKSNIIRGWIFGTTLDSKTQSLLIVNNATNVVIKVCEFQFCNDPFLGVYYHKNNKSWMESEFRVYSSANNCTFEYVSQPFLMDLEGKQGNFKNLREFVFKNIDGYFKIYSKHTPINLVRDLPQGFSALEPLVDLPIGINITRFQTLLALHRSYLTPGDSSSGWTAGAAAYYVGYLQPRTFLLKYNENGTITDAVDCALDPLSETKCTLKSFTVEKGIYQTSNFRVQPTESIVRFPNITNLCPFGEVFNATRFASVYAWNRKRISNCVADYSVLYNSASFSTFKCYGVSPTKLNDLCFTNVYADSFVIRGDEVRQIAPGQTGKIADYNYKLPDDFTGCVIAWNSNNLDSKVGGNYNYLYRLFRKSNLKPFERDISTEIYQAGSTPCNGVEGFNCYFPLQSYGFQPTNGVGYQPYRVVVLSFELLHAPATVCGPKKSTNLVKNKCVNFNFNGLTGTGVLTESNKKFLPFQQFGRDIADTTDAVRDPQTLEILDITPCSFGGVSVITPGTNTSNQVAVLYQGVNCTEVPVAIHADQLTPTWRVYSTGSNVFQTRAGCLIGAEHVNNSYECDIPIGAGICASYQTQTNSPRRARSVASQSIIAYTMSLGAENSVAYSNNSIAIPTNFTISVTTEILPVSMTKTSVDCTMYICGDSTECSNLLLQYGSFCTQLNRALTGIAVEQDKNTQEVFAQVKQIYKTPPIKDFGGFNFSQILPDPSKPSKRSFIEDLLFNKVTLADAGFIKQYGDCLGDIAARDLICAQKFNGLTVLPPLLTDEMIAQYTSALLAGTITSGWTFGAGAALQIPFAMQMAYRFNGIGVTQNVLYENQKLIANQFNSAIGKIQDSLSSTATALGKLQDVVNQNAQALNTLVKQLSSNFGCISSVLNDILSRLDKVEAEVQIDCLITGRLQSLQTYVTQQLIRAAEIRASANLAATKMSECVLGQSKRVDFCGKGYHLMSFPQSAPHGVVFLHVTYVPAQEKNFTTAPAICHDGKAHFPREGVFVSNGTHWFVTQRNFYEPQIITTDNTFVSGNCDVVIGIVNNTVYDPLQPELDSFKEELDKYFKNHTSPDVDLGDISGINASVVNIQKEIDRLNEVAKNLNESLIDLQELGKYEQYIKGGGGSDIIKLLNEQVNKEMQSSNLYMSMSSWCYTHSLDGAGLFLFDHAAEEYEHAKKLIIFLNENNVPVQLTSISAPEHKFEGLTQIFQKAYEHEQHISESINNIVDHAIKSKDHATFNFLQWYVAEQHEEEVLFKDILDKIELIGNENHGLYLADQYVKGIAKSRKS

SEQ ID NO: 5459 - protein, 1379 aa, Artificial Sequence
  SARS-CoV-2/Belgium/BC-03016/2020__EPI_ISL_415157 spike protein (1-1211)(A972C_R995C) Ferritin construct
MFVFLVLLPLVSSQCVNLTTRTQLPPAYTNSFTRGVYYPDKVFRSSVLHSTQDLFLPFFSNVTWFHAIHVSGTNGTKRFDNPVLPFNDGVYFASTEKSNIIRGWIFGTTLDSKTQSLLIVNNATNVVIKVCEFQFCNDPFLGVYYHKNNKSWMESEFRVYSSANNCTFEYVSQPFLMDLEGKQGNFKNLREFVFKNIDGYFKIYSKHTPINLVRDLPQGFSALEPLVDLPIGINITRFQTLLALHRSYLTPGDSSSGWTAGAAAYYVGYLQPRTFLLKYNENGTITDAVDCALDPLSETKCTLKSFTVEKGIYQTSNFRVQPTESIVRFPNITNLCPFGEVFNATRFASVYAWNRKRISNCVADYSVLYNSASFSTFKCYGVSPTKLNDLCFTNVYADSFVIRGDEVRQIAPGQTGKIADYNYKLPDDFTGCVIAWNSNNLDSKVGGNYNYLYRLFRKSNLKPFERDISTEIYQAGSTPCNGVEGFNCYFPLQSYGFQPTNGVGYQPYRVVVLSFELLHAPATVCGPKKSTNLVKNKCVNFNFNGLTGTGVLTESNKKFLPFQQFGRDIADTTDAVRDPQTLEILDITPCSFGGVSVITPGTNTSNQVAVLYQGVNCTEVPVAIHADQLTPTWRVYSTGSNVFQTRAGCLIGAEHVNNSYECDIPIGAGICASYQTQTNSPRRARSVASQSIIAYTMSLGAENSVAYSNNSIAIPTNFTISVTTEILPVSMTKTSVDCTMYICGDSTECSNLLLQYGSFCTQLNRALTGIAVEQDKNTQEVFAQVKQIYKTPPIKDFGGFNFSQILPDPSKPSKRSFIEDLLFNKVTLADAGFIKQYGDCLGDIAARDLICAQKFNGLTVLPPLLTDEMIAQYTSALLAGTITSGWTFGAGAALQIPFAMQMAYRFNGIGVTQNVLYENQKLIANQFNSAIGKIQDSLSSTAPALGKLQDVVNQNAQALNTLVKQLSSNFGCISSVLNDILSRLDKVEAEVQIDCLITGRLQSLQTYVTQQLIRAAEIRASANLAATKMSECVLGQSKRVDFCGKGYHLMSFPQSAPHGVVFLHVTYVPAQEKNFTTAPAICHDGKAHFPREGVFVSNGTHWFVTQRNFYEPQIITTDNTFVSGNCDVVIGIVNNTVYDPLQPELDSFKEELDKYFKNHTSPDVDLGDISGINASVVNIQKEIDRLNEVAKNLNESLIDLQELGKYEQYIKGGGGSDIIKLLNEQVNKEMQSSNLYMSMSSWCYTHSLDGAGLFLFDHAAEEYEHAKKLIIFLNENNVPVQLTSISAPEHKFEGLTQIFQKAYEHEQHISESINNIVDHAIKSKDHATFNFLQWYVAEQHEEEVLFKDILDKIELIGNENHGLYLADQYVKGIAKSRKS

SEQ ID NO: 5460 - protein, 1379 aa, Artificial Sequence
  SARS-CoV-2/Germany/BavPat3/2020__EPI_ISL_414521 spike protein (1-1211)(A972C_R995C) Ferritin construct
MFVFLVLLPLVSSQCVNLTTRTQLPPAYTNSFTRGVYYPDKVFRSSVLHSTQDLFLPFFSNVTWFHAIHVSGTNGTKRFDNPVLPFNDGVYFASTEKSNIIRGWIFGTTLDSKTQSLLIVNNATNVVIKVCEFQFCNDPFLGVYYHKNNKSWMESEFRVYSSANNCTFEYVSQPFLMDLEGKQGNFKNLREFVFKNIDGYFKIYSKHTPINLVRDLPQGFSALEPLVDLPIGINITRFQTLLALHRSYLTPGDSSSGWTAGAAAYYVGYLQPRTFLLKYNENGTITDAVDCALDPLSETKCTLKSFTVEKGIYQTSNFRVQPTESIVRFPNITNLCPFGEVFNATRFASVYAWNRKRISNCVADYSVLYNSASFSTFKCYGVSPTKLNDLCFTNVYADSFVIRGDEVRQIAPGQTGKIADYNYKLPDDFTGCVIAWNSNNLDSKVGGNYNYLYRLFRKSNLKPFERDISTEIYQAGSTPCNGVEGFNCYFPLQSYGFQPTNGVGYQPYRVVVLSFELLHAPATVCGPKKSTNLVKNKCVNFNFNGLTGTGVLTESNKKFLPFQQFGRDIADTTDAVRDPQTLEILDITPCSFGGVSVITPGTNTSNQVAVLYQDVNCTEVPVAIHADQLTPTWRVYSTGSNVFQTRAGCLIGAEHVNNSYECDIPIGAGICASYQTQTNSPRRARSVASQSIIAYTMSLGAENSVAYSNNSIAIPTNFTISVTTEILPVSMTKTSVDCTMYICGDSTECSNLLLQYGSFCTQLNRALTGIAVEQDKNTQQVFAQVKQIYKTPPIKDFGGFNFSQILPDPSKPSKRSFIEDLLFNKVTLADAGFIKQYGDCLGDIAARDLICAQKFNGLTVLPPLLTDEMIAQYTSALLAGTITSGWTFGAGAALQIPFAMQMAYRFNGIGVTQNVLYENQKLIANQFNSAIGKIQDSLSSTASALGKLQDVVNQNAQALNTLVKQLSSNFGCISSVLNDILSRLDKVEAEVQIDCLITGRLQSLQTYVTQQLIRAAEIRASANLAATKMSECVLGQSKRVDFCGKGYHLMSFPQSAPHGVVFLHVTYVPAQEKNFTTAPAICHDGKAHFPREGVFVSNGTHWFVTQRNFYEPQIITTDNTFVSGNCDVVIGIVNNTVYDPLQPELDSFKEELDKYFKNHTSPDVDLGDISGINASVVNIQKEIDRLNEVAKNLNESLIDLQELGKYEQYIKGGGGSDIIKLLNEQVNKEMQSSNLYMSMSSWCYTHSLDGAGLFLFDHAAEEYEHAKKLIIFLNENNVPVQLTSISAPEHKFEGLTQIFQKAYEHEQHISESINNIVDHAIKSKDHATFNFLQWYVAEQHEEEVLFKDILDKIELIGNENHGLYLADQYVKGIAKSRKS

SEQ ID NO: 5461 - protein, 1379 aa, Artificial Sequence
  SARS-CoV-2/France/HF1805/2020__EPI_ISL_414628 spike protein (1-1211)(A972C_R995C) Ferritin construct
MFVFLVLLPLVSSQCVNLTTRTQLPPAYTNSFTRGVYYPDKVFRSSVLHSTQDLFLPFFSNVTWFHAIHVSGTNGTKRFDNPVLPFNDGVYFASTEKSNIIRGWIFGTTLDSKTQSLLIVNNATNVVIKVCEFQFCNDPFLGVYYHKNNKSWMESEFRVYSSANNCTFEYVSQPFLMDLEGKQGNFKNLREFVFKNIDGYFKIYSKHTPINLVRDLPQGFSALEPLVDLPIGINITRFQTLLALHRSYLTPGDSSSGWTAGAAAYYVGYLQPRTFLLKYNENGTITDAVDCALDPLSETKCTLKSFTVEKGIYQTSNFRVQPTESIVRFPNITNLCPFGEVFNATRFASVYAWNRKRISNCVADYSVLYNSASFSTFKCYGVSPTKLNDLCFTNVYADSFVIRGDEVRQIAPGQTGKIADYNYKLPDDFTGCVIAWNSNNLDSKVGGNYNYLYRLFRKSNLKPFERDISTEIYQAGSTPCNGVEGFNCYFPLQSYGFQPTNGVGYQPYRVVVLSFELLHAPATVCGPKKSTNLVKNKCVNFNFNGLTGTGVLTESNKKFLPFQQFGRDIADTTDAVRDPQTLEILDITPCSFGGVSVITPGTNTSNQVAVLYQGVNCTEVPVAIHADQLTPTWRVYSTGSNVFQTRAGCLIGAEHVNNSYECDIPIGAGICASYQTQTNSPRRARSVASQSIIAYTMSLGAENSVAYSNNSIAIPTNFTISVTTEILPVSMTKTSVDCTMYICGDSTECSNLLLQYGSFCTQLNRALTGIAVEQDKNTQEVFAQVKQIYKTPPIKDFGGFNFSQILPDPSKPSKRSFIEDLLFNKVTLADAGFIKQYGDCLGDIAARDLICAQKFNGLTVLPPLLTDEMIAQYTSALLAGTITSGWTFGAGAALQIPFAMQMAYRFNGIGVTQNVLYENQKLIANQFNSAIGKIQDSLSSTASALGKLQDVVNQNAQALNTLVKQLSSNFGCISSVLNDILSRLDKVEAEVQIDCLITGRLQSLQTYVTQQLIRAAEIRASANLAATKMSECVLGQSKRVDFCGKGYHLMSFPQSAPHGVVFLHVTYVPAQEKNFTTAPAICHDGKAHFPREGVFVSNGTHWFVTQRNFYEPQIITTDNTFVSGNCDVVIGVVNNTVYDPLQPELDSFKEELDKYFKNHTSPDVDLGDISGINASVVNIQKEIDRLNEVAKNLNESLIDLQELGKYEQYIKGGGGSDIIKLLNEQVNKEMQSSNLYMSMSSWCYTHSLDGAGLFLFDHAAEEYEHAKKLIIFLNENNVPVQLTSISAPEHKFEGLTQIFQKAYEHEQHISESINNIVDHAIKSKDHATFNFLQWYVAEQHEEEVLFKDILDKIELIGNENHGLYLADQYVKGIAKSRKS

SEQ ID NO: 5462 - protein, 1379 aa, Artificial Sequence
  SARS-CoV-2/Netherlands/ZuidHolland_9/2020__EPI_ISL_414445 spike protein (1-1211)(A972C_R995C) Ferritin construct
MFVFLVLLPLVSSQCVNLTTRTQLPPAYTNSFTRGVYYPDKVFRSSVLHSTQDLFLPFFSNVTWFHAIHVSGTNGTKRFDNPVLPFNDGVYFASTEKSNIIRGWIFGTTLDSKTQSLLIVNNATNVVIKVCEFQFCNDPFLGVYYHKNNKSWMESEFRVYSSANNCTFEYVSQPFLMDLEGKQGNFKNLREFVFKNIDGYFKIYSKHTPINLVRDLPQGFSALEPLVDLPIGINITRFQTLLALHRSYLTPGDSSSGWTAGAAAYYVGYLQPRTFLLKYNENGTITDAVDCALDPLSETKCTLKSFTVEKGIYQTSNFRVQPTESIVRFPNITNLCPFGEVFNATRFASVYAWNRKRISNCVADYSVLYNSASFSTFKCYGVSPTKLNDLCFTNVYADSFVIRGDEVRQIAPGQTGKIADYNYKLPDDFTGCVIAWNSNNLDSKVGGNYNYLYRLFRKSNLKPFERDISTEIYQAGSTPCNGVEGFNCYFPLQSYGFQPTNGVGYQPYRVVVLSFELLHAPATVCGPKKSTNLVKNKCVNFNFNGLTGTGVLTESNKKFLPFQQFGRDIADTTDAVRDPQTLEILDITPCSFGGVSVITPGTNTSNQVAVLYQGVNCTEVPVAIHADQLTPTWRVYSTGSNVFQTRAGCLIGAEHVNNSYECDIPIGAGICASYQTQTNSPRRARSVASQSIIAYTMSLGAENSVAYSNNSIAIPTNFTISVTTEILPVSMTKTSVDCTMYICGDSTECSNLLLQYGSFCTQLNRALTGIAVEQDKNTQEVFAQVKQIYKTPPIKDFGGFNFSQILPDPSKPSKRSFIEDLLFNKVTLADAGFIKQYGDCLGDIAARDLICVQKFNGLTVLPPLLTDEMIAQYTSALLAGTITSGWTFGAGAALQIPFAMQMAYRFNGIGVTQNVLYENQKLIANQFNSAIGKIQDSLSSTASALGKLQDVVNQNAQALNTLVKQLSSNFGCISSVLNDILSRLDKVEAEVQIDCLITGRLQSLQTYVTQQLIRAAEIRASANLAATKMSECVLGQSKRVDFCGKGYHLMSFPQSAPHGVVFLHVTYVPAQEKNFTTAPAICHDGKAHFPREGVFVSNGTHWFVTQRNFYEPQIITTDNTFVSGNCDVVIGIVNNTVYDPLQPELDSFKEELDKYFKNHTSPDVDLGDISGINASVVNIQKEIDRLNEVAKNLNESLIDLQELGKYEQYIKGGGGSDIIKLLNEQVNKEMQSSNLYMSMSSWCYTHSLDGAGLFLFDHAAEEYEHAKKLIIFLNENNVPVQLTSISAPEHKFEGLTQIFQKAYEHEQHISESINNIVDHAIKSKDHATFNFLQWYVAEQHEEEVLFKDILDKIELIGNENHGLYLADQYVKGIAKSRKS

SEQ ID NO: 5463 - protein, 1379 aa, Artificial Sequence
  SARS-CoV-2/Finland/FIN03032020A/2020__EPI_ISL_413602 spike protein (1-1211)(A972C_R995C) Ferritin construct
MFVFLVLLPLVSSQCVNLTTRTQLPPAYTNSFTRGVYYPDKVFRSSVLHSTQDLFLPFFSNVTWFHAIHVSGTNGTKRFDNPVLPFNDGVYFASTEKSNIIRGWIFGTTLDSKTQSLLIVNNATNVVIKVCEFQFCNDPFLGVYYHKNNKSWMESEFRVYSSANNCTFEYVSQPFLMDLEGKQGNFKNLREFVFKNIDGYFKIYSKHTPINLVRDLPQGFSALEPLVDLPIGINITRFQTLLALHRSYLTPGDSSSGWTAGAAAYYVGYLQPRTFLLKYNENGTITDAVDCALDPLSETKCTLKSFTVEKGIYQTSNFRVQPTESIVRFPNITNLCPFGEVFNATRFASVYAWNRKRISNCVADYSVLYNSASFSTFKCYGVSPTKLNDLCFTNVYADSFVIRGDEVRQIAPGQTGKIADYNYKLPDDFTGCVISWNSNNLDSKVGGNYNYLYRLFRKSNLKPFERDISTEIYQAGSTPCNGVEGFNCYFPLQSYGFQPTNGVGYQPYRVVVLSFELLHAPATVCGPKKSTNLVKNKCVNFNFNGLTGTGVLTESNKKFLPFQQFGRDIADTTDAVRDPQTLEILDITPCSFGGVSVITPGTNTSNQVAVLYQGVNCTEVPVAIHADQLTPTWRVYSTGSNVFQTRAGCLIGAEHVNNSYECDIPIGAGICASYQTQTNSPRRARSVASQSIIAYTMSLGAENSVAYSNNSIAIPTNFTISVTTEILPVSMTKTSVDCTMYICGDSTECSNLLLQYGSFCTQLNRALTGIAVEQDKNTQEVFAQVKQIYKTPPIKDFGGFNFSQILPDPSKPSKRSFIEDLLFNKVTLADAGFIKQYGDCLGDIAARDLICAQKFNGLTVLPPLLTDEMIAQYTSALLAGTITSGWTFGAGAALQIPFAMQMAYRFNGIGVTQNVLYENQKLIANQFNSAIGKIQDSLSSTASALGKLQDVVNQNAQALNTLVKQLSSNFGCISSVLNDILSRLDKVEAEVQIDCLITGRLQSLQTYVTQQLIRAAEIRASANLAATKMSECVLGQSKRVDFCGKGYHLMSFPQSAPHGVVFLHVTYVPAQEKNFTTAPAICHDGKAHFPREGVFVSNGTHWFVTQRNFYEPQIITTDNTFVSGNCDVVIGIVNNTVYDPLQPELDSFKEELDKYFKNHTSPDVDLGDISGINASVVNIQKEIDRLNEVAKNLNESLIDLQELGKYEQYIKGGGGSDIIKLLNEQVNKEMQSSNLYMSMSSWCYTHSLDGAGLFLFDHAAEEYEHAKKLIIFLNENNVPVQLTSISAPEHKFEGLTQIFQKAYEHEQHISESINNIVDHAIKSKDHATFNFLQWYVAEQHEEEVLFKDILDKIELIGNENHGLYLADQYVKGIAKSRKS

SEQ ID NO: 5464 - protein, 1379 aa, Artificial Sequence
  SARS-CoV-2/France/GE1977/2020__EPI_ISL_414632 spike protein (1-1211)(A972C_R995C) Ferritin construct
MFVFLVLLPLVSSQCVNLTTRTQLPPAYTNSFTRGVYYPDKVFRSSVLHSTQDLFLPFFSNVTWFHAIHVSGTNGTKRFDNPVLPFNDGVYFASTEKSNIIRGWIFGTTLDSKTQSLLIVNNATNVVIKVCEFQFCNDPFLGVYYHKNNKSWMESEFRVYSSANNCTFEYVSQPFLMDLEGKQGNFKNLREFVFKNIDGYFKIYSKHTPINLVRDLPQGFSALEPLVDLPIGINITRFQTLLALHRSYLTPGDSSSGWTAGAAAYYVGYLQPRTFLLKYNENGTITDAVDCALDPLSETKCTLKSFTVEKGIYQTSNFRVQPTESIVRFPNITNLCPFGEVFNATRFASVYAWNRKRISNCVADYSVLYNSASFSTFKCYGVSPTKLNDLCFTNVYADSFVIRGDEVRQIAPGQTGKIADYNYKLPDDFTGCVIAWNSNNLDSKVGGNYNYLYRLFRKSNLKPFERDISTEIYQAGSTPCNGVEGFNCYFPLQSYGFQPTNGVGYQPYRVVVLSFELLHAPATVCGPKKSTNLVKNKCVNFNFNGLTGTGVLTESNKKFLPFQQFGRDIADTTDAVRDPQTLEILDITPCSFGGVSVITPGTNTSNQVAVLYQGVNCTEVPVAIHADQLTPTWRVYSTGSNVFQTRAGCLIGAEHVNNSYECDIPIGAGICASYQTQTNSPRRARSVASQSIIAYTMSLGAENSVAYSNNSIAIPTNFTISVTTEILPVSMTKTSVDCTMYICGDSTECSNLLLQYGSFCTQLNRALTGIAVEQDKNTQEVFAQVKQIYKTPPIKDFGGFNFSQILPDPSKPSKRSFIEDLLFNKVTLADAGFIKQYGDCLGDIAARDLICAQKFNGLTVLPPLLTDEMIAQYTSALLAGTITSGWTFGAGAALQIPFAMQMAYRFNGIGVTQNVLYENQKLIANQFNSAIGKIQDSLFSTASALGKLQDVVNQNAQALNTLVKQLSSNFGCISSVLNDILSRLDKVEAEVQIDCLITGRLQSLQTYVTQQLIRAAEIRASANLAATKMSECVLGQSKRVDFCGKGYHLMSFPQSAPHGVVFLHVTYVPAQEKNFTTAPAICHDGKAHFPREGVFVSNGTHWFVTQRNFYEPQIITTDNTFVSGNCDVVIGIVNNTVYDPLQPELDSFKEELDKYFKNHTSPDVDLGDISGINASVVNIQKEIDRLNEVAKNLNESLIDLQELGKYEQYIKGGGGSDIIKLLNEQVNKEMQSSNLYMSMSSWCYTHSLDGAGLFLFDHAAEEYEHAKKLIIFLNENNVPVQLTSISAPEHKFEGLTQIFQKAYEHEQHISESINNIVDHAIKSKDHATFNFLQWYVAEQHEEEVLFKDILDKIELIGNENHGLYLADQYVKGIAKSRKS

SEQ ID NO: 5465 - protein, 1379 aa, Artificial Sequence
  SARS-CoV-2/Finland/FIN-313/2020__EPI_ISL_414641 spike protein (1-1211)(A972C_R995C) Ferritin construct
MFVFLVLLPLVSSQCVNLTTRTQLPPAYTNSFTRGVYYPDKVFRSSVLHSTQDLFLPFFSNVTWFHAIHVSGTNGTKRFDNPVLPFNDGVYFASTEKSNIIRGWIFGTTLDSKTQSLLIVNNATNVVIKVCEFQFCNDPFLGVYYHKNNKSWMESEFRVYSSANNCTFEYVSQPFLMDLEGKQGNFKNLREFVFKNIDGYFKIYSKHTPINLVRDLPQGFSALEPLVDLPIGINITRFKTLLALHRSYLTPGDSSSGWTAGAAAYYVGYLQPRTFLLKYNENGTITDAVDCALDPLSETKCTLKSFTVEKGIYQTSNFRVQPTESIVRFPNITNLCPFGEVFNATRFASVYAWNRKRISNCVADYSVLYNSASFSTFKCYGVSPTKLNDLCFTNVYADSFVIRGDEVRQIAPGQTGKIADYNYKLPDDFTGCVIAWNSNNLDSKVGGNYNYLYRLFRKSNLKPFERDISTEIYQAGSTPCNGVEGFNCYFPLQSYGFQPTNGVGYQPYRVVVLSFELLHAPATVCGPKKSTNLVKNKCVNFNFNGLTGTGVLTESNKKFLPFQQFGRDIADTTDAVRDPQTLEILDITPCSFGGVSVITPGTNTSNQVAVLYQGVNCTEVPVAIHADQLTPTWRVYSTGSNVFQTRAGCLIGAEHVNNSYECDIPIGAGICASYQTQTNSPRRARSVASQSIIAYTMSLGAENSVAYSNNSIAIPTNFTISVTTEILPVSMTKTSVDCTMYICGDSTECSNLLLQYGSFCTQLNRALTGIAVEQDKNTQEVFAQVKQIYKTPPIKDFGGFNFSQILPDPSKPSKRSFIEDLLFNKVTLADAGFIKQYGDCLGDIAARDLICAQKFNGLTVLPPLLTDEMIAQYTSALLAGTITSGWTFGAGAALQIPFAMQMAYRFNGIGVTQNVLYENQKLIANQFNSAIGKIQDSLSSTASALGKLQDVVNQNAQALNTLVKQLSSNFGCISSVLNDILSRLDKVEAEVQIDCLITGRLQSLQTYVTQQLIRAAEIRASANLAATKMSECVLGQSKRVDFCGKGYHLMSFPQSAPHGVVFLHVTYVPAQEKNFTTAPAICHDGKAHFPREGVFVSNGTHWFVTQRNFYEPQIITTDNTFVSGNCDVVIGIVNNTVYDPLQPELDSFKEELDKYFKNHTSPDVDLGDISGINASVVNIQKEIDRLNEVAKNLNESLIDLQELGKYEQYIKGGGGSDIIKLLNEQVNKEMQSSNLYMSMSSWCYTHSLDGAGLFLFDHAAEEYEHAKKLIIFLNENNVPVQLTSISAPEHKFEGLTQIFQKAYEHEQHISESINNIVDHAIKSKDHATFNFLQWYVAEQHEEEVLFKDILDKIELIGNENHGLYLADQYVKGIAKSRKS

SEQ ID NO: 5466 - protein, 1379 aa, Artificial Sequence
  SARS-CoV-2/Netherlands/ZuidHolland_2/2020__EPI_ISL_414556 spike protein (1-1211)(A972C_R995C) Ferritin construct
MFVFLVLLPLVSSQCVNLTTRTQLPPAYTNSFTRGVYYPDKVFRSSVLHSTQDLFLPFFSNVTWFHAIHVSGTNGTKRFDNPVLPFNDGVYFASTEKSNIIRGWIFGTTLDSKTQSLLIVNNATNVVIKVCEFQFCNDPFLGVYYHKNNKSWMESEFRVYSSANNCTFEYVSQPFLMDLEGKQGNFKNLREFVFKNIDGYFKIYSKHTPINLVRDLPQGFSALEPLVDLPIGINITRFQTLLALHRSYLTPGDSSSGWTAGAAAYYVGYLQPRTFLLKYNENGTITDAVDCALDPLSETKCTLKSFTVEKGIYQTSNFRVQPTESIVRFPNITNLCPFGEVFNATRFASVYAWNRKRISNCVADYSVLYNSASFSTFKCYGVSPTKLNDLCFTNVYADSFVIRGDEVRQIAPGQTGKIADYNYKLPDDFTGCVIAWNSNNLDSKVGGNYNYLYRLFRKSNLKPFERDISTEIYQAGSTPCNGVEGFNCYFPLQSYGFQPTNGVGYQPYRVVVLSFELLHAPATVCGPKKSTNLVKNKCVNFNFNGLTGTGVLTESNKKFLPFQQFGRDIADTTDAVRDPQTLEILDITPCSFGGVSVITPGTNTSNQVAVLYQGVNCTEVPVAIHADQLTPTWRVYSTGSNVFQTRAGCLIGAEHVNNSYECDIPIGAGICASYQTQTNSPRRARSVASQSIIAYTMSLGAENSVAYSNNSIAIPTNFTISVTTEILPVSMTKTSVDCTMYICGDSTECSNLLLQYGSFCTQLNRALTGIALEQDKNTQEVFAQVKQIYKTPPIKDFGGFNFSQILPDPSKPSKRSFIEDLLFNKVTLADAGFIKQYGDCLGDIAARDLICAQKFNGLTVLPPLLTDEMIAQYTSALLAGTITSGWTFGAGAALQIPFAMQMAYRFNGIGVTQNVLYENQKLIANQFNSAIGKIQDSLSSTASALGKLQDVVNQNAQALNTLVKQLSSNFGCISSVLNDILSRLDKVEAEVQIDCLITGRLQSLQTYVTQQLIRAAEIRASANLAATKMSECVLGQSKRVDFCGKGYHLMSFPQSAPHGVVFLHVTYVPAQEKNFTTAPAICHDGKAHFPREGVFVSNGTHWFVTQRNFYEPQIITTDNTFVSGNCDVVIGIVNNTVYDPLQPELDSFKEELDKYFKNHTSPDVDLGDISGINASVVNIQKEIDRLNEVAKNLNESLIDLQELGKYEQYIKGGGGSDIIKLLNEQVNKEMQSSNLYMSMSSWCYTHSLDGAGLFLFDHAAEEYEHAKKLIIFLNENNVPVQLTSISAPEHKFEGLTQIFQKAYEHEQHISESINNIVDHAIKSKDHATFNFLQWYVAEQHEEEVLFKDILDKIELIGNENHGLYLADQYVKGIAKSRKS

SEQ ID NO: 5467 - protein, 1379 aa, Artificial Sequence
  SARS-CoV-2/USA/WA-UW31/2020__EPI_ISL_414618 spike protein (1-1211)(A972C_R995C) Ferritin construct
MFVFLVLLPLVSSQCVNLTTRTQLPPAYTNSFTRGVYYPDKVFRSSVLHSTQDLFLPFFSNVTWFHAIHVSGTNGTKRFDNPVLPFNDGVYFASTEKSNIIRGWIFGTTLDSKTQSLLIVNNATNVVIKVCEFQFCNDPFLGVYYHKNNKSWMESEFRVYSSANNCTFEYVSQPFLMDLEGKQGNFKNLREFVFKNIDGYFKIYSKHTPINLVRDLPQGFSALEPLVDLPIGINITRFQTLLALHRSYLTPGDSSSGWTAGAAAYYVGYLQPRTFLLKYNENGTITDAVDCALDPLSETKCTLKSFTVEKGIYQTSNFRVQPTESIVRFPNITNLCPFGEVFNATRFASVYAWNRKRISNCVADYSVLYNSASFSTFKCYGVSPTKLNDLCFTNVYADSFVIRGDEVRQIAPGQTGKIADYNYKLPDDFTGCVIAWNSNNLDSKVGGNYNYLYRLFRKSNLKPFERDISTEIYQAGSTPCNGAEGFNCYFPLQSYGFQPTNGVGYQPYRVVVLSFELLHAPATVCGPKKSTNLVKNKCVNFNFNGLTGTGVLTESNKKFLPFQQFGRDIADTTDAVRDPQTLEILDITPCSFGGVSVITPGTNTSNQVAVLYQDVNCTEVPVAIHADQLTPTWRVYSTGSNVFQTRAGCLIGAEHVNNSYECDIPIGAGICASYQTQTNSPRRARSVASQSIIAYTMSLGAENSVAYSNNSIAIPTNFTISVTTEILPVSMTKTSVDCTMYICGDSTECSNLLLQYGSFCTQLNRALTGIAVEQDKNTQEVFAQVKQIYKTPPIKDFGGFNFSQILPDPSKPSKRSFIEDLLFNKVTLADAGFIKQYGDCLGDIAARDLICAQKFNGLTVLPPLLTDEMIAQYTSALLAGTITSGWTFGAGAALQIPFAMQMAYRFNGIGVTQNVLYENQKLIANQFNSAIGKIQDSLSSTASALGKLQDVVNQNAQALNTLVKQLSSNFGCISSVLNDILSRLDKVEAEVQIDCLITGRLQSLQTYVTQQLIRAAEIRASANLAATKMSECVLGQSKRVDFCGKGYHLMSFPQSAPHGVVFLHVTYVPAQEKNFTTAPAICHDGKAHFPREGVFVSNGTHWFVTQRNFYEPQIITTDNTFVSGNCDVVIGIVNNTVYDPLQPELDSFKEELDKYFKNHTSPDVDLGDISGINASVVNIQKEIDRLNEVAKNLNESLIDLQELGKYEQYIKGGGGSDIIKLLNEQVNKEMQSSNLYMSMSSWCYTHSLDGAGLFLFDHAAEEYEHAKKLIIFLNENNVPVQLTSISAPEHKFEGLTQIFQKAYEHEQHISESINNIVDHAIKSKDHATFNFLQWYVAEQHEEEVLFKDILDKIELIGNENHGLYLADQYVKGIAKSRKS

SEQ ID NO: 5468 - protein, 1379 aa, Artificial Sequence
  SARS-CoV-2/South Korea/SNU01/2020__EPI_ISL_411929 spike protein (1-1211)(A972C_R995C) Ferritin construct
MFVFLVLLPLVSSQCVNLTTRTQLPPAYTNSFTRGVYYPDKVFRSSVLHSTQDLFLPFFSNVTWFHAIHVSGTNGTKRFDNPVLPFNDGVYFASTEKSNIIRGWIFGTTLDSKTQSLLIVNNATNVVIKVCEFQFCNDPFLGVYYHKNNKSWMESEFRVYSSANNCTFEYVSQPFLMDLEGKQGNFKNLREFVFKNIDGYFKIYSKHTPINLVRDLPQGFWALEPLVDLPIGINITRFQTLLALHRSYLTPGDSSSGWTAGAAAYYVGYLQPRTFLLKYNENGTITDAVDCALDPLSETKCTLKSFTVEKGIYQTSNFRVQPTESIVRFPNITNLCPFGEVFNATRFASVYAWNRKRISNCVADYSVLYNSASFSTFKCYGVSPTKLNDLCFTNVYADSFVIRGDEVRQIAPGQTGKIADYNYKLPDDFTGCVIAWNSNNLDSKVGGNYNYLYRLFRKSNLKPFERDISTEIYQAGSTPCNGVEGFNCYFPLQSYGFQPTNGVGYQPYRVVVLSFELLHAPATVCGPKKSTNLVKNKCVNFNFNGLTGTGVLTESNKKFLPFQQFGRDIADTTDAVRDPQTLEILDITPCSFGGVSVITPGTNTSNQVAVLYQDVNCTEVPVAIHADQLTPTWRVYSTGSNVFQTRAGCLIGAEHVNNSYECDIPIGAGICASYQTQTNSPRRARSVASQSIIAYTMSLGAENSVAYSNNSIAIPTNFTISVTTEILPVSMTKTSVDCTMYICGDSTECSNLLLQYGSFCTQLNRALTGIAVEQDKNTQEVFAQVKQIYKTPPIKDFGGFNFSQILPDPSKPSKRSFIEDLLFNKVTLADAGFIKQYGDCLGDIAARDLICAQKFNGLTVLPPLLTDEMIAQYTSALLAGTITSGWTFGAGAALQIPFAMQMAYRFNGIGVTQNVLYENQKLIANQFNSAIGKIQDSLSSTASALGKLQDVVNQNAQALNTLVKQLSSNFGCISSVLNDILSRLDKVEAEVQIDCLITGRLQSLQTYVTQQLIRAAEIRASANLAATKMSECVLGQSKRVDFCGKGYHLMSFPQSAPHGVVFLHVTYVPAQEKNFTTAPAICHDGKAHFPREGVFVSNGTHWFVTQRNFYEPQIITTDNTFVSGNCDVVIGIVNNTVYDPLQPELDSFKEELDKYFKNHTSPDVDLGDISGINASVVNIQKEIDRLNEVAKNLNESLIDLQELGKYEQYIKGGGGSDIIKLLNEQVNKEMQSSNLYMSMSSWCYTHSLDGAGLFLFDHAAEEYEHAKKLIIFLNENNVPVQLTSISAPEHKFEGLTQIFQKAYEHEQHISESINNIVDHAIKSKDHATFNFLQWYVAEQHEEEVLFKDILDKIELIGNENHGLYLADQYVKGIAKSRKS

SEQ ID NO: 5469 - protein, 1379 aa, Artificial Sequence
  SARS-CoV-2/China/WF0004/2020__EPI_ISL_413694 spike protein (1-1211)(A972C_R995C) Ferritin construct
MFVFLVLLPLVSSQCVNLTTRTQLPPAYTNSFTRGVYYPDKVFRSSVLHSTQDLFLPFFSNVTWFHAIHVSGTNGTKRFDNPVLPFNDGVYFASTEKSNIIRGWIFGTTLDSKTQSLLIVNNATNVVIKVCEFQFCNDPFLGVYYHKNNKSWTESEFRVYSSANNCTFEYVSQPFLMDLEGKQGNFKNLREFVFKNIDGYFKIYSKHTPINLVRDLPQGFSALEPLVDLPIGINITRFQTLLALHRSYLTPGDSSSGWTAGAAAYYVGYLQPRTFLLKYNENGTITDAVDCALDPLSETKCTLKSFTVEKGIYQTSNFRVQPTESIVRFPNITNLCPFGEVFNATRFASVYAWNRKRISNCVADYSVLYNSASFSTFKCYGVSPTKLNDLCFTNVYADSFVIRGDEVRQIAPGQTGKIADYNYKLPDDFTGCVIAWNSNNLDSKVGGNYNYLYRLFRKSNLKPFERDISTEIYQAGSTPCNGVEGFNCYFPLQSYGFQPTNGVGYQPYRVVVLSFELLHAPATVCGPKKSTNLVKNKCVNFNFNGLTGTGVLTESNKKFLPFQQFGRDIADTTDAVRDPQTLEILDITPCSFGGVSVITPGTNTSNQVAVLYQDVNCTEVPVAIHADQLTPTWRVYSTGSNVFQTRAGCLIGAEHVNNSYECDIPIGAGICASYQTQTNSPRRARSVASQSIIAYTMSLGAENSVAYSNNSIAIPTNFTISVTTEILPVSMTKTSVDCTMYICGDSTECSNLLLQYGSFCTQLNRALTGIAVEQDKNTQEVFAQVKQIYKTPPIKDFGGFNFSQILPDPSKPSKRSFIEDLLFNKVTLADAGFIKQYGDCLGDIAARDLICAQKFNGLTVLPPLLTDEMIAQYTSALLAGTITSGWTFGAGAALQIPFAMQMAYRFNGIGVTQNVLYENQKLIANQFNSAIGKIQDSLSSTASALGKLQDVVNQNAQALNTLVKQLSSNFGCISSVLNDILSRLDKVEAEVQIDCLITGRLQSLQTYVTQQLIRAAEIRASANLAATKMSECVLGQSKRFDFCGKGYHLMSFPQSAPHGVVFLHVTYVPAQEKNFTTAPAICHDGKAHFPREGVFVSNGTHWFVTQRNFYEPQIITTDNTFVSGNCDVVIGIVNNTVYDPLQPELDSFKEELDKYFKNHTSPDVDLGDISGINASVVNIQKEIDRLNEVAKNLNESLIDLQELGKYEQYIKGGGGSDIIKLLNEQVNKEMQSSNLYMSMSSWCYTHSLDGAGLFLFDHAAEEYEHAKKLIIFLNENNVPVQLTSISAPEHKFEGLTQIFQKAYEHEQHISESINNIVDHAIKSKDHATFNFLQWYVAEQHEEEVLFKDILDKIELIGNENHGLYLADQYVKGIAKSRKS

SEQ ID NO: 5470 - protein, 1379 aa, Artificial Sequence
  SARS-CoV-2/China/WF0028/2020__EPI_ISL_413791 spike protein (1-1211)(A972C_R995C) Ferritin construct
MFVFLVLLPLVSSQCVNLTTRTQLPPAYTNSFTRGVYYPDKVFRSSVLHSTQDLFLPFFSNVTWFHAIHVSGTNGTKRFDNPVLPFNDGVYFASTEKSNIIRGWIFGTTLDSKTQSLLIVNNATNVVIKVCEFQFCNDPFLGVYYHKNNKSWMESEFRVYSSANNCTFEYVSQPFLMDLEGKQGNFKNLREFVFKNIDGYFKIYSKHTPINLVRDLPQGFSALEPLVDLPIGINITRFQTLLALHRSYLTPGDSSSGWTAGAAAYYVGYLQPRTFLLKYNENGTITDAVDCALDPLSETKCTLKSFTVEKGIYQTSNFRVQPTESIVRFPNITNLCPFGEVFNATRFASVYAWNRKRISNCVADYSVLYNSASFSTFKCYGVSPTKLNDLCFTNVYADSFVIRGDEVRQIAPGQTGKIADYNYKLPDDFTGCVIAWNSNNLDSKVGGNYNYLYRLFRKSNLKPFERDISTEIYQAGSTPCNGVEGFNCYFPLQSYGFQPTNGVGYQPYRVVVLSFELLHAPATVCGPKKSTNLVKNKCVNFNFNGLTGTGVLTESNKKFLPFQQFGRDIADTTDAVRDPQTLEILDITPCSFGGVSVITPGTNTSNQVAVLYQDVNCTEVPVAIHADQLTPTWRVYSTGSNVFQTRAGCLIGAEHVNNSYECDIPIGAGICASYQTQTNSPRRARSVASQSIIAYTMSLGAENSVAYSNNSIAIPTNFTISVTTEILPVSMTKTSVDCTMYICGDSTECSNLLLQYGSFCTQLNRALTGIAVEQDKNTQEVFAQVKQIYKTPPIKDFGGFNFSQILPDPSKPSKRSFIEDLLFNKVTLADAGFIKQYGDCLGDIAARDLICAQKFNGLTVLPPLLTDEMIAQYTSALLAGTITSGWTFGAGAALQIPFAMQMAYRFNGIGVTQNVLYENQKLIANQFNSAIGKIQDSLSSTASALGKLQDVVNQNAQALNTLVKQLSSNFGCISSVLNDILSRLDKVEAEVQIDCLITGRLQSLQTYVTQQLIRAAEIRASANLAATKMSECVLGQSKRVDFCGKGYHLMSFPQSAPHGVVFLHVTYVPAQEKNFTTAPAICHDGKAHFPREGVFVSNGTHWFVTQRNFYEPQIITTDNTFVSGNCDVVIGIVNNTVYDPLQPELESFKEELDKYFKNHTSPDVDLGDISGINASVVNIQKEIDRLNEVAKNLNESLIDLQELGKYEQYIKGGGGSDIIKLLNEQVNKEMQSSNLYMSMSSWCYTHSLDGAGLFLFDHAAEEYEHAKKLIIFLNENNVPVQLTSISAPEHKFEGLTQIFQKAYEHEQHISESINNIVDHAIKSKDHATFNFLQWYVAEQHEEEVLFKDILDKIELIGNENHGLYLADQYVKGIAKSRKS

SEQ ID NO: 5471 - protein, 1379 aa, Artificial Sequence
  SARS-CoV-2/2019-nCoV/USA-CruiseA-18/2020__MT159716.1 spike protein (1-1211)(A972C_R995C) Ferritin construct
MFVFLVLLPLVSSQCVNLTTRTQLPPAYTNSFTRGVYYPDKVFRSSVLHSTQDLFLPFFSNVTWFHAIHVSGTNGTKRFDNPVLPFNDGVYFASTEKSNIIRGWIFGTTLDSKTQSLLIVNNATNVVIKVCEFQFCNDPFLGVYYHKNNKSWMESELRVYSSANNCTFEYVSQPFLMDLEGKQGNFKNLREFVFKNIDGYFKIYSKHTPINLVRDLPQGFSALEPLVDLPIGINITRFQTLLALHRSYLTPGDSSSGWTAGAAAYYVGYLQPRTFLLKYNENGTITDAVDCALDPLSETKCTLKSFTVEKGIYQTSNFRVQPTESIVRFPNITNLCPFGEVFNATRFASVYAWNRKRISNCVADYSVLYNSASFSTFKCYGVSPTKLNDLCFTNVYADSFVIRGDEVRQIAPGQTGKIADYNYKLPDDFTGCVIAWNSNNLDSKVGGNYNYLYRLFRKSNLKPFERDISTEIYQAGSTPCNGVEGFNCYFPLQSYGFQPTNGVGYQPYRVVVLSFELLHAPATVCGPKKSTNLVKNKCVNFNFNGLTGTGVLTESNKKFLPFQQFGRDIADTTDAVRDPQTLEILDITPCSFGGVSVITPGTNTSNQVAVLYQDVNCTEVPVAIHADQLTPTWRVYSTGSNVFQTRAGCLIGAEHVNNSYECDIPIGAGICASYQTQTNSPRRARSVASQSIIAYTMSLGAENSVAYSNNSIAIPTNFTISVTTEILPVSMTKTSVDCTMYICGDSTECSNLLLQYGSFCTQLNRALTGIAVEQDKNTQEVFAQVKQIYKTPPIKDFGGFNFSQILPDPSKPSKRSFIEDLLFNKVTLADAGFIKQYGDCLGDIAARDLICAQKFNGLTVLPPLLTDEMIAQYTSALLAGTITSGWTFGAGAALQIPFAMQMAYRFNGIGVTQNVLYENQKLIANQFNSAIGKIQDSLSSTASALGKLQDVVNQNAQALNTLVKQLSSNFGCISSVLNDILSRLDKVEAEVQIDCLITGRLQSLQTYVTQQLIRAAEIRASANLAATKMSECVLGQSKRVDFCGKGYHLMSFPQSAPHGVVFLHVTYVPAQEKNFTTAPAICHDGKAHFPREGVFVSNGTHWFVTQRNFYEPQIITTDNTFVSGNCDVVIGIVNNTVYDPLQPELDSFKEELDKYFKNHTSPDVDLGDISGINASVVNIQKEIDRLNEVAKNLNESLIDLQELGKYEQYIKGGGGSDIIKLLNEQVNKEMQSSNLYMSMSSWCYTHSLDGAGLFLFDHAAEEYEHAKKLIIFLNENNVPVQLTSISAPEHKFEGLTQIFQKAYEHEQHISESINNIVDHAIKSKDHATFNFLQWYVAEQHEEEVLFKDILDKIELIGNENHGLYLADQYVKGIAKSRKS

SEQ ID NO: 5472 - protein, 1379 aa, Artificial Sequence
  SARS-CoV-2/SARS-CoV-2/Yunnan-01/human/2020/CHN__MT049951.1 spike protein (1-1211)(A972C_R995C) Ferritin construct
MFVFLVLLPLVSSQCVNLTTRTQLPPANTNSFTRGVYYPDKVFRSSVLHSTQDLFLPFFSNVTWFHAIHVSGTNGTKRFDNPVLPFNDGVYFASTEKSNIIRGWIFGTTLDSKTQSLLIVNNATNVVIKVCEFQFCNDPFLGVYYHKNNKSWMESEFRVYSSANNCTFEYVSQPFLMDLEGKQGNFKNLREFVFKNIDGYFKIYSKHTPINLVRDLPQGFSALEPLVDLPIGINITRFQTLLALHRSYLTPGDSSSGWTAGAAAYYVGYLQPRTFLLKYNENGTITDAVDCALDPLSETKCTLKSFTVEKGIYQTSNFRVQPTESIVRFPNITNLCPFGEVFNATRFASVYAWNRKRISNCVADYSVLYNSASFSTFKCYGVSPTKLNDLCFTNVYADSFVIRGDEVRQIAPGQTGKIADYNYKLPDDFTGCVIAWNSNNLDSKVGGNYNYLYRLFRKSNLKPFERDISTEIYQAGSTPCNGVEGFNCYFPLQSYGFQPTNGVGYQPYRVVVLSFELLHAPATVCGPKKSTNLVKNKCVNFNFNGLTGTGVLTESNKKFLPFQQFGRDIADTTDAVRDPQTLEILDITPCSFGGVSVITPGTNTSNQVAVLYQDVNCTEVPVAIHADQLTPTWRVYSTGSNVFQTRAGCLIGAEHVNNSYECDIPIGAGICASYQTQTNSPRRARSVASQSIIAYTMSLGAENSVAYSNNSIAIPTNFTISVTTEILPVSMTKTSVDCTMYICGDSTECSNLLLQYGSFCTQLNRALTGIAVEQDKNTQEVFAQVKQIYKTPPIKDFGGFNFSQILPDPSKPSKRSFIEDLLFNKVTLADAGFIKQYGDCLGDIAARDLICAQKFNGLTVLPPLLTDEMIAQYTSALLAGTITSGWTFGAGAALQIPFAMQMAYRFNGIGVTQNVLYENQKLIANQFNSAIGKIQDSLSSTASALGKLQDVVNQNAQALNTLVKQLSSNFGCISSVLNDILSRLDKVEAEVQIDCLITGRLQSLQTYVTQQLIRAAEIRASANLAATKMSECVLGQSKRVDFCGKGYHLMSFPQSAPHGVVFLHVTYVPAQEKNFTTAPAICHDGKAHFPREGVFVSNGTHWFVTQRNFYEPQIITTDNTFVSGNCDVVIGIVNNTVYDPLQPELDSFKEELDKYFKNHTSPDVDLGDISGINASVVNIQKEIDRLNEVAKNLNESLIDLQELGKYEQYIKGGGGSDIIKLLNEQVNKEMQSSNLYMSMSSWCYTHSLDGAGLFLFDHAAEEYEHAKKLIIFLNENNVPVQLTSISAPEHKFEGLTQIFQKAYEHEQHISESINNIVDHAIKSKDHATFNFLQWYVAEQHEEEVLFKDILDKIELIGNENHGLYLADQYVKGIAKSRKS

SEQ ID NO: 5473 - protein, 1379 aa, Artificial Sequence
  SARS-CoV-2/USA/WA-UW292/2020__EPI_ISL_418077 spike protein (1-1211)(A972C_R995C) Ferritin construct
MFVFLVLLPLVSSQCVNLTTRTQLPPAYTNSFTRGVYYPDKVFRSSVLHSTQDLFLPFFSNVTWFHAIHVSGTNGTKRFDNPVLPFNDGVYFASTEKSNIIRGWIFGTTLDSKTQSLLIVNNATNVVIKVCEFQFCNDPFLGVYYHKNNKSWMESEFRVYSSANNCTFEYVSQPFLMDLEGKQGNFKNLREFVFKNIDGYFKIYSKHTPINLVRDLPQGFSALEPLVDLPIGINITRFQTLLALHRSYLTPGDSSSGWTAGAAAYYVGYLQPRTFLLKYNENGTITDAVDCALDPLSETKCTLKSFTVEKGIYQTSNFRVQPTESIVRFPNITNLCPFGEVFNATRFASVYAWNRKRISNCVADYSVLYNSASFSTFKCYGVSPTKLNDLCFTNVYADSFVIRGDEVRQIAPGQTGKIADYNYKLPDDFTGCVIAWNSNNLDSKVGGNYNYLYRLFRKSNLKPFERDISTEIYQASSTPCNGVEGFNCYFPLQSYGFQPTNGVGYQPYRVVVLSFELLHAPATVCGPKKSTNLVKNKCVNFNFNGLTGTGVLTESNKKFLPFQQFGRDIADTTDAVRDPQTLEILDITPCSFGGVSVITPGTNTSNQVAVLYQDVNCTEVPVAIHADQLTPTWRVYSTGSNVFQTRAGCLIGAEHVNNSYECDIPIGAGICASYQTQTNSPRRARSVASQSIIAYTMSLGAENSVAYSNNSIAIPTNFTISVTTEILPVSMTKTSVDCTMYICGDSTECSNLLLQYGSFCTQLNRALTGIAVEQDKNTQEVFAQVKQIYKTPPIKDFGGFNFSQILPDPSKPSKRSFIEDLLFNKVTLADAGFIKQYGDCLGDIAARDLICAQKFNGLTVLPPLLTDEMIAQYTSALLAGTITSGWTFGAGAALQIPFAMQMAYRFNGIGVTQNVLYENQKLIANQFNSAIGKIQDSLSSTASALGKLQDVVNQNAQALNTLVKQLSSNFGCISSVLNDILSRLDKVEAEVQIDCLITGRLQSLQTYVTQQLIRAAEIRASANLAATKMSECVLGQSKRVDFCGKGYHLMSFPQSAPHGVVFLHVTYVPAQEKNFTTAPAICHDGKAHFPREGVFVSNGTHWFVTQRNFYEPQIITTDNTFVSGNCDVVIGIVNNTVYDPLQPELDSFKEELDKYFKNHTSPDVDLGDISGINASVVNIQKEIDRLNEVAKNLNESLIDLQELGKYEQYIKGGGGSDIIKLLNEQVNKEMQSSNLYMSMSSWCYTHSLDGAGLFLFDHAAEEYEHAKKLIIFLNENNVPVQLTSISAPEHKFEGLTQIFQKAYEHEQHISESINNIVDHAIKSKDHATFNFLQWYVAEQHEEEVLFKDILDKIELIGNENHGLYLADQYVKGIAKSRKS

SEQ ID NO: 5474 - protein, 1379 aa, Artificial Sequence
  SARS-CoV-2/Iceland/192/2020__EPI_ISL_417819 spike protein (1-1211)(A972C_R995C) Ferritin construct
MFVFFVLLPLVSSQCVNLTTRTQLPPAYTNSFTRGVYYPDKVFRSSVLHSTQDLFLPFFSNVTWFHAIHVSGTNGTKRFDNPVLPFNDGVYFASTEKSNIIRGWIFGTTLDSKTQSLLIVNNATNVVIKVCEFQFCNDPFLGVYYHKNNKSWMESEFRVYSSANNCTFEYVSQPFLMDLEGKQGNFKNLREFVFKNIDGYFKIYSKHTPINLVRDLPQGFSALEPLVDLPIGINITRFQTLLALHRSYLTPGDSSSGWTAGAAAYYVGYLQPRTFLLKYNENGTITDAVDCALDPLSETKCTLKSFTVEKGIYQTSNFRVQPTESIVRFPNITNLCPFGEVFNATRFASVYAWNRKRISNCVADYSVLYNSASFSTFKCYGVSPTKLNDLCFTNVYADSFVIRGDEVRQIAPGQTGKIADYNYKLPDDFTGCVIAWNSNNLDSKVGGNYNYLYRLFRKSNLKPFERDISTEIYQAGSTPCNGVEGFNCYFPLQSYGFQPTNGVGYQPYRVVVLSFELLHAPATVCGPKKSTNLVKNKCVNFNFNGLTGTGVLTESNKKFLPFQQFGRDIADTTDAVRDPQTLEILDITPCSFGGVSVITPGTNTSNQVAVLYQGVNCTEVPVAIHADQLTPTWRVYSTGSNVFQTRAGCLIGAEHVNNSYECDIPIGAGICASYQTQTNSPRRARSVASQSIIAYTMSLGAENSVAYSNNSIAIPTNFTISVTTEILPVSMTKTSVDCTMYICGDSTECSNLLLQYGSFCTQLNRALTGIAVEQDKNTQEVFAQVKQIYKTPPIKDFGGFNFSQILPDPSKPSKRSFIEDLLFNKVTLADAGFIKQYGDCLGDIAARDLICAQKFNGLTVLPPLLTDEMIAQYTSALLAGTITSGWTFGAGAALQIPFAMQMAYRFNGIGVTQNVLYENQKLIANQFNSAIGKIQDSLSSTASALGKLQDVVNQNAQALNTLVKQLSSNFGCISSVLNDILSRLDKVEAEVQIDCLITGRLQSLQTYVTQQLIRAAEIRASANLAATKMSECVLGQSKRVDFCGKGYHLMSFPQSAPHGVVFLHVTYVPAQEKNFTTAPAICHDGKAHFPREGVFVSNGTHWFVTQRNFYEPQIITTDNTFVSGNCDVVIGIVNNTVYDPLQPELDSFKEELDKYFKNHTSPDVDLGDISGINASVVNIQKEIDRLNEVAKNLNESLIDLQELGKYEQYIKGGGGSDIIKLLNEQVNKEMQSSNLYMSMSSWCYTHSLDGAGLFLFDHAAEEYEHAKKLIIFLNENNVPVQLTSISAPEHKFEGLTQIFQKAYEHEQHISESINNIVDHAIKSKDHATFNFLQWYVAEQHEEEVLFKDILDKIELIGNENHGLYLADQYVKGIAKSRKS

SEQ ID NO: 5475 - protein, 1379 aa, Artificial Sequence
  SARS-CoV-2/Belgium/ULG-6939/2020__EPI_ISL_417020 spike protein (1-1211)(A972C_R995C) Ferritin construct
MFVFLVLLPLVSSQCVNLTTRTQLPPAYTNSFTRGVYYPDKVFRSSVLHSTQDLFLPFFSNVTWFHAIHVSGTNGTKRFDNPVLPFNDGVYFASTEKSNIIRGWIFGTTLDSKTQSLLIVNNATNVVIKVCEFQFCNDPFLGVYYHKNNKSWMESEFRVYSSANNCTFEYVSQPFLMDLEGKQGNFKNLREFVFKNIDGYFKIYSKHTPINLVRDLPQGFSALEPLVDLPIGINITRFQTLLALHRSYLTPGDSSSGWTAGAAAYYVGYLQPRTFLLKYNENGTITDAVDCALDPLSETKCTLKSFTVEKGIYQTSNFRVQPTESIVRFPNITNLCPFGEVFNATRFASVYAWNRKRISNCVADYSVLYNSASFSTFKCYGVSPTKLNDLCFTNVYADSFVIRGDEVRQIAPGQTGKIADYNYKLPDDFTGCVIAWNSNNLDSKVGGNYNYLYRLFRKSNLKPFERDISTEIYQAGSTPCNGVEGFNCYFPLQSYGFQPTNGVGYQPYRVVVLSFELLHAPATVCGPKKSTNLVKNKCVNFNFNGLTGTGVLTESNKKFLPFQQFGRDIADTTDAVRDPQTLEILDITPCSFGGVSVITPGTNTSNQVAVLYQGVNCTEVPVAIHADQLTPTWRVYSTGSNVFQTRAGCLIGAEHVNNSYECDIPIGAGICASYQTQTNSPRRARSVASQSIIAYTMSLGAENSVVYSNNSIAIPTNFTISVTTEILPVSMTKTSVDCTMYICGDSTECSNLLLQYGSFCTQLNRALTGIAVEQDKNTQEVFAQVKQIYKTPPIKDFGGFNFSQILPDPSKPSKRSFIEDLLFNKVTLADAGFIKQYGDCLGDIAARDLICAQKFNGLTVLPPLLTDEMIAQYTSALLAGTITSGWTFGAGAALQIPFAMQMAYRFNGIGVTQNVLYENQKLIANQFNSAIGKIQDSLSSTASALGKLQDVVNQNAQALNTLVKQLSSNFGCISSVLNDILSRLDKVEAEVQIDCLITGRLQSLQTYVTQQLIRAAEIRASANLAATKMSECVLGQSKRVDFCGKGYHLMSFPQSAPHGVVFLHVTYVPAQEKNFTTAPAICHDGKAHFPREGVFVSNGTHWFVTQRNFYEPQIITTDNTFVSGNCDVVIGIVNNTVYDPLQPELDSFKEELDKYFKNHTSPDVDLGDISGINASVVNIQKEIDRLNEVAKNLNESLIDLQELGKYEQYIKGGGGSDIIKLLNEQVNKEMQSSNLYMSMSSWCYTHSLDGAGLFLFDHAAEEYEHAKKLIIFLNENNVPVQLTSISAPEHKFEGLTQIFQKAYEHEQHISESINNIVDHAIKSKDHATFNFLQWYVAEQHEEEVLFKDILDKIELIGNENHGLYLADQYVKGIAKSRKS

SEQ ID NO: 5476 - protein, 1379 aa, Artificial Sequence
  SARS-CoV-2/France/HF2496/2020__EPI_ISL_418231 spike protein (1-1211)(A972C_R995C) Ferritin construct
MFVFLVLLPLVSSQCVNLTTRTQLPPAYTNSFTRGVYYPDKVFRSSVLHSTQDLFLPFFSNVTWFHAIHVSGTNGTKRFDNPVLPFNDGVYFASTEKSNIIRGWIFGTTLDSKTQSLLIVNNATNVVIKVCEFQFCNDPFLGVYYHKNNKSWMESEFRVYSSANNCTFEYVSQPFLMDLEGKQGNFKNLREFVFKNIDGYFKIYSKHTPINLVRDLPQGFSALEPLVDLPIGINITRFQTLLALHRSYLTPGDSSSGWTAGAAAYYVGYLQPRTFLLKYNENGTITDAVDCALDPLSETKCTLKSFTVEKGIYQTSNFRVQPTESIVRFPNITNLCPFGEVFNATRFASVYAWNRKRISNCVADYSVLYNSASFSTFKCYGVSPTKLNDLCFTNVYADSFVIRGDEVRQIAPGQTGKIADYNYKLPDDFTGCVIAWNSNNLDSKVGGNYNYLYRLFRKSNLKPFERDISTEIYQAGSTPCNGVEGFNCYFPLQSYGFQPTNGVGYQPYRVVVLSFELLHAPATVCGPKKSTNLVKNKCVNFNFNGLTGTGVLTESNKKFLPFQQFGRDIADTTDAVRDPQTLEILDITPCSFGGVSVITPGTNTSNQVAVLYQGVNCTEVPVAIHADQLTPTWRVYSTGSNVFQTRAGCLIGAEHVNNSYECDIPIGAGICASYQTQTNSPRRARSVASQSIIAYTMSLGAENSVAYSNNSIAIPTNFTISVTTEILPVSMTKTSVDCTMYICGDSTECSNLLLQYGSFCTQLNRALTGIAVEQDKNTQEVFAQVKQIYKTPPIKDFGGFNFSQILPDPSKPSKRSFIEDLLFNKVTLADAGFIKQYGDCLGDIVARDLICAQKFNGLTVLPPLLTDEMIAQYTSALLAGTITSGWTFGAGAALQIPFAMQMAYRFNGIGVTQNVLYENQKLIANQFNSAIGKIQDSLSSTASALGKLQDVVNQNAQALNTLVKQLSSNFGCISSVLNDILSRLDKVEAEVQIDCLITGRLQSLQTYVTQQLIRAAEIRASANLAATKMSECVLGQSKRVDFCGKGYHLMSFPQSAPHGVVFLHVTYVPAQEKNFTTAPAICHDGKAHFPREGVFVSNGTHWFVTQRNFYEPQIITTDNTFVSGNCDVVIGIVNNTVYDPLQPELDSFKEELDKYFKNHTSPDVDLGDISGINASVVNIQKEIDRLNEVAKNLNESLIDLQELGKYEQYIKGGGGSDIIKLLNEQVNKEMQSSNLYMSMSSWCYTHSLDGAGLFLFDHAAEEYEHAKKLIIFLNENNVPVQLTSISAPEHKFEGLTQIFQKAYEHEQHISESINNIVDHAIKSKDHATFNFLQWYVAEQHEEEVLFKDILDKIELIGNENHGLYLADQYVKGIAKSRKS

SEQ ID NO: 5477 - protein, 1379 aa, Artificial Sequence
  SARS-CoV-2/USA/WA-UW291/2020__EPI_ISL_418076 spike protein (1-1211)(A972C_R995C) Ferritin construct
MFVFLVLLPLVSSQCVNLTTRTQLPPAYTNSFTRGVYYPDKVFRSSVLHSTQDLFLPFFSNVTWFHAIHVSGTNGTKRFDNPVLPFNDGVYFASTEKSNIIRGWIFGTTLDSKTQSLLIVNNATNVVIKVCEFQFCNDPFLGVYYHKNNKSWMESEFRVYSSANNCTFEYVSQPFLMDLEGKQGNFKNLREFVFKNIDGYFKIYSKHTPINLVRDLPQGFSALEPLVDLPIGINITRFQTLLALHRSYLTPGDSSSGWTAGAAAYYVGYLQPRTFLLKYNENGTITDAVDCALDPLSETKCTLKSFTVEKGIYQTSNFRVQPTESIVRFPNITNLCPFGEVFNATRFASVYAWNRKRISNCVADYSVLYNSASFSTFKCYGVSPTKLNDLCFTNVYADSFVIRGDEVRQIAPGQTGKIADYNYKLPDDFTGCVIAWNSNNLDSKVGGNYNYLYRLFRKSNLKPFERDISTEIYQAGSTPCNGVEGFNCYFPLQSYGFQPTNGVGYQPYRVVVLSFELLHAPATVCGPKKSTNLVKNKCVNFNFNGLTGTGVLTESNKKFLPFQQFGRDIADTTDAVRDPQTLEILDITPCSFGGVSVITPGTNTSNQVAVLYQGVNCTEVPVAIHADQLTPTWRVYSTGSNVFQTRAGCLIGAEHVNNSYECDIPIGAGICASYQTQTNSPRRARSVASQSIIAYTMSLGAENSVAYSNNSIAIPTNFTISVTTEILPVSMTKTSVDCTMYICGDSTECSNLLLQYGSFCTQLNRALTGIAVEQDKNTQEVFAQVKQIYKTPPIKDFGGFNFSQILPDPSKPSKRSFIEDLLFNKVTLADAGFIKQYGDCLGDIAARDLICAQKFNGLTVLPPLLTDEMIAQYTSALLAGTITSGWTFGAGAALQIPFAMQMAYRFNGIGVTQNVLYENQKLIANQFNSAIGKIQYSLSSTASALGKLQDVVNQNAQALNTLVKQLSSNFGCISSVLNDILSRLDKVEAEVQIDCLITGRLQSLQTYVTQQLIRAAEIRASANLAATKMSECVLGQSKRVDFCGKGYHLMSFPQSAPHGVVFLHVTYVPAQEKNFTTAPAICHDGKAHFPREGVFVSNGTHWFVTQRNFYEPQIITTDNTFVSGNCDVVIGIVNNTVYDPLQPELDSFKEELDKYFKNHTSPDVDLGDISGINASVVNIQKEIDRLNEVAKNLNESLIDLQELGKYEQYIKGGGGSDIIKLLNEQVNKEMQSSNLYMSMSSWCYTHSLDGAGLFLFDHAAEEYEHAKKLIIFLNENNVPVQLTSISAPEHKFEGLTQIFQKAYEHEQHISESINNIVDHAIKSKDHATFNFLQWYVAEQHEEEVLFKDILDKIELIGNENHGLYLADQYVKGIAKSRKS

SEQ ID NO: 5478 - protein, 1379 aa, Artificial Sequence; identical to SEQ ID NO: 5441
  SARS-CoV-2/Portugal/PT0034/2020__EPI_ISL_418019 spike protein (1-1211)(A972C_R995C) Ferritin construct

SEQ ID NO: 5479 - protein, 1379 aa, Artificial Sequence
  SARS-CoV-2/Iceland/202/2020__EPI_ISL_417750 spike protein (1-1211)(A972C_R995C) Ferritin construct
MFVFLVLLPLVSSQCVNLTTRTQLPPAYTNSFTRGVYYPDKVFRSSVLHSTQDLFLPFFSNVTWFHAIHVSGTNGTKRFDNPVLPFNDGVYFASTEKSNIIRGWIFGTTLDSKTQSLLIVNNATNVVIKVCEFQFCNDPFLGVYYHKNNKSWMESEFRVYSSANNCTFEYVSQPFLMDLEGKQGNFKNLREFVFKNIDGYFKIYSKHTPINLVRDLPQGFSALEPLVDLPIGINITRFQTLLALHRSYLTPGDSSSGWTAGAAAYYVGYLQPRTFLLKYNENGTITDAVDCALDPLSETKCTLKSFTVEKGIYQTSNFRVQPTESIVRFPNITNLCPFGEVFNATRFASVYAWNRKRISNCVADYSVLYNSASFSTFKCYGVSPTKLNDLCFTNVYADSFVIRGDEVRQIAPGQTGKIADYNYKLPDDFTGCVIAWNSNNLDSKVGGNYNYLYRLFRKSNLKPFERDISTEIYQAGSTPCNGVEGFNCYFPLQSYGFQPTNGVGYQPYRVVVLSFELLHAPATVCGPKKSTNLVKNKCVNFNFNGLTGTGVLTESNKKFLPFQQFGRDIADTTDAVRDPQTLEILDITPCSFGGVSVITPGTNTSNQVAVLYQDVNCTEVPVAIHADQLTPTWRVYSTGSNVFQTRAGCLIGAEHVNNSYECDIPIGAGICASYQTQTNSPRRARSVASQSIIAYTMSLGAENSVAYSNNSIAIPTNFTISVTTEILPVSMTKTSVDCTMYICGDSTECSNLLLQYGSFCTQLNRALTGIAVEQDKNTQEVFAQVKQIYKTPPIKDFGGFNFSQILPDPSKPSKRSFIEDLLFNKVTLADAGFIKQYGDCLGDIAARDLICAQKFNGLTVLPPLLTDEMIAQYTSALLAGTITSGWTFGAGAALQIPFAMQMAYRFNGIGVTQNVLYENQKLIANQFNSAIGKIQDSLSSTASALGKLQDVVNQNAQALNTLVKQLSSNFGCISSVLNDILSRLDKVEAEVQIDCLITGRLQSLQTYVTQQLIRAAEIRASANLAATKMSECVLGQSKRVDFCGKGYHLMSFPQSAPHGVVFLHVTYVPAQEKNFTTAPAICHDGKAHFPREGVFVSNGTHWFVTQRNFYEPQIITTDNTFVSGNCDVVIGIVNNTVYDPLQPELDSFKEELDKYFKNHTSPDVDLGDIPGINASVVNIQKEIDRLNEVAKNLNESLIDLQELGKYEQYIKGGGGSDIIKLLNEQVNKEMQSSNLYMSMSSWCYTHSLDGAGLFLFDHAAEEYEHAKKLIIFLNENNVPVQLTSISAPEHKFEGLTQIFQKAYEHEQHISESINNIVDHAIKSKDHATFNFLQWYVAEQHEEEVLFKDILDKIELIGNENHGLYLADQYVKGIAKSRKS

SEQ ID NO: 5480 - protein, 1379 aa, Artificial Sequence
  SARS-CoV-2/USA/WA-UW261/2020__EPI_ISL_418046 spike protein (1-1211)(A972C_R995C) Ferritin construct
MFVFLVLLPLVSSQCVNLTTRTQLPPAYTNSFTRGVYYPDKVFRSSVLHSTQDLFLPFFSNVTWFHAIHVSGTNGTKRFDNPVLPFNDGVYFASTEKSNIIRGWIFGTTLDSKTQSLLIVNNATNVVIKVCEFQFCNDPFLGVYYHKNNKSWMESEFRVYSSANNCTFEYVSQPFLMDLEGKQGNFKNLREFVFKNIDGYFKIYSKHTPINLVRDLPQGFSALEPLVDLPIGINITRFQTLLALHRSYLTPGDSSSGWTAGAAAYYVGYLQPRTFLLKYNENGTITDAVDCALDPLSETKCTLKSFTVEKGIYQTSNFRVQPTESIVRFPNITNLCPFGEVFNATRFTSVYAWNRKRISNCVADYSVLYNSASFSTFKCYGVSPTKLNDLCFTNVYADSFVIRGDEVRQIAPGQTGKIADYNYKLPDDFTGCVIAWNSNNLDSKVGGNYNYLYRLFRKSNLKPFERDISTEIYQAGSTPCNGVEGFNCYFPLQSYGFQPTNGVGYQPYRVVVLSFELLHAPATVCGPKKSTNLVKNKCVNFNFNGLTGTGVLTESNKKFLPFQQFGRDIADTTDAVRDPQTLEILDITPCSFGGVSVITPGTNTSNQVAVLYQDVNCTEVPVAIHADQLTPTWRVYSTGSNVFQTRAGCLIGAEHVNNSYECDIPIGAGICASYQTQTNSPRRARSVASQSIIAYTMSLGAENSVAYSNNSIAIPTNFTISVTTEILPVSMTKTSVDCTMYICGDSTECSNLLLQYGSFCTQLNRALTGIAVEQDKNTQEVFAQVKQIYKTPPIKDFGGFNFSQILPDPSKPSKRSFIEDLLFNKVTLADAGFIKQYGDCLGDIAARDLICAQKFNGLTVLPPLLTDEMIAQYTSALLAGTITSGWTFGAGAALQIPFAMQMAYRFNGIGVTQNVLYENQKLIANQFNSAIGKIQDSLSSTASALGKLQDVVNQNAQALNTLVKQLSSNFGCISSVLNDILSRLDKVEAEVQIDCLITGRLQSLQTYVTQQLIRAAEIRASANLAATKMSECVLGQSKRVDFCGKGYHLMSFPQSAPHGVVFLHVTYVPAQEKNFTTAPAICHDGKAHFPREGVFVSNGTHWFVTQRNFYEPQIITTDNTFVSGNCDVVIGIVNNTVYDPLQPELDSFKEELDKYFKNHTSPDVDLGDISGINASVVNIQKEIDRLNEVAKNLNESLIDLQELGKYEQYIKGGGGSDIIKLLNEQVNKEMQSSNLYMSMSSWCYTHSLDGAGLFLFDHAAEEYEHAKKLIIFLNENNVPVQLTSISAPEHKFEGLTQIFQKAYEHEQHISESINNIVDHAIKSKDHATFNFLQWYVAEQHEEEVLFKDILDKIELIGNENHGLYLADQYVKGIAKSRKS

SEQ ID NO: 5481 - protein, 1379 aa, Artificial Sequence
  SARS-CoV-2/Portugal/PT0035/2020__EPI_ISL_418020 spike protein (1-1211)(A972C_R995C) Ferritin construct
MFVFLVLLPLVSSQCVNLTTRTQLPPAYTNSFTRGVYYPDKVFRSSVLHSTQDLFLPFFSNVTWFHAIHVSGTNGTKRFDNPVLPFNDGVYFASTEKSNIIRGWIFGTTLDSKTQSLLIVNNATNVVIKVCEFQFCNDPFLGVYYHKNNKSWMESEFRVYSSANNCTFEYVSQPFLMDLEGKQGNFKNLREFVFKNIDGYFKIYSKHTPINLVRDLPQGFSALEPLVDLPIGINITRFQTLLALHRSYLTPGDSSSGWTAGAAAYYVGYLQPRTFLLKYNENGTITDAVDCALDPLSETKCTLKSFTVEKGIYQTSNFRVQPTESIVRFPNITNLCPFGEVFNATRFASVYAWNRKRISNCVADYSVLYNSASFSTFKCYGVSPTKLNDLCFTNVYADSFVIRGDEVRQIAPGQTGKIADYNYKLPDDFTGCVIAWNSNNLDSKVGGNYNYLYRLFRKSNLKPFERDISTEIYQAGSTPCNGVEGFNCYFPLQSYGFQPTNGVGYQPYRVVVLSFELLHAPATVCGPKKSTNLVKNKCVNFNFNGLTGTGVLTESNKKFLPFQQFGRDIADTTDAVRDPQTLEILDITPCSFGGVSVITPGTNTSNQVAVLYQDVNCTEVPVAIHADQLTPTWRVYSTGSNVFQTRAGCLIGAEHVNNSYECDIPIGAGICASYQTQTNSPRRARSVASQSIIAYTMSLGAENSVAYSNNSIAIPTNFTISVTTEILPVSMTKTSVDCTMYICGDSTECSNLLLQYGSFCTQLNRALTGIAVEQDKNTQEVFAQVKQIYKTPPIKDFGGFNFSQILPDPSKPSKRSFIEDLLFNKVTLADAGFIKQYGDCLGDISARDLICAQKFNGLTVLPPLLTDEMIAQYTSALLAGTITSGWTFGAGAALQIPFAMQMAYRFNGIGVTQNVLYENQKLIANQFNSAIGKIQDSLSSTASALGKLQDVVNQNAQALNTLVKQLSSNFGCISSVLNDILSRLDKVEAEVQIDCLITGRLQSLQTYVTQQLIRAAEIRASANLAATKMSECVLGQSKRVDFCGKGYHLMSFPQSAPHGVVFLHVTYVPAQEKNFTTAPAICHDGKAHFPREGVFVSNGTHWFVTQRNFYEPQIITTDNTFVSGNCDVVIGIVNNTVYDPLQPELDSFKEELDKYFKNHTSPDVDLGDISGINASVVNIQKEIDRLNEVAKNLNESLIDLQELGKYEQYIKGGGGSDIIKLLNEQVNKEMQSSNLYMSMSSWCYTHSLDGAGLFLFDHAAEEYEHAKKLIIFLNENNVPVQLTSISAPEHKFEGLTQIFQKAYEHEQHISESINNIVDHAIKSKDHATFNFLQWYVAEQHEEEVLFKDILDKIELIGNENHGLYLADQYVKGIAKSRKS

SEQ ID NO: 5482 - protein, 1379 aa, Artificial Sequence
  SARS-CoV-2/USA/NY-NYUMC7/2020__EPI_ISL_418192 spike protein (1-1211)(A972C_R995C) Ferritin construct
MFVFLVLLPLVSSQCVNLTTRTQLPPAYTNSFTRGVYYPDKVFRSSVLHSTQDLFLPFFSNVTWFHAIHVSGTNGTKRFDNPVLPFNDGVYFASTEKSNIIRGWIFGTTLDSKTQSLLIVNNATNVVIKVCEFQFCNDPFLGVYHHKNNKSWMESEFRVYSSANNCTFEYVSQPFLMDLEGKQGNFKNLREFVFKNIDGYFKIYSKHTPINLVRDLPQGFSALEPLVDLPIGINITRFQTLLALHRSYLTPGDSSSGWTAGAAAYYVGYLQPRTFLLKYNENGTITDAVDCALDPLSETKCTLKSFTVEKGIYQTSNFRVQPTESIVRFPNITNLCPFGEVFNATRFASVYAWNRKRISNCVADYSVLYNSASFSTFKCYGVSPTKLNDLCFTNVYADSFVIRGDEVRQIAPGQTGKIADYNYKLPDDFTGCVIAWNSNNLDSKVGGNYNYLYRLFRKSNLKPFERDISTEIYQAGSTPCNGVEGFNCYFPLQSYGFQPTNGVGYQPYRVVVLSFELLHAPATVCGPKKSTNLVKNKCVNFNFNGLTGTGVLTESNKKFLPFQQFGRDIADTTDAVRDPQTLEILDITPCSFGGVSVITPGTNTSNQVAVLYQGVNCTEVPVAIHADQLTPTWRVYSTGSNVFQTRAGCLIGAEHVNNSYECDIPIGAGICASYQTQTNSPRRARSVASQSIIAYTMSLGAENSVAYSNNSIAIPTNFTISVTTEILPVSMTKTSVDCTMYICGDSTECSNLLLQYGSFCTQLNRALTGIAVEQDKNTQEVFAQVKQIYKTPPIKDFGGFNFSQILPDPSKPSKRSFIEDLLFNKVTLADAGFIKQYGDCLGDIAARDLICAQKFNGLTVLPPLLTDEMIAQYTSALLAGTITSGWTFGAGAALQIPFAMQMAYRFNGIGVTQNVLYENQKLIANQFNSAIGKIQDSLSSTASALGKLQDVVNQNAQALNTLVKQLSSNFGCISSVLNDILSRLDKVEAEVQIDCLITGRLQSLQTYVTQQLIRAAEIRASANLAATKMSECVLGQSKRVDFCGKGYHLMSFPQSAPHGVVFLHVTYVPAQEKNFTTAPAICHDGKAHFPREGVFVSNGTHWFVTQRNFYEPQIITTDNTFVSGNCDVVIGIVNNTVYDPLQPELDSFKEELDKYFKNHTSPDVDLGDISGINASVVNIQKEIDRLNEVAKNLNESLIDLQELGKYEQYIKGGGGSDIIKLLNEQVNKEMQSSNLYMSMSSWCYTHSLDGAGLFLFDHAAEEYEHAKKLIIFLNENNVPVQLTSISAPEHKFEGLTQIFQKAYEHEQHISESINNIVDHAIKSKDHATFNFLQWYVAEQHEEEVLFKDILDKIELIGNENHGLYLADQYVKGIAKSRKS

SEQ ID NO: 5483 - protein, 1379 aa, Artificial Sequence
  SARS-CoV-2/Iceland/189/2020__EPI_ISL_417709 spike protein (1-1211)(A972C_R995C) Ferritin construct
MFVFLVLLPLVSSQCVNLTTRTQLPPAYTNSFTRGVYYPDKVFRSSVLHSTQDLFLPFFSNVTWFHAIHVSGTNGTKRFDNPVLPFNDGVYFASTEKSNIIRGWIFGTTLDSKTQSLLIVNNATNVVIKVCEFQFCNDPFLGVYYHKNNKSWMESEFRVYSSANNCTFEYVSQPFLMDLEGKQGNFKNLREFVFKNIDGYFKIYSKHTPINLVRDLPQGFSALEPLVDLPIGINITRFQTLLALHRSYLTPGDSSSGWTAGAAAYYVGYLQPRTFLLKYNENGTITDAVDCALDPLSETKCTLKSFTVEKGIYQTSNFRVQPTESIVRFPNITNLCPFGEVFNATRFASVYAWNRKRISNCVADYSVLYNSASFSTFKCYGVSPTKLNDLCFTNVYADSFVIRGDEVRQIAPGQTGKIADYNYKLPDDFTGCVIAWNSNNLDSKVGGNYNYLYRLFRKSNLKPFERDISTEIYQAGSTPCNGVEGFNCYFPLQSYGFQPTNGVGYQPYRVVVLSFELLHAPATVCGPKKSTNLVKNKCVNFNFNGLTGTGVLTESNKKFLPFQQFGRDIADTTDAVRDPQTLEILDITPCSFGGVSVITPGTNTSNQVAVLYQGVNCTEVPVAIHADQLTPTWRVYSTGSNVFQTRAGCLIGAEHVNNSYECDIPIGAGICASYQTQTNSPRRARSVASQSIIAYTMSLGAENSVAYSNNSIAIPTNFTISVTTEILPVSMTKTSVDCTMYICGDSTECSNLLLQYGSFCTQLNRALTGIAVEQDKNTQEVFAQVKQIYKTPPIKDFGGFNFSQILPDPSKPSKRSFIEDLLFNKVTLADAGFTKQYGDCLGDIAARDLICAQKFNGLTVLPPLLTDEMIAQYTSALLAGTITSGWTFGAGAALQIPFAMQMAYRFNGIGVTQNVLYENQKLIANQFNSAIGKIQDSLSSTASALGKLQDVVNQNAQALNTLVKQLSSNFGCISSVLNDILSRLDKVEAEVQIDCLITGRLQSLQTYVTQQLIRAAEIRASANLAATKMSECVLGQSKRVDFCGKGYHLMSFPQSAPHGVVFLHVTYVPAQEKNFTTAPAICHDGKAHFPREGVFVSNGTHWFVTQRNFYEPQIITTDNTFVSGNCDVVIGIVNNTVYDPLQPELDSFKEELDKYFKNHTSPDVDLGDISGINASVVNIQKEIDRLNEVAKNLNESLIDLQELGKYEQYIKGGGGSDIIKLLNEQVNKEMQSSNLYMSMSSWCYTHSLDGAGLFLFDHAAEEYEHAKKLIIFLNENNVPVQLTSISAPEHKFEGLTQIFQKAYEHEQHISESINNIVDHAIKSKDHATFNFLQWYVAEQHEEEVLFKDILDKIELIGNENHGLYLADQYVKGIAKSRKS

SEQ ID NO: 5484 - protein, 1379 aa, Artificial Sequence
  SARS-CoV-2/Australia/NSW56/2020__EPI_ISL_417408 spike protein (1-1211)(A972C_R995C) Ferritin construct
MFVFLVLLPLVSSQCVNLTTRTQLPPAYTNSFTRGVYYPDKVFRSSVLHSTQDLFLPFFSNVTWFHAIHVSGTNGTKRFDNPVLPFNDGVYFASTEKSNIIRGWIFGTTLDSKTQSLLIVNNATNVVIKVCEFQFCNDPFLGVYYHKNNKSWMESEFRVYSSANNCTFEYVSQPFLMDLEGKQGNFKNLREFVFKNIDGYFKIYSKHTPINLVRDLPQGFSALEPLVDLPIGINITRFQTLLALHRSYLTPGDSSSGWTAGAAAYYVGYLQPRTFLLKYNENGTITDAVDCALDPLSETKCTLKSFTVEKGIYQTSNFRVQPTESIVRFPNITNLCPFGEVFNATRFASVYAWNRKRISNCVADYSVLYNSASFSTFKCYGVSPTKLNDLCFTNVYADSFVIRGDEVRQIAPGQTGKIADYNYKLPDDFTGCVIAWNSNNLDSKVGGNYNYLYRLFRKSNLKPFERDISTEIYQAGSTPCNGVEGFNCYFPLQSYGFQPTNGVGYQPYRVVVLSFELLHAPATVCGPKKSTNLVKNKCVNFNFNGLTGTGVLTESNKKFLPFQQFGRDIADTTDAVRDPQTLEILDITPCSFGGVSVITPGTNTSNQVAVLYQDVNCTEVPVAIHADQLTPTWRVYSTGSNVFQTRAGCLIGAEHVNNSYECDIPIGAGICASYQTQTNSPRRARSVASQSIIAYTMSLGAENSVAYSNNSIAIPTNFTISVTTEILPVSMTKTSVDCTMYICGDSTECSNLLLQYGSFCTQLNRALTGIAVEQDKNTQEVFAQVKQIYKTPPIKDFGGFNFSQILPDSSKPSKRSFIEDLLFNKVTLADAGFIKQYGDCLGDIAARDLICAQKFNGLTVLPPLLTDEMIAQYTSALLAGTITSGWTFGAGAALQIPFAMQMAYRFNGIGVTQNVLYENQKLIANQFNSAIGKIQDSLSSTASALGKLQDVVNQNAQALNTLVKQLSSNFGCISSVLNDILSRLDKVEAEVQIDCLITGRLQSLQTYVTQQLIRAAEIRASANLAATKMSECVLGQSKRVDFCGKGYHLMSFPQSAPHGVVFLHVTYVPAQEKNFTTAPAICHDGKAHFPREGVFVSNGTHWFVTQRNFYEPQIITTDNTFVSGNCDVVIGIVNNTVYDPLQPELDSFKEELDKYFKNHTSPDVDLGDISGINASVVNIQKEIDRLNEVAKNLNESLIDLQELGKYEQYIKGGGGSDIIKLLNEQVNKEMQSSNLYMSMSSWCYTHSLDGAGLFLFDHAAEEYEHAKKLIIFLNENNVPVQLTSISAPEHKFEGLTQIFQKAYEHEQHISESINNIVDHAIKSKDHATFNFLQWYVAEQHEEEVLFKDILDKIELIGNENHGLYLADQYVKGIAKSRKS

SEQ ID NO: 5485 - protein, 1379 aa, Artificial Sequence
  SARS-CoV-2/Iceland/280/2020__EPI_ISL_417608 spike protein (1-1211)(A972C_R995C) Ferritin construct
MFVFLVLLPLVSSQCVNLTTRTQLPPAYTNSFTRGVYYPDKVFRSSVLHSTQDLFLPFFSNVTWFHAIHVSGTNGTKRFDNPVLPFNDGVYFASTEKSNIIRGWIFGTTLDSKTQSLLIVNNATNVVIKVCEFQFCNDPFLGVYYHKNNKSWMESEFRVYSSANNCTFEYVSQPFLMDLEGKQGNFKNLREFVFKNIDGYFKIYSKHTPINLVRDLPQGFSALEPLVDLPIGINITRFQTLLALHRSYLTPGDSSSGWTAGAAAYYVGYLQPRTFLLKYNENGTITDAVDCALDPLSETKCTLKSFTVEKGIYQTSNFRVQPTESIVRFPNITNLCPFGEVFNATRFASVYAWNRKRISNCVADYSVLYNSASFSTFKCYGVSPTKLNDLCFTNVYADSFVIRGDEVRQIAPGQTGKIADYNYKLPDDFTGCVIAWNSNNLDSKVGGNYNYLYRLFRKSNLKPFERDISTEIYQAGSTPCNGVEGFNCYFPLQSYGFQPTNGVGYQPYRVVVLSFELLHAPATVCGPKKSTNLVKNKCVNFNFNGLTGTGVLTESNKKFLPFQQFGRDIADTTDAVRDPQTLEILDITPCSFGGVSVITPGTNTSNQVAVLYQGVNCTEVPVAIHADQLTPTWRVYSTGSNVFQTRAGCLIGAEHVNNSYECDIPIGAGICASYHTQTNSPRRARSVASQSIIAYTMSLGAENSVAYSNNSIAIPTNFTISVTTEILPVSMTKTSVDCTMYICGDSTECSNLLLQYGSFCTQLNRALTGIAVEQDKNTQEVFAQVKQIYKTPPIKDFGGFNFSQILPDPSKPSKRSFIEDLLFNKVTLADAGFIKQYGDCLGDIAARDLICAQKFNGLTVLPPLLTDEMIAQYTSALLAGTITSGWTFGAGAALQIPFAMQMAYRFNGIGVTQNVLYENQKLIANQFNSAIGKIQDSLSSTASALGKLQDVVNQNAQALNTLVKQLSSNFGCISSVLNDILSRLDKVEAEVQIDCLITGRLQSLQTYVTQQLIRAAEIRASANLAATKMSECVLGQSKRVDFCGKGYHLMSFPQSAPHGVVFLHVTYVPAQEKNFTTAPAICHDGKAHFPREGVFVSNGTHWFVTQRNFYEPQIITTDNTFVSGNCDVVIGIVNNTVYDPLQPELDSFKEELDKYFKNHTSPDVDLGDISGINASVVNIQKEIDRLNEVAKNLNESLIDLQELGKYEQYIKGGGGSDIIKLLNEQVNKEMQSSNLYMSMSSWCYTHSLDGAGLFLFDHAAEEYEHAKKLIIFLNENNVPVQLTSISAPEHKFEGLTQIFQKAYEHEQHISESINNIVDHAIKSKDHATFNFLQWYVAEQHEEEVLFKDILDKIELIGNENHGLYLADQYVKGIAKSRKS

SEQ ID NO: 5486 - protein, 1379 aa, Artificial Sequence; identical to SEQ ID NO: 5441
  SARS-CoV-2/Iceland/247/2020__EPI_ISL_417575 spike protein (1-1211)(A972C_R995C) Ferritin construct

SEQ ID NO: 5487 - protein, 1379 aa, Artificial Sequence
  SARS-CoV-2/Iceland/238/2020__EPI_ISL_417566 spike protein (1-1211)(A972C_R995C) Ferritin construct
MFVFLVLLPLVSSQCVNLTTRTQLPPAYTNSFTRGVYYPDKVFRSSVLHSTQDLFLPFFSNVTWFHAIHVSGTNGTKRFDNPVLPFNDGVYFASTEKSNIIRGWIFGTTLDSKTQSLLIVNNATNVVIKVCEFQFCNDPFLGVYYHKNNKSWMESEFRVYSSANNCTFEYVSQPFLMDLEGKQGNFKNLREFVFKNIDGYFKIYSKHTPINLVRDLPQGFSALEPLVDLPIGINITRFQTLLALHRSYLTPGDSSSGWTAGAAAYYVGYLQPRTFLLKYNENGTITDAVDCALDPLSETKCTLKSFTVEKGIYQTSNFRVQPTESIVRFPNITNLCPFGEVFNATRFASVYAWNRKRISNCVADYSVLYNSASFSTFKCYGVSPTKLNDLCFTNVYADSFVIRGDEVRQIAPGQTGKIADYNYKLPDDFTGCVIAWNSNNLDSKVGGNYNYLYRLFRKSNLKPFERDISTEIYQAGSTPCNGVEGFNCYFPLQSYGFQPTNGVGYQPYRVVVLSFELLHAPATVCGPKKSTNLVKNKCVNFNFNGLTGTGVLTESNKKFLPFQQFGRDIADTTDAVRDPQTLEILDITPCSFGGVSVITPGTNTSNQVAVLYQGVNCTEVPVAIHADQLTPTWRVYSTGSNVFQTRAGCLIGAEHVNNSYECDIPIGAGICASYQTQTNSPRRARSVASQSIIAYTMSLGAENSVAYSNNSIAIPTNFTISVTTEILPVSMTKTSVDCTMYICGDSTECSNLLLQYGSFCTQLNRALTGIAVEQDKNTQEVFAQVKQIYKTPPIKDFGGFNFSQILPDPSKPSKRSFIEDLLFNKVTLADVGFIKQYGDCLGDIAARDLICAQKFNGLTVLPPLLTDEMIAQYTSALLAGTITSGWTFGAGAALQIPFAMQMAYRFNGIGVTQNVLYENQKLIANQFNSAIGKIQDSLSSTASALGKLQDVVNQNAQALNTLVKQLSSNFGCISSVLNDILSRLDKVEAEVQIDCLITGRLQSLQTYVTQQLIRAAEIRASANLAATKMSECVLGQSKRVDFCGKGYHLMSFPQSAPHGVVFLHVTYVPAQEKNFTTAPAICHDGKAHFPREGVFVSNGTHWFVTQRNFYEPQIITTDNTFVSGNCDVVIGIVNNTVYDPLQPELDSFKEELDKYFKNHTSPDVDLGDISGINASVVNIQKEIDRLNEVAKNLNESLIDLQELGKYEQYIKGGGGSDIIKLLNEQVNKEMQSSNLYMSMSSWCYTHSLDGAGLFLFDHAAEEYEHAKKLIIFLNENNVPVQLTSISAPEHKFEGLTQIFQKAYEHEQHISESINNIVDHAIKSKDHATFNFLQWYVAEQHEEEVLFKDILDKIELIGNENHGLYLADQYVKGIAKSRKS

SEQ ID NO: 5488 - protein, 1379 aa, Artificial Sequence
  SARS-CoV-2/Greece/16/2020__EPI_ISL_418265 spike protein (1-1211)(A972C_R995C) Ferritin construct
MFVFLVLLPLVSSQCVNLTTRTQLPPAYTNSFTRGVYYPDKVFRSSVLHSTQDLFLPFFSNVTWFHAIHVSGTNGTKRFDNPVLPFNDGVYFASTEKSNIIRGWIFGTTLDSKTQSLLIVNNATNVVIKVCEFQFCNDPFLGVYYHKNNKSWMESEFRVYSSANNCTFEYVSQPFLMDLEGKQGNFKNLREFVFKNVDGYFKIYSKHTPINLVRDLPQGFSALEPLVDLPIGINITRFQTLLALHRSYLTPGDSSSGWTAGAAAYYVGYLQPRTFLLKYNENGTITDAVDCALDPLSETKCTLKSFTVEKGIYQTSNFRVQPTESIVRFPNITNLCPFGEVFNATRFASVYAWNRKRISNCVADYSVLYNSASFSTFKCYGVSPTKLNDLCFTNVYADSFVIRGDEVRQIAPGQTGKIADYNYKLPDDFTGCVIAWNSNNLDSKVGGNYNYLYRLFRKSNLKPFERDISTEIYQAGSTPCNGVEGFNCYFPLQSYGFQPTNGVGYQPYRVVVLSFELLHAPATVCGPKKSTNLVKNKCVNFNFNGLTGTGVLTESNKKFLPFQQFGRDIADTTDAVRDPQTLEILDITPCSFGGVSVITPGTNTSNQVAVLYQDVNCTEVPVAIHADQLTPTWRVYSTGSNVFQTRAGCLIGAEHVNNSYECDIPIGAGICASYQTQTNSPRRARSVASQSIIAYTMSLGAENSVAYSNNSIAIPTNFTISVTTEILPVSMTKTSVDCTMYICGDSTECSNLLLQYGSFCTQLNRALTGIAVEQDKNTQEVFAQVKQIYKTPPIKDFGGFNFSQILPDPSKPSKRSFIEDLLFNKVTLADAGFIKQYGDCLGDIAARDLICAQKFNGLTVLPPLLTDEMIAQYTSALLAGTITSGWTFGAGAALQIPFAMQMAYRFNGIGVTQNVLYENQKLIANQFNSAIGKIQDSLSSTASALGKLQDVVNQNAQALNTLVKQLSSNFGCISSVLNDILSRLDKVEAEVQIDCLITGRLQSLQTYVTQQLIRAAEIRASANLAATKMSECVLGQSKRVDFCGKGYHLMSFPQSAPHGVVFLHVTYVPAQEKNFTTAPAICHDGKAHFPREGVFVSNGTHWFVTQRNFYEPQIITTDNTFVSGNCDVVIGIVNNTVYDPLQPELDSFKEELDKYFKNHTSPDVDLGDISGINASVVNIQKEIDRLNEVAKNLNESLIDLQELGKYEQYIKGGGGSDIIKLLNEQVNKEMQSSNLYMSMSSWCYTHSLDGAGLFLFDHAAEEYEHAKKLIIFLNENNVPVQLTSISAPEHKFEGLTQIFQKAYEHEQHISESINNIVDHAIKSKDHATFNFLQWYVAEQHEEEVLFKDILDKIELIGNENHGLYLADQYVKGIAKSRKS

SEQ ID NO: 5489 - protein, 1379 aa, Artificial Sequence
  SARS-CoV-2/Iceland/319/2020__EPI_ISL_417648 spike protein (1-1211)(A972C_R995C) Ferritin construct
MFVFLVLLPLVSSQCVNLTTRTQLPPAYTNSFTRGVYYPDKVFRSSVLHSTQDLFLPFFSNVTWFHAIHVSGTNGTKRFDNPVLPFNDGVYFASTEKSNIIRGWIFGTTLDSKTQSLLIVNNATNVVIKVCEFQFCNDPFLGVYYHKNNKSWMESEFRVYSSANNCTFEYVSQPFLIDLEGKQGNFKNLREFVFKNIDGYFKIYSKHTPINLVRDLPQGFSALEPLVDLPIGINITRFQTLLALHRSYLTPGDSSSGWTAGAAAYYVGYLQPRTFLLKYNENGTITDAVDCALDPLSETKCTLKSFTVEKGIYQTSNFRVQPTESIVRFPNITNLCPFGEVFNATRFASVYAWNRKRISNCVADYSVLYNSASFSTFKCYGVSPTKLNDLCFTNVYADSFVIRGDEVRQIAPGQTGKIADYNYKLPDDFTGCVIAWNSNNLDSKVGGNYNYLYRLFRKSNLKPFERDISTEIYQAGSTPCNGVEGFNCYFPLQSYGFQPTNGVGYQPYRVVVLSFELLHAPATVCGPKKSTNLVKNKCVNFNFNGLTGTGVLTESNKKFLPFQQFGRDIADTTDAVRDPQTLEILDITPCSFGGVSVITPGTNTSNQVAVLYQGVNCTEVPVAIHADQLTPTWRVYSTGSNVFQTRAGCLIGAEHVNNSYECDIPIGAGICASYQTQTNSPRRARSVASQSIIAYTMSLGAENSVAYSNNSIAIPTNFTISVTTEILPVSMTKTSVDCTMYICGDSTECSNLLLQYGSFCTQLNRALTGIAVEQDKNTQEVFAQVKQIYKTPPIKDFGGFNFSQILPDPSKPSKRSFIEDLLFNKVTLADAGFIKQYGDCLGDIAARDLICAQKFNGLTVLPPLLTDEMIAQYTSALLAGTITSGWTFGAGAALQIPFAMQMAYRFNGIGVTQNVLYENQKLIANQFNSAIGKIQDSLSSTASALGKLQDVVNQNAQALNTLVKQLSSNFGCISSVLNDILSRLDKVEAEVQIDCLITGRLQSLQTYVTQQLIRAAEIRASANLAATKMSECVLGQSKRVDFCGKGYHLMSFPQSAPHGVVFLHVTYVPAQEKNFTTAPAICHDGKAHFPREGVFVSNGTHWFVTQRNFYEPQIITTDNTFVSGNCDVVIGIVNNTVYDPLQPELDSFKEELDKYFKNHTSPDVDLGDISGINASVVNIQKEIDRLNEVAKNLNESLIDLQELGKYEQYIKGGGGSDIIKLLNEQVNKEMQSSNLYMSMSSWCYTHSLDGAGLFLFDHAAEEYEHAKKLIIFLNENNVPVQLTSISAPEHKFEGLTQIFQKAYEHEQHISESINNIVDHAIKSKDHATFNFLQWYVAEQHEEEVLFKDILDKIELIGNENHGLYLADQYVKGIAKSRKS

SEQ ID NO: 5490 - protein, 1379 aa, Artificial Sequence
  SARS-CoV-2/Congo/94/2020__EPI_ISL_417947 spike protein (1-1211)(A972C_R995C) Ferritin construct
MFVFLVLLPLVSSQCVNLTTRTQLPPAYTNSFTRGVYYPDKVFRSSVLHSTQDLFLPFFSNVTWFHAIHVSGTNGTKRFDNPVLPFNDGVYFASTEKSNIIRGWIFGTTLDSKTQSLLIVNNATNVVIKVCEFQFCNDPFLGVYYHKNNKSWMESEFRVYSSANNCTFEYVSQPFLMDLEGKQGNFKNLREFVFKNIDGYFKIYSKHTPINLVRDLPQGFSALEPLVDLPIGINITRFQTLLALHRSYLTPGDSSSGWTAGAAAYYVGYLQPRTFLLKYNENGTITDAVDCALDPLSETKCTLKSFTVEKGIYQTSNFRVQPTESIVRFPNITNLCPFGEVFNATRFASVYAWNRKRISNCVADYSVLYNSASFSTFKCYGVSPTKLNDLCFTNVYADSFVIRGDEVRQIAPGQTGKIADYNYKLPDDFTGCVIAWNSNNLDSKVGGNYNYLYRLFRKSNLKPFERDISTEIYQAGSTPCNGVEGFNCYFPLQSYGFQPTNGVGYQPYRVVVLSFELLHAPATVCGPKKSTNLVKNKCVNFNFNGLTGTGVLTESNKKFLPFQQFGRDIADTTDAVRDPQTLEILDITPCSFGGVSVITPGTNTSNQVAVLYQGVNCTEVPVAIHADQLTPTWRVYSTGSNVFQTRAGCLIGAEHVNNSYECDIPIGAGICASYQTQTNSPRRARSVASQSIIAYTMSLGAENSVAYSNNSIAIPTNFTISVTTEILPVSMTKTSVDCTMYICGDSTECSNLLLQYGSFCTQLNRALTGIAVEQDKNTQEVFAQVKQIYKTPPIKDFGGFNFSQILPDPSKPSKRSFIEDILFNKVTLADAGFIKQYGDCLGDIAARDLICAQKFNGLTVLPPLLTDEMIAQYTSALLAGTITSGWTFGAGAALQIPFAMQMAYRFNGIGVTQNVLYENQKLIANQFNSAIGKIQDSLSSTASALGKLQDVVNQNAQALNTLVKQLSSNFGCISSVLNDILSRLDKVEAEVQIDCLITGRLQSLQTYVTQQLIRAAEIRASANLAATKMSECVLGQSKRVDFCGKGYHLMSFPQSAPHGVVFLHVTYVPAQEKNFTTAPAICHDGKAHFPREGVFVSNGTHWFVTQRNFYEPQIITTDNTFVSGNCDVVIGIVNNTVYDPLQPELDSFKEELDKYFKNHTSPDVDLGDISGINASVVNIQKEIDRLNEVAKNLNESLIDLQELGKYEQYIKGGGGSDIIKLLNEQVNKEMQSSNLYMSMSSWCYTHSLDGAGLFLFDHAAEEYEHAKKLIIFLNENNVPVQLTSISAPEHKFEGLTQIFQKAYEHEQHISESINNIVDHAIKSKDHATFNFLQWYVAEQHEEEVLFKDILDKIELIGNENHGLYLADQYVKGIAKSRKS

SEQ ID NO: 5491 - protein, 1379 aa, Artificial Sequence
  SARS-CoV-2/Congo/158/2020__EPI_ISL_417950 spike protein (1-1211)(A972C_R995C) Ferritin construct
MFVFLVLLPLVSSQCVNLTTRTQLPPAYTNSFTRGVYYPDKVFRSSVLHSTQDLFLPFFSNVTWFHAIHVSGTNGTKRFDNPVLPFNDGVYFASTEKSNIIRGWIFGTTLDSKTQSLLIVNNATNVVIKVCEFQFCNDPFLGVYYHKNNKSWMESEFRVYSSANNCTFEYVSQPFLMDLEGKQGNFKNLREFVFKNIDGYFKIYSKHTPINLVRDLPQGFSALEPLVDLPIGINITRFQTLLALHRSYLTPGDSSSGWTAGAAAYYVGYLQPRTFLLKYNENGTITDAVDCALDPLSETKCTLKSFTVEKGIYQTSNFRVQPTESIVRFPNITNLCPFGEVFNATRFASVYAWNRKRISNCVADYSVLYNSASFSTFKCYGVSPTKLNDLCFTNVYADSFVIRGDEVRQIAPGQTGKIADYNYKLPDDFTGCVIAWNSNNLDSKVGGNYNYLYRLFRKSNLKPFERDISTEIYQAGSTPCNGVEGFNCYFPLQSYGFQPTNGVGYQPYRVVVLSFELLHAPATVCGPKKSTNLVKNKCVNFNFNGLTGTGVLTESNKKFLPFQQFGRDIADTTDAVRDPQTLEILDITPCSFGGVSVITPGTNTSNQVAVLYQDVNCTEVPVAIHADQLTPTWRVYSTGSNVFQTRAGCLIGAEHVNNSYECDIPIGAGICASYQTQTNSPRRARSVASQSIIAYTMSLGAENSVAYSNNSIAIPTNFTISVTTEILPVSMTKTSVDCTMYICGDSTECSNLLLQYGSFCTQLNRALTGIAVEQDKNTQEVFAQVKQIYKTPPIKDFGGFNFSQILPDPSKPSKRSFIEDLLFNKVTLADAGFIKQYGDCLGDIAARDLICAQKFNGLTVLPPLLTDEMIAQYTSALLAGTITSGWTFGAGAALQIPFAMQMAYRFNGIGVTQNVLYENQKLIANQFNSAIGKIQDSLSSTASALGKLQDVVNQNAQALNTLVKQLSSNFGCISSVLNDILSRLDKVEAEVQIDCLITGRLQSLQTYVTQQLIRAAEIRASANLAATKMSECVLGQSKRVDFCGKGYHLMSFPQSAPHGVVFLHVTYVPAQEKNFTTAPAICHDGKAHFPREGVFVSNGTHWFVTQRNFYEPQIITTDNTFLSGNCDVVIGIVNNTVYDPLQPELDSFKEELDKYFKNHTSPDVDLGDISGINASVVNIQKEIDRLNEVAKNLNESLIDLQELGKYEQYIKGGGGSDIIKLLNEQVNKEMQSSNLYMSMSSWCYTHSLDGAGLFLFDHAAEEYEHAKKLIIFLNENNVPVQLTSISAPEHKFEGLTQIFQKAYEHEQHISESINNIVDHAIKSKDHATFNFLQWYVAEQHEEEVLFKDILDKIELIGNENHGLYLADQYVKGIAKSRKS

SEQ ID NO: 5492 - protein, 1379 aa, Artificial Sequence
  SARS-CoV-2/USA/UT-00034/2020__EPI_ISL_417977 spike protein (1-1211)(A972C_R995C) Ferritin construct
MFVFLVLLPLVSSQCVNLTTRTQLPPAYTNSFTRGVYYPDKVFRSSVLHSTQDLFLPFFSNVTWFHAIHVSGTNGTKRFDNPVLPFNDGVYFASTEKSNIIRGWIFGTTLDSKTQSLLIVNNATNVVIKVCEFQFCNDPFLGVYYYKNNKSWMESEFRVYSSANNCTFEYVSQPFLMDLEGKQGNFKNLREFVFKNIDGYFKIYSKHTPINLVRDLPQGFSALEPLVDLPIGINITRFQTLLALHRSYLTPGDSSSGWTAGAAAYYVGYLQPRTFLLKYNENGTITDAVDCALDPLSETKCTLKSFTVEKGIYQTSNFRVQPTESIVRFPNITNLCPFGEVFNATRFASVYAWNRKRISNCVADYSVLYNSASFSTFKCYGVSPTKLNDLCFTNVYADSFVIRGDEVRQIAPGQTGKIADYNYKLPDDFTGCVIAWNSNNLDSKVGGNYNYLYRLFRKSNLKPFERDISTEIYQAGSTPCNGVEGFNCYFPLQSYGFQPTNGVGYQPYRVVVLSFELLHAPATVCGPKKSTNLVKNKCVNFNFNGLTGTGVLTESNKKFLPFQQFGRDIADTTDAVRDPQTLEILDITPCSFGGVSVITPGTNTSNQVAVLYQGVNCTEVPVAIHADQLTPTWRVYSTGSNVFQTRAGCLIGAEHVNNSYECDIPIGAGICASYQTQTNSPRRARSVASQSIIAYTMSLGAENSVAYSNNSIAIPTNFTISVTTEILPVSMTKTSVDCTMYICGDSTECSNLLLQYGSFCTQLNRALTGIAVEQDKNTQEVFAQVKQIYKTPPIKDFGGFNFSQILPDPSKPSKRSFIEDLLFNKVTLADAGFIKQYGDCLGDIAARDLICAQKFNGLTVLPPLLTDEMIAQYTSALLAGTITSGWTFGAGAALQIPFAMQMAYRFNGIGVTQNVLYENQKLIANQFNSAIGKIQDSLSSTASALGKLQDVVNQNAQALNTLVKQLSSNFGCISSVLNDILSRLDKVEAEVQIDCLITGRLQSLQTYVTQQLIRAAEIRASANLAATKMSECVLGQSKRVDFCGKGYHLMSFPQSAPHGVVFLHVTYVPAQEKNFTTAPAICHDGKAHFPREGVFVSNGTHWFVTQRNFYEPQIITTDNTFVSGNCDVVIGIVNNTVYDPLQPELDSFKEELDKYFKNHTSPDVDLGDISGINASVVNIQKEIDRLNEVAKNLNESLIDLQELGKYEQYIKGGGGSDIIKLLNEQVNKEMQSSNLYMSMSSWCYTHSLDGAGLFLFDHAAEEYEHAKKLIIFLNENNVPVQLTSISAPEHKFEGLTQIFQKAYEHEQHISESINNIVDHAIKSKDHATFNFLQWYVAEQHEEEVLFKDILDKIELIGNENHGLYLADQYVKGIAKSRKS

SEQ ID NO: 5493 - protein, 1379 aa, Artificial Sequence
  SARS-CoV-2/USA/UT-00033/2020__EPI_ISL_417976 spike protein (1-1211)(A972C_R995C) Ferritin construct
MFVFLVLLPLVSSQCVNLTTRTQLPPAYTNSFTRGVYYPDKVFRSSVLHSTQDLFLPFFSNVTWFHAIHVSGTNGTKRFDNPVLPFNDGVYFASTEKSNIIRGWIFGTTLDSKTQSLLIVNNATNVVIKVCEFQFCNDPFLGVYYHKNNKSWMESEFRVYSSANNCTFEYVSQPFLMDLEGKQGNFKNLREFVFKNIDGYFKIYSKHTPINLVRDLPQGFSALEPLVDLPIGINITRFQTLLALHRSYLTPGDSSSGLTAGAAAYYVGYLQPRTFLLKYNENGTITDAVDCALDPLSETKCTLKSFTVEKGIYQTSNFRVQPTESIVRFPNITNLCPFGEVFNATRFASVYAWNRKRISNCVADYSVLYNSASFSTFKCYGVSPTKLNDLCFTNVYADSFVIRGDEVRQIAPGQTGKIADYNYKLPDDFTGCVIAWNSNNLDSKVGGNYNYLYRLFRKSNLKPFERDISTEIYQAGSTPCNGVEGFNCYFPLQSYGFQPTNGVGYQPYRVVVLSFELLHAPATVCGPKKSTNLVKNKCVNFNFNGLTGTGVLTESNKKFLPFQQFGRDIADTTDAVRDPQTLEILDITPCSFGGVSVITPGTNTSNQVAVLYQGVNCTEVPVAIHADQLTPTWRVYSTGSNVFQTRAGCLIGAEHVNNSYECDIPIGAGICASYQTQTNSPRRARSVASQSIIAYTMSLGAENSVAYSNNSIAIPTNFTISVTTEILPVSMTKTSVDCTMYICGDSTECSNLLLQYGSFCTQLNRALTGIAVEQDKNTQEVFAQVKQIYKTPPIKDFGGFNFSQILPDPSKPSKRSFIEDLLFNKVTLADAGFIKQYGDCLGDIAARDLICAQKFNGLTVLPPLLTDEMIAQYTSALLAGTITSGWTFGAGAALQIPFAMQMAYRFNGIGVTQNVLYENQKLIANQFNSAIGKIQDSLSSTASALGKLQDVVNQNAQALNTLVKQLSSNFGCISSVLNDILSRLDKVEAEVQIDCLITGRLQSLQTYVTQQLIRAAEIRASANLAATKMSECVLGQSKRVDFCGKGYHLMSFPQSAPHGVVFLHVTYVPAQEKNFTTAPAICHDGKAHFPREGVFVSNGTHWFVTQRNFYEPQIITTDNTFVSGNCDVVIGIVNNTVYDPLQPELDSFKEELDKYFKNHTSPDVDLGDISGINASVVNIQKEIDRLNEVAKNLNESLIDLQELGKYEQYIKGGGGSDIIKLLNEQVNKEMQSSNLYMSMSSWCYTHSLDGAGLFLFDHAAEEYEHAKKLIIFLNENNVPVQLTSISAPEHKFEGLTQIFQKAYEHEQHISESINNIVDHAIKSKDHATFNFLQWYVAEQHEEEVLFKDILDKIELIGNENHGLYLADQYVKGIAKSRKS

SEQ ID NO: 5494 - protein, 1379 aa, Artificial Sequence
  SARS-CoV-2/USA/WI-13/2020__EPI_ISL_417516 spike protein (1-1211)(A972C_R995C) Ferritin construct
MFVFLVLLPLVSSQCVNLTTRTQLPPAYTNSFTRGVYYPDKVFRSSVLHSTQDLFLPFFSNVTWFHAIHVSGTNGTKRFDNPVLPFNDGVYFASTEKSNIIRGWIFGTTLDSKTQSLLIVNNATNVVIKVCEFQFCNDPFLGVYYHKNNKSWMESEFRVYSSANNCTFEYVSQPFLMDLEGKQGNFKNLREFVFKNIDGYFKIYSKHTPINLVRDLPQGFSALEPLVDLPIGINITRFQTLLALHRSYLTPGDSSSGWTAGAAAYYVGYLQPRTFLLKYNENGTITDAVDCALDPLSETKCTLKSFTVEKGIYQTSNFRVLPTESIVRFPNITNLCPFGEVFNATRFASVYAWNRKRISNCVADYSVLYNSASFSTFKCYGVSPTKLNDLCFTNVYADSFVIRGDEVRQIAPGQTGKIADYNYKLPDDFTGCVIAWNSNNLDSKVGGNYNYLYRLFRKSNLKPFERDISTEIYQAGSTPCNGVEGFNCYFPLQSYGFQPTNGVGYQPYRVVVLSFELLHAPATVCGPKKSTNLVKNKCVNFNFNGLTGTGVLTESNKKFLPFQQFGRDIADTTDAVRDPQTLEILDITPCSFGGVSVITPGTNTSNQVAVLYQGVNCTEVPVAIHADQLTPTWRVYSTGSNVFQTRAGCLIGAEHVNNSYECDIPIGAGICASYQTQTNSPRRARSVASQSIIAYTMSLGAENSVAYSNNSIAIPTNFTISVTTEILPVSMTKTSVDCTMYICGDSTECSNLLLQYGSFCTQLNRALTGIAVEQDKNTQEVFAQVKQIYKTPPIKDFGGFNFSQILPDPSKPSKRSFIEDLLFNKVTLADAGFIKQYGDCLGDIAARDLICAQKFNGLTVLPPLLTDEMIAQYTSALLAGTITSGWTFGAGAALQIPFAMQMAYRFNGIGVTQNVLYENQKLIANQFNSAIGKIQDSLSSTASALGKLQDVVNQNAQALNTLVKQLSSNFGCISSVLNDILSRLDKVEAEVQIDCLITGRLQSLQTYVTQQLIRAAEIRASANLAATKMSECVLGQSKRVDFCGKGYHLMSFPQSAPHGVVFLHVTYVPAQEKNFTTAPAICHDGKAHFPREGVFVSNGTHWFVTQRNFYEPQIITTDNTFVSGNCDVVIGIVNNTVYDPLQPELDSFKEELDKYFKNHTSPDVDLGDISGINASVVNIQKEIDRLNEVAKNLNESLIDLQELGKYEQYIKGGGGSDIIKLLNEQVNKEMQSSNLYMSMSSWCYTHSLDGAGLFLFDHAAEEYEHAKKLIIFLNENNVPVQLTSISAPEHKFEGLTQIFQKAYEHEQHISESINNIVDHAIKSKDHATFNFLQWYVAEQHEEEVLFKDILDKIELIGNENHGLYLADQYVKGIAKSRKS

SEQ ID NO: 5495 - protein, 1378 aa, Artificial Sequence
  SARS-CoV-2/India/1-27/2020__EPI_ISL_413522 spike protein (1-1210)(A971C_R994C) Ferritin construct
MFVFLVLLPLVSSQCVNLTTRTQLPPAYTNSFTRGVYYPDKVFRSSVLHSTQDLFLPFFSNVTWFHAIHVSGTNGTKRFDNPVLPFNDGVYFASTEKSNIIRGWIFGTTLDSKTQSLLIVNNATNVVIKVCEFQFCNDPFLGVYHKNNKSWMESEFRVYSSANNCTFEYVSQPFLMDLEGKQGNFKNLREFVFKNIDGYFKIYSKHTPINLVRDLPQGFSALEPLVDLPIGINITRFQTLLALHRSYLTPGDSSSGWTAGAAAYYVGYLQPRTFLLKYNENGTITDAVDCALDPLSETKCTLKSFTVEKGIYQTSNFRVQPTESIVRFPNITNLCPFGEVFNATRFASVYAWNRKRISNCVADYSVLYNSASFSTFKCYGVSPTKLNDLCFTNVYADSFVIRGDEVIQIAPGQTGKIADYNYKLPDDFTGCVIAWNSNNLDSKVGGNYNYLYRLFRKSNLKPFERDISTEIYQAGSTPCNGVEGFNCYFPLQSYGFQPTNGVGYQPYRVVVLSFELLHAPATVCGPKKSTNLVKNKCVNFNFNGLTGTGVLTESNKKFLPFQQFGRDIADTTDAVRDPQTLEILDITPCSFGGVSVITPGTNTSNQVAVLYQDVNCTEVPVAIHADQLTPTWRVYSTGSNVFQTRAGCLIGAEHVNNSYECDIPIGAGICASYQTQTNSPRRARSVASQSIIAYTMSLGAENSVAYSNNSIAIPTNFTISVTTEILPVSMTKTSVDCTMYICGDSTECSNLLLQYGSFCTQLNRALTGIAVEQDKNTQEVFAQVKQIYKTPPIKDFGGFNFSQILPDPSKPSKRSFIEDLLFNKVTLADAGFIKQYGDCLGDIAARDLICAQKFNGLTVLPPLLTDEMIAQYTSALLAGTITSGWTFGAGAALQIPFAMQMAYRFNGIGVTQNVLYENQKLIANQFNSAIGKIQDSLSSTASALGKLQDVVNQNAQALNTLVKQLSSNFGCISSVLNDILSRLDKVEAEVQIDCLITGRLQSLQTYVTQQLIRAAEIRASANLAATKMSECVLGQSKRVDFCGKGYHLMSFPQSAPHGVVFLHVTYVPAQEKNFTTAPAICHDGKAHFPREGVFVSNGTHWFVTQRNFYEPQIITTDNTFVSGNCDVVIGIVNNTVYDPLQPELDSFKEELDKYFKNHTSPDVDLGDISGINASVVNIQKEIDRLNEVAKNLNESLIDLQELGKYEQYIKGGGGSDIIKLLNEQVNKEMQSSNLYMSMSSWCYTHSLDGAGLFLFDHAAEEYEHAKKLIIFLNENNVPVQLTSISAPEHKFEGLTQIFQKAYEHEQHISESINNIVDHAIKSKDHATFNFLQWYVAEQHEEEVLFKDILDKIELIGNENHGLYLADQYVKGIAKSRKS

SEQ ID NO: 5496 - protein, 1373 aa, Artificial Sequence
  SARS-CoV-2/pangolin/Guangxi/P4L/2017__EPI_ISL_410538 spike protein (1-1205)(A966C_R989C) Ferritin construct
MFVFLFVLPLVSSQCVNLTTRTGIPPGYTNSSTRGVYYPDKVFRSSILHLTQDLFLPFFSNVTWFNTINYQGGFKKFDNPVLPFNDGVYFASTEKSNIIRGWIFGTTLDARTQSLLIVNNATNVVIKVCEFQFCTDPFLGVYYHNNNKTWVENEFRVYSSANNCTFEYISQPFLMDLEGKQGNFKNLREFVFKNVDGYFKIYSKHTPIDLVRDLPRGFAALEPLVDLPIGINITRFQTLLALHRSYLTPGNLESGWTTGAAAYYVGYLQQRTFLLSYNQNGTITDAVDCSLDPLSETKCTLKSLTVEKGIYQTSNFRVQPTISIVRFPNITNLCPFGEVFNASKFASVYAWNRKRISNCVADYSVLYNSTSFSTFKCYGVSPTKLNDLCFTNVYADSFVVKGDEVRQIAPGQTGVIADYNYKLPDDFTGCVIAWNSVKQDALTGGNYGYLYRLFRKSKLKPFERDISTEIYQAGSTPCNGQVGLNCYYPLERYGFHPTTGVNYQPFRVVVLSFELLNGPATVCGPKLSTTLVKDKCVNFNFNGLTGTGVLTTSKKQFLPFQQFGRDISDTTDAVRDPQTLEILDITPCSFGGVSVITPGTNTSNQVAVLYQDVNCTEVPMAIHAEQLTPAWRVYSAGANVFQTRAGCLVGAEHVNNSYECDIPVGAGICASYHSMSSLRSVNQRSIIAYTMSLGAENSVAYSNNSIAIPTNFTISVTTEILPVSMTKTSVDCTMYICGDSIECSNLLLQYGSFCTQLNRALTGIAVEQDKNTQEVFAQVKQIYKTPPIKDFGGFNFSQILPDPSKPSKRSFIEDLLFNKVTLADAGFIKQYGDCLGDIAARDLICAQKFNGLTVLPPLLTDEMIAQYTSALLAGTITSGWTFGAGAALQIPFAMQMAYRFNGIGVTQNVLYENQKLIANQFNSAIGKIQDSLSSTASALGKLQDVVNQNAQALNTLVKQLSSNFGCISSVLNDILSRLDKVEAEVQIDCLITGRLQSLQTYVTQQLIRAAEIRASANLAATKMSECVLGQSKRVDFCGKGYHLMSFPQSAPHGVVFLHVTYVPAQEKNFTTAPAICHEGKAHFPREGVFVSNGTHWFITQRNFYEPQIITTDNTFVSGSCDVVIGIVNNTVYDPLQPELDSFKEELDKYFKNHTSPDVDLGDISGINASVVNIQKEIDRLNEVAKNLNESPIDLQELGKYEQYIKGGGGSDIIKLLNEQVNKEMQSSNLYMSMSSWCYTHSLDGAGLFLFDHAAEEYEHAKKLIIFLNENNVPVQLTSISAPEHKFEGLTQIFQKAYEHEQHISESINNIVDHAIKSKDHATFNFLQWYVAEQHEEEVLFKDILDKIELIGNENHGLYLADQYVKGIAKSRKS

SEQ ID NO: 5497 - protein, 1373 aa, Artificial Sequence
  SARS-CoV-2/pangolin/Guangxi/P5L/2017__EPI_ISL_410540 spike protein (1-1205)(A966C_R989C) Ferritin construct
MFVFLFVLPLVSSQCVNLTTRTGIPPGYTNSSTRGVYYPDKVFRSSILHLTQDLFLPFFSNVTWFNTINYQGGFKKFDNPVLPFNDGVYFASTEKSNIIRGWIFGTTLDARTQSLLIVNNATNVVIKVCEFQFCTDPFLGVYYHNNNKTWVENEFRVYSSANNCTFEYISQPFLMDLEGKQGNFKNLREFVFKNVDGYFKIYSKHTPIDLVRDLPRGFAALEPLVDLPIGINITRFQTLLALHRSYLTPGKLESGWTTGAAAYYVGYLQQRTFLLSYNQNGTITDAVDCSLDPLSETKCTLKSLTVEKGIYQTSNFRVQPTISIVRFPNITNLCPFGEVFNASKFASVYAWNRKRISNCVADYSVLYNSTSFSTFKCYGVSPTKLNDLCFTNVYADSFVVKGDEVRQIAPGQTGVIADYNYKLPDDFTGCVIAWNSVKQDALTGGNYGYLYRLFRKSKLKPFERDISTEIYQAGSTPCNGQVGLNCYYPLERYGFHPTTGVNYQPFRVVVLSFELLNGPATVCGPKLSTTLVKDKCVNFNFNGLTGTGVLTTSKKQFLPFQQFGRDISDTTDAVRDPQTLEILDITPCSFGGVSVITPGTNTSNQVAVLYQDVNCTEVPMAIHAEQLTPAWRVYSAGANVFQTRAGCLVGAEHVNNSYECDIPVGAGICASYHSMSSFRSVNQRSIIAYTMSLGAENSVAYSNNSIAIPTNFTISVTTEILPVSMTKTSVDCTMYICGDSIECSNLLLQYGSFCTQLNRALTGIAVEQDKNTQEVFAQVKQIYKTPPIKDFGGFNFSQILPDPSKPSKRSFIEDLLFNKVTLADAGFIKQYGDCLGDIAARDLICAQKFNGLTVLPPLLTDEMIAQYTSALLAGTITSGWTFGAGAALQIPFAMQMAYRFNGIGVTQNVLYENQKLIANQFNSAIGKIQDSLSSTASALGKLQDVVNQNAQALNTLVKQLSSNFGCISSVLNDILSRLDKVEAEVQIDCLITGRLQSLQTYVTQQLIRAAEIRASANLAATKMSECVLGQSKRVDFCGKGYHLMSFPQSAPHGVVFLHVTYVPAQEKNFTTAPAICHEGKAHFPREGVFVSNGTHWFITQRNFYEPQIITTDNTFVSGSCDVVIGIVNNTVYDPLQPELDSFKEELDKYFKNHTSPDVDLGDISGINASVVNIQKEIDRLNEVAKNLNESLIDLQELGKYEQYIKGGGGSDIIKLLNEQVNKEMQSSNLYMSMSSWCYTHSLDGAGLFLFDHAAEEYEHAKKLIIFLNENNVPVQLTSISAPEHKFEGLTQIFQKAYEHEQHISESINNIVDHAIKSKDHATFNFLQWYVAEQHEEEVLFKDILDKIELIGNENHGLYLADQYVKGIAKSRKS

SEQ ID NO: 5498 - protein, 1373 aa, Artificial Sequence
  SARS-CoV-2/pangolin/Guangxi/P5E/2017__EPI_ISL_410541 spike protein (1-1205)(A966C_R989C) Ferritin construct
MFVFLFVLPLVSSQCVNLTTRTGIPPGYTNSSTRGVYYPDKVFRSSILHLTQDLFLPFFSNVTWFNTITYQGGSKKFDNPVLPFNDGVYFASTEKSNIIRGWIFGTTLDARTQSLLIVNNATNVVIKVCEFQFCTDPFLGVYYHNNNKTWVENEFRVYSSANNCTFEYISQPFLMDLEGKQGNFKNLREFVFKNVDGYFKIYSKHTPIDLVRDLPRGFAALEPLVDLPIGINITRFQTLLALHRSYLTPGKLESGWTTGAAAYYVGYLQQRTFLLSYNQNGTITDAVDCSLDPLSETKCTLKSLTVEKGIYQTSNFRVQPTISIVRFPNITNLCPFGEVFNASKFASVYAWNRKRISNCVADYSVLYNSTSFSTFKCYGVSPTKLNDLCFTNVYADSFVVKGDEVRQIAPGQTGVIADYNYKLPDDFTGCVIAWNSVKQDALTGDNYGYLYRLFRKSKLKPFERDISTEIYQAGSTPCNGQVGLNCYYPLERYGFHPTTGVNYQPFRVVVLSFELLNGPATVCGPKLSTTLVKDKCVNFNFNGLTGTGVLTTSKKQFLPFQQFGRDISDTTDAVRDPQTLEILDITPCSFGGVSVITPGTNTSNQVAVLYQDVNCTEVPMAIHAEQLTPAWRVYSAGANVFQTRAGCLVGAEHVNNSYECDIPVGAGICASYHSMSSFRSVNQRSIIAYTMSLGAENSVAYSNNSIAIPTNFTISVTTEILPVSMTKTSVDCTMYICGDSIECSNLLLQYGSFCTQLNRALTGIAVEQDKNTQEVFAQVKQIYKTPPIKDFGGFNFSQILPDPSKPSKRSFIEDLLFNKVTLADAGFIKQYGDCLGDIAARDLICAQKFNGLTVLPPLLTDEMIAQYTSALLAGTITSGWTFGAGAALQIPFAMQMAYRFNGIGVTQNVLYENQKLIANQFNSAIGKIQDSLSSTASALGKLQDVVNQNAQALNTLVKQLSSNFGCISSVLNDILSRLDKVEAEVQIDCLITGRLQSLQTYVTQQLIRAAEIRASANLAATKMSECVLGQSKRVDFCGKGYHLMSFPQSAPHGVVFLHVTYVPAQEKNFTTAPAICHEGKAHFPREGVFVSNGTHWFITQRNFYEPQIITTDNTFVSGSCDVVIGIVNNTVYDPLQPELDSFKEELDKYFKNHTSPDVDLGDISGINASVVNIQKEIDRLNEVAKNLNESLIDLQELGKYEQYIKGGGGSDIIKLLNEQVNKEMQSSNLYMSMSSWCYTHSLDGAGLFLFDHAAEEYEHAKKLIIFLNENNVPVQLTSISAPEHKFEGLTQIFQKAYEHEQHISESINNIVDHAIKSKDHATFNFLQWYVAEQHEEEVLFKDILDKIELIGNENHGLYLADQYVKGIAKSRKS

SEQ ID NO: 5499 - protein, 1371 aa, Artificial Sequence
  SARS-CoV-2/pangolin/Guangxi/P1E/2017__EPI_ISL_410539 spike protein (1-1203)(A964C_R987C) Ferritin construct
MFVFLFVLPLVSSQCVNLTTRTGIQPGYTNSSTRGVYYPDKVFRSSILHLTQDLFLPFFSNVTWFNTINYQGGFKKFDNPVLPFNDGVYFASTEKSNIIRGWIFGTTLDARTQSLLIVNNATNVVIKVCEFQFCTDPFLGVYYHNNNKTWVENEFRVYSSANNCTFEYISQPFLMDLEGKQGNFKNLREFVFKNVDGYFKIYSKHTPIDLVRDLPRGFAALEPLVDLPIGINITRFQTLLALHRSYLTPGKLESGWTTGAAAYYVGYLQQRTFLLSYNQNGTITDAVDCSLDPLSETKCTLKSLTVEKGIYQTSNFRVQPTISIVRFPNITNLCPFGEVFNASKFASVYAWNRKRISNCVADYSVLYNSTSFSTFKCYGVSPTKLNDLCFTNVYADSFVVKGDEVRQIAPGQTGVIADYNYKLPDDFTGCVIAWNSVKQDALTGGNYLYRLFRKSKLKPFERDISTEIYQAGSTPCNGQVGLNCYYPLERYGFHPTTGVNYQPFRVVVLSFELLNGPATVCGPKLSTTLVKDKCVNFNFNGLTGTGVLTTSKKQFLPFQQFGRDISDTTDAVRDPQTLEILDITPCSFGGVSVITPGTNTSNQVAVLYQDVNCTEVPMAIHAEQLTPAWRVYSAGANVFQTRAGCLVGAEHVNNSYECDIPVGAGICASYHSMSSLRSVNQRSIIAYTMSLGAENSVAYSNNSIAIPTNFTISVTTEILPVSMTKTSVDCTMYICGDSIECSNLLLQYGSFCTQLNRALTGIAVEQDKNTQEVFAQVKQIYKTPPIKDFGGFNFSQILPDPSKPSKRSFIEDLLFNKVTLADAGFIKQYGDCLGDIAARDLICAQKFNGLTVLPPLLTDEMIAQYTSALLAGTITSGWTFGAGAALQIPFAMQMAYRFNGIGVTQNVLYENQKLIANQFNSAIGKIQDSLSSTASALGKLQDVVNQNAQALNTLVKQLSSNFGCISSVLNDILSRLDKVEAEVQIDCLITGRLQSLQTYVTQQLIRAAEIRASANLAATKMSECVLGQSKRVDFCGKGYHLMSFPQSAPHGVVFLHVTYVPAQEKNFTTAPAICHEGKAHFPREGVFVSNGTHWFITQRNFYEPQIITTDNTFVSGSCDVVIGIVNNTVYDPLQPELDSFKEELDKYFKNHTSPDVDLGDISGINASVVNIQKEIDRLNEVAKNLNESLIDLQELGKYEQYIKGGGGSDIIKLLNEQVNKEMQSSNLYMSMSSWCYTHSLDGAGLFLFDHAAEEYEHAKKLIIFLNENNVPVQLTSISAPEHKFEGLTQIFQKAYEHEQHISESINNIVDHAIKSKDHATFNFLQWYVAEQHEEEVLFKDILDKIELIGNENHGLYLADQYVKGIAKSRKS

SEQ ID NO: 5500 - protein, 1379 aa, Artificial Sequence
  SARS-CoV-2/Wuhan/WIV05/2019__EPI_ISL_402128 spike protein (1-1211)(A890C_V1040C) Ferritin construct
MFVFLVLLPLVSSQCVNLTTRTQLPPAYTNSFTRGVYYPDKVFRSSVLHSTQDLFLPFFSNVTWFHAIHVSGTNGTKRFDNPVLPFNDGVYFASTEKSNIIRGWIFGTTLDSKTQSLLIVNNATNVVIKVCEFQFCNDPFLGVYYHKNNKSWMESEFRVYSSANNCTFEYVSQPFLMDLEGKQGNFKNLREFVFKNIDGYFKIYSKHTPINLVRDLPQGFSALEPLVDLPIGINITRFQTLLALHRSYLTPGDSSSGWTAGAAAYYVGYLQPRTFLLKYNENGTITDAVDCALDPLSETKCTLKSFTVEKGIYQTSNFRVQPTESIVRFPNITNLCPFGEVFNATRFASVYAWNRKRISNCVADYSVLYNSASFSTFKCYGVSPTKLNDLCFTNVYADSFVIRGDEVRQIAPGQTGKIADYNYKLPDDFTGCVIAWNSNNLDSKVGGNYNYLYRLFRKSNLKPFERDISTEIYQAGSTPCNGVEGFNCYFPLQSYGFQPTNGVGYQPYRVVVLSFELLHAPATVCGPKKSTNLVKNKCVNFNFNGLTGTGVLTESNKKFLPFQQFGRDIADTTDAVRDPQTLEILDITPCSFGGVSVITPGTNTSNQVAVLYQDVNCTEVPVAIHADQLTPTWRVYSTGSNVFQTRAGCLIGAEHVNNSYECDIPIGAGICASYQTQTNSPRRARSVASQSIIAYTMSLGAENSVAYSNNSIAIPTNFTISVTTEILPVSMTKTSVDCTMYICGDSTECSNLLLQYGSFCTQLNRALTGIAVEQDKNTQEVFAQVKQIYKTPPIKDFGGFNFSQILPDPSKPSKRSFIEDLLFNKVTLADAGFIKQYGDCLGDIAARDLICAQKFNGLTVLPPLLTDEMIAQYTSALLAGTITSGWTFGCGAALQIPFAMQMAYRFNGIGVTQNVLYENQKLIANQFNSAIGKIQDSLSSTASALGKLQDVVNQNAQALNTLVKQLSSNFGAISSVLNDILSRLDKVEAEVQIDRLITGRLQSLQTYVTQQLIRAAEIRASANLAATKMSECVLGQSKRCDFCGKGYHLMSFPQSAPHGVVFLHVTYVPAQEKNFTTAPAICHDGKAHFPREGVFVSNGTHWFVTQRNFYEPQIITTDNTFVSGNCDVVIGIVNNTVYDPLQPELDSFKEELDKYFKNHTSPDVDLGDISGINASVVNIQKEIDRLNEVAKNLNESLIDLQELGKYEQYIKGGGGSDIIKLLNEQVNKEMQSSNLYMSMSSWCYTHSLDGAGLFLFDHAAEEYEHAKKLIIFLNENNVPVQLTSISAPEHKFEGLTQIFQKAYEHEQHISESINNIVDHAIKSKDHATFNFLQWYVAEQHEEEVLFKDILDKIELIGNENHGLYLADQYVKGIAKSRKS

SEQ ID NO: 5501 - protein, 1375 aa, Artificial Sequence; identical to SEQ ID NO: 5233
  SARS-CoV-2/bat/Yunnan/RaTG13/2013__EPI_ISL_402131 spike protein (1-1207)(A886C_V1036C) Ferritin construct

SEQ ID NO: 5502 - protein, 1379 aa, Artificial Sequence; identical to SEQ ID NO: 5234
  SARS-CoV-2/Wuhan/HBCDC-HB-01/2019__EPI_ISL_402132 spike protein (1-1211)(A890C_V1040C) Ferritin construct

SEQ ID NO: 5503 - protein, 1379 aa, Artificial Sequence; identical to SEQ ID NO: 5235
  SARS-CoV-2/Guangdong/20SF028/2020__EPI_ISL_403936 spike protein (1-1211)(A890C_V1040C) Ferritin construct

SEQ ID NO: 5504 - protein, 1379 aa, Artificial Sequence; identical to SEQ ID NO: 5236
  SARS-CoV-2/Shenzhen/SZTH-001/2020__EPI_ISL_406592 spike protein (1-1211)(A890C_V1040C) Ferritin construct

SEQ ID NO: 5505 - protein, 1379 aa, Artificial Sequence; identical to SEQ ID NO: 5237
  SARS-CoV-2/Shenzhen/SZTH-004/2020__EPI_ISL_406595 spike protein (1-1211)(A890C_V1040C) Ferritin construct

SEQ ID NO: 5506 - protein, 1379 aa, Artificial Sequence; identical to SEQ ID NO: 5238
  SARS-CoV-2/France/IDF0372/2020__EPI_ISL_406596 spike protein (1-1211)(A890C_V1040C) Ferritin construct

SEQ ID NO: 5507 - protein, 1379 aa, Artificial Sequence; identical to SEQ ID NO: 5239
  SARS-CoV-2/Australia/VIC01/2020__EPI_ISL_406844 spike protein (1-1211)(A890C_V1040C) Ferritin construct

SEQ ID NO: 5508 - protein, 1379 aa, Artificial Sequence; identical to SEQ ID NO: 5240
  SARS-CoV-2/Germany/BavPat1/2020__EPI_ISL_406862 spike protein (1-1211)(A890C_V1040C) Ferritin construct

SEQ ID NO: 5509 - protein, 1379 aa, Artificial Sequence; identical to SEQ ID NO: 5241
  SARS-CoV-2/Wuhan/HBCDC-HB-02/2020__EPI_ISL_412978 spike protein (1-1211)(A890C_V1040C) Ferritin construct

SEQ ID NO: 5510 - protein, 1379 aa, Artificial Sequence; identical to SEQ ID NO: 5242
  SARS-CoV-2/Australia/QLD02/2020__EPI_ISL_407896 spike protein (1-1211)(A890C_V1040C) Ferritin construct

SEQ ID NO: 5511 - protein, 1379 aa, Artificial Sequence; identical to SEQ ID NO: 5243
  SARS-CoV-2/India/1-31/2020__EPI_ISL_413523 spike protein (1-1211)(A890C_V1040C) Ferritin construct

SEQ ID NO: 5512 - protein, 1379 aa, Artificial Sequence; identical to SEQ ID NO: 5244
  SARS-CoV-2/Guangdong/GD2020087-P0008/2020__EPI_ISL_413863 spike protein (1-1211)(A890C_V1040C) Ferritin construct

SEQ ID NO: 5513 - protein, 1379 aa, Artificial Sequence; identical to SEQ ID NO: 5245
  SARS-CoV-2/Sweden/01/2020__EPI_ISL_411951 spike protein (1-1211)(A890C_V1040C) Ferritin construct

SEQ ID NO: 5514 - protein, 1379 aa, Artificial Sequence; identical to SEQ ID NO: 5246
  SARS-CoV-2/Tianmen/HBCDC-HB-07/2020__EPI_ISL_412983 spike protein (1-1211)(A890C_V1040C) Ferritin construct

SEQ ID NO: 5515 - protein, 1379 aa, Artificial Sequence; identical to SEQ ID NO: 5247
  SARS-CoV-2/Hong Kong/case42_VM20002493/2020__EPI_ISL_414527 spike protein (1-1211)(A890C_V1040C) Ferritin construct

SEQ ID NO: 5516 - protein, 1379 aa, Artificial Sequence; identical to SEQ ID NO: 5248
  SARS-CoV-2/USA/CruiseA-23/2020__EPI_ISL_414482 spike protein (1-1211)(A890C_V1040C) Ferritin construct

SEQ ID NO: 5517 - protein, 1379 aa, Artificial Sequence; identical to SEQ ID NO: 5249
  SARS-CoV-2/Hong Kong/case85_VM20002868/2020__EPI_ISL_414519 spike protein (1-1211)(A890C_V1040C) Ferritin construct

SEQ ID NO: 5518 - protein, 1379 aa, Artificial Sequence; identical to SEQ ID NO: 5240
  SARS-CoV-2/England/200990660/2020__EPI_ISL_414523 spike protein (1-1211)(A890C_V1040C) Ferritin construct

SEQ ID NO: 5519 - protein, 1379 aa, Artificial Sequence; identical to SEQ ID NO: 5251
  SARS-CoV-2/Australia/NSW09/2020__EPI_ISL_413595 spike protein (1-1211)(A890C_V1040C) Ferritin construct

SEQ ID NO: 5520 - protein, 1379 aa, Artificial Sequence; identical to SEQ ID NO: 5232
  SARS-CoV-2/Australia/NSW10/2020__EPI_ISL_413596 spike protein (1-1211)(A890C_V1040C) Ferritin construct

SEQ ID NO: 5521 - protein, 1379 aa, Artificial Sequence; identical to SEQ ID NO: 5253
  SARS-CoV-2/Switzerland/1000477797/2020__EPI_ISL_413023 spike protein (1-1211)(A890C_V1040C) Ferritin construct

SEQ ID NO: 5522 - protein, 1379 aa, Artificial Sequence; identical to SEQ ID NO: 5254
  SARS-CoV-2/Belgium/BA-02291/2020__EPI_ISL_415159 spike protein (1-1211)(A890C_V1040C) Ferritin construct

SEQ ID NO: 5523 - protein, 1379 aa, Artificial Sequence; identical to SEQ ID NO: 5255
  SARS-CoV-2/USA/WA8-UW5/2020__EPI_ISL_413486 spike protein (1-1211)(A890C_V1040C) Ferritin construct

SEQ ID NO: 5524 - protein, 1379 aa, Artificial Sequence; identical to SEQ ID NO: 5256
  SARS-CoV-2/England/20102000506/2020__EPI_ISL_415147 spike protein (1-1211)(A890C_V1040C) Ferritin construct

SEQ ID NO: 5525 - protein, 1379 aa, Artificial Sequence; identical to SEQ ID NO: 5257
  SARS-CoV-2/Belgium/VAG-03013/2020__EPI_ISL_415155 spike protein (1-1211)(A890C_V1040C) Ferritin construct

SEQ ID NO: 5526 - protein, 1379 aa, Artificial Sequence; identical to SEQ ID NO: 5258
  SARS-CoV-2/Belgium/BC-03016/2020__EPI_ISL_415157 spike protein (1-1211)(A890C_V1040C) Ferritin construct

SEQ ID NO: 5527 - protein, 1379 aa, Artificial Sequence; identical to SEQ ID NO: 5259
  SARS-CoV-2/Germany/BavPat3/2020__EPI_ISL_414521 spike protein (1-1211)(A890C_V1040C) Ferritin construct

SEQ ID NO: 5528 - protein, 1379 aa, Artificial Sequence; identical to SEQ ID NO: 5260
  SARS-CoV-2/France/HF1805/2020__EPI_ISL_414628 spike protein (1-1211)(A890C_V1040C) Ferritin construct

SEQ ID NO: 5529 - protein, 1379 aa, Artificial Sequence; identical to SEQ ID NO: 5261
  SARS-CoV-2/Netherlands/ZuidHolland_9/2020__EPI_ISL_414445 spike protein (1-1211)(A890C_V1040C) Ferritin construct

SEQ ID NO: 5530 - protein, 1379 aa, Artificial Sequence; identical to SEQ ID NO: 5262
  SARS-CoV-2/Finland/FIN03032020A/2020__EPI_ISL_413602 spike protein (1-1211)(A890C_V1040C) Ferritin construct

SEQ ID NO: 5531 - protein, 1379 aa, Artificial Sequence; identical to SEQ ID NO: 5263
  SARS-CoV-2/France/GE1977/2020__EPI_ISL_414632 spike protein (1-1211)(A890C_V1040C) Ferritin construct

SEQ ID NO: 5532 - protein, 1379 aa, Artificial Sequence; identical to SEQ ID NO: 5264
  SARS-CoV-2/Finland/FIN-313/2020__EPI_ISL_414641 spike protein (1-1211)(A890C_V1040C) Ferritin construct

SEQ ID NO: 5533 - protein, 1379 aa, Artificial Sequence; identical to SEQ ID NO: 5265
  SARS-CoV-2/Netherlands/ZuidHolland_2/2020__EPI_ISL_414556 spike protein (1-1211)(A890C_V1040C) Ferritin construct

SEQ ID NO: 5534 - protein, 1379 aa, Artificial Sequence; identical to SEQ ID NO: 5266
  SARS-CoV-2/USA/WA-UW31/2020__EPI_ISL_414618 spike protein (1-1211)(A890C_V1040C) Ferritin construct

SEQ ID NO: 5535 - protein, 1379 aa, Artificial Sequence; identical to SEQ ID NO: 5267
  SARS-CoV-2/South Korea/SNU01/2020__EPI_ISL_411929 spike protein (1-1211)(A890C_V1040C) Ferritin construct

SEQ ID NO: 5536 - protein, 1379 aa, Artificial Sequence; identical to SEQ ID NO: 5268
  SARS-CoV-2/China/WF0004/2020__EPI_ISL_413694 spike protein (1-1211)(A890C_V1040C) Ferritin construct

SEQ ID NO: 5537 - protein, 1379 aa, Artificial Sequence; identical to SEQ ID NO: 5269
  SARS-CoV-2/China/WF0028/2020__EPI_ISL_413791 spike protein (1-1211)(A890C_V1040C) Ferritin construct

SEQ ID NO: 5538 - protein, 1379 aa, Artificial Sequence; identical to SEQ ID NO: 5270
  SARS-CoV-2/2019-nCoV/USA-CruiseA-18/2020__MT159716.1 spike protein (1-1211)(A890C_V1040C) Ferritin construct

SEQ ID NO: 5539 - protein, 1379 aa, Artificial Sequence; identical to SEQ ID NO: 5271
  SARS-CoV-2/SARS-CoV-2/Yunnan-01/human/2020/CHN__MT049951.1 spike protein (1-1211)(A890C_V1040C) Ferritin construct

SEQ ID NO: 5540 - protein, 1379 aa, Artificial Sequence; identical to SEQ ID NO: 5272
  SARS-CoV-2/USA/WA-UW292/2020__EPI_ISL_418077 spike protein (1-1211)(A890C_V1040C) Ferritin construct

SEQ ID NO: 5541 - protein, 1379 aa, Artificial Sequence; identical to SEQ ID NO: 5273
  SARS-CoV-2/Iceland/192/2020__EPI_ISL_417819 spike protein (1-1211)(A890C_V1040C) Ferritin construct

SEQ ID NO: 5542 - protein, 1379 aa, Artificial Sequence; identical to SEQ ID NO: 5274
  SARS-CoV-2/Belgium/ULG-6939/2020__EPI_ISL_417020 spike protein (1-1211)(A890C_V1040C) Ferritin construct

SEQ ID NO: 5543 - protein, 1379 aa, Artificial Sequence; identical to SEQ ID NO: 5275
  SARS-CoV-2/France/HF2496/2020__EPI_ISL_418231 spike protein (1-1211)(A890C_V1040C) Ferritin construct

SEQ ID NO: 5544 - protein, 1379 aa, Artificial Sequence; identical to SEQ ID NO: 5276
  SARS-CoV-2/USA/WA-UW291/2020__EPI_ISL_418076 spike protein (1-1211)(A890C_V1040C) Ferritin construct

SEQ ID NO: 5545 - protein, 1379 aa, Artificial Sequence; identical to SEQ ID NO: 5240
  SARS-CoV-2/Portugal/PT0034/2020__EPI_ISL_418019 spike protein (1-1211)(A890C_V1040C) Ferritin construct

SEQ ID NO: 5546 - protein, 1379 aa, Artificial Sequence; identical to SEQ ID NO: 5278
  SARS-CoV-2/Iceland/202/2020__EPI_ISL_417750 spike protein (1-1211)(A890C_V1040C) Ferritin construct

SEQ ID NO: 5547 - protein, 1379 aa, Artificial Sequence; identical to SEQ ID NO: 5279
  SARS-CoV-2/USA/WA-UW261/2020__EPI_ISL_418046 spike protein (1-1211)(A890C_V1040C) Ferritin construct

SEQ ID NO: 5548 - protein, 1379 aa, Artificial Sequence; identical to SEQ ID NO: 5280
  SARS-CoV-2/Portugal/PT0035/2020__EPI_ISL_418020 spike protein (1-1211)(A890C_V1040C) Ferritin construct

SEQ ID NO: 5549 - protein, 1379 aa, Artificial Sequence; identical to SEQ ID NO: 5281
  SARS-CoV-2/USA/NY-NYUMC7/2020__EPI_ISL_418192 spike protein (1-1211)(A890C_V1040C) Ferritin construct

SEQ ID NO: 5550 - protein, 1379 aa, Artificial Sequence; identical to SEQ ID NO: 5282
  SARS-CoV-2/Iceland/189/2020__EPI_ISL_417709 spike protein (1-1211)(A890C_V1040C) Ferritin construct

SEQ ID NO: 5551 - protein, 1379 aa, Artificial Sequence; identical to SEQ ID NO: 5283
  SARS-CoV-2/Australia/NSW56/2020__EPI_ISL_417408 spike protein (1-1211)(A890C_V1040C) Ferritin construct

SEQ ID NO: 5552 - protein, 1379 aa, Artificial Sequence; identical to SEQ ID NO: 5284
  SARS-CoV-2/Iceland/280/2020__EPI_ISL_417608 spike protein (1-1211)(A890C_V1040C) Ferritin construct

SEQ ID NO: 5553 - protein, 1379 aa, Artificial Sequence; identical to SEQ ID NO: 5240
  SARS-CoV-2/Iceland/247/2020__EPI_ISL_417575 spike protein (1-1211)(A890C_V1040C) Ferritin construct

SEQ ID NO: 5554 - protein, 1379 aa, Artificial Sequence; identical to SEQ ID NO: 5286
  SARS-CoV-2/Iceland/238/2020__EPI_ISL_417566 spike protein (1-1211)(A890C_V1040C) Ferritin construct

SEQ ID NO: 5555 - protein, 1379 aa, Artificial Sequence; identical to SEQ ID NO: 5287
  SARS-CoV-2/Greece/16/2020__EPI_ISL_418265 spike protein (1-1211)(A890C_V1040C) Ferritin construct

SEQ ID NO: 5556 - protein, 1379 aa, Artificial Sequence; identical to SEQ ID NO: 5288
  SARS-CoV-2/Iceland/319/2020__EPI_ISL_417648 spike protein (1-1211)(A890C_V1040C) Ferritin construct

SEQ ID NO: 5557 - protein, 1379 aa, Artificial Sequence; identical to SEQ ID NO: 5289
  SARS-CoV-2/Congo/94/2020__EPI_ISL_417947 spike protein (1-1211)(A890C_V1040C) Ferritin construct

SEQ ID NO: 5558 - protein, 1379 aa, Artificial Sequence; identical to SEQ ID NO: 5290
  SARS-CoV-2/Congo/158/2020__EPI_ISL_417950 spike protein (1-1211)(A890C_V1040C) Ferritin construct

SEQ ID NO: 5559 - protein, 1379 aa, Artificial Sequence; identical to SEQ ID NO: 5291
  SARS-CoV-2/USA/UT-00034/2020__EPI_ISL_417977 spike protein (1-1211)(A890C_V1040C) Ferritin construct

SEQ ID NO: 5560 - protein, 1379 aa, Artificial Sequence; identical to SEQ ID NO: 5292
  SARS-CoV-2/USA/UT-00033/2020__EPI_ISL_417976 spike protein (1-1211)(A890C_V1040C) Ferritin construct

SEQ ID NO: 5561 - protein, 1379 aa, Artificial Sequence; identical to SEQ ID NO: 5293
  SARS-CoV-2/USA/WI-13/2020__EPI_ISL_417516 spike protein (1-1211)(A890C_V1040C) Ferritin construct

SEQ ID NO: 5562 - protein, 1378 aa, Artificial Sequence; identical to SEQ ID NO: 5294
  SARS-CoV-2/India/1-27/2020__EPI_ISL_413522 spike protein (1-1210)(A889C_V1039C) Ferritin construct

SEQ ID NO: 5563 - protein, 1373 aa, Artificial Sequence; identical to SEQ ID NO: 5295
  SARS-CoV-2/pangolin/Guangxi/P4L/2017__EPI_ISL_410538 spike protein (1-1205)(A884C_V1034C) Ferritin construct

SEQ ID NO: 5564 - protein, 1373 aa, Artificial Sequence; identical to SEQ ID NO: 5296
  SARS-CoV-2/pangolin/Guangxi/P5L/2017__EPI_ISL_410540 spike protein (1-1205)(A884C_V1034C) Ferritin construct

SEQ ID NO: 5565 - protein, 1373 aa, Artificial Sequence; identical to SEQ ID NO: 5297
  SARS-CoV-2/pangolin/Guangxi/P5E/2017__EPI_ISL_410541 spike protein (1-1205)(A884C_V1034C) Ferritin construct

SEQ ID NO: 5566 - protein, 1371 aa, Artificial Sequence; identical to SEQ ID NO: 5298
  SARS-CoV-2/pangolin/Guangxi/P1E/2017__EPI_ISL_410539 spike protein (1-1203)(A882C_V1032C) Ferritin construct

SEQ ID NO: 5567 - protein, 1379 aa, Artificial Sequence
  SARS-CoV-2/Wuhan/WIV05/2019__EPI_ISL_402128 spike protein (1-1211)(T874C_S1055C) Ferritin construct
MFVFLVLLPLVSSQCVNLTTRTQLPPAYTNSFTRGVYYPDKVFRSSVLHSTQDLFLPFFSNVTWFHAIHVSGTNGTKRFDNPVLPFNDGVYFASTEKSNIIRGWIFGTTLDSKTQSLLIVNNATNVVIKVCEFQFCNDPFLGVYYHKNNKSWMESEFRVYSSANNCTFEYVSQPFLMDLEGKQGNFKNLREFVFKNIDGYFKIYSKHTPINLVRDLPQGFSALEPLVDLPIGINITRFQTLLALHRSYLTPGDSSSGWTAGAAAYYVGYLQPRTFLLKYNENGTITDAVDCALDPLSETKCTLKSFTVEKGIYQTSNFRVQPTESIVRFPNITNLCPFGEVFNATRFASVYAWNRKRISNCVADYSVLYNSASFSTFKCYGVSPTKLNDLCFTNVYADSFVIRGDEVRQIAPGQTGKIADYNYKLPDDFTGCVIAWNSNNLDSKVGGNYNYLYRLFRKSNLKPFERDISTEIYQAGSTPCNGVEGFNCYFPLQSYGFQPTNGVGYQPYRVVVLSFELLHAPATVCGPKKSTNLVKNKCVNFNFNGLTGTGVLTESNKKFLPFQQFGRDIADTTDAVRDPQTLEILDITPCSFGGVSVITPGTNTSNQVAVLYQDVNCTEVPVAIHADQLTPTWRVYSTGSNVFQTRAGCLIGAEHVNNSYECDIPIGAGICASYQTQTNSPRRARSVASQSIIAYTMSLGAENSVAYSNNSIAIPTNFTISVTTEILPVSMTKTSVDCTMYICGDSTECSNLLLQYGSFCTQLNRALTGIAVEQDKNTQEVFAQVKQIYKTPPIKDFGGFNFSQILPDPSKPSKRSFIEDLLFNKVTLADAGFIKQYGDCLGDIAARDLICAQKFNGLTVLPPLLTDEMIAQYCSALLAGTITSGWTFGAGAALQIPFAMQMAYRFNGIGVTQNVLYENQKLIANQFNSAIGKIQDSLSSTASALGKLQDVVNQNAQALNTLVKQLSSNFGAISSVLNDILSRLDKVEAEVQIDRLITGRLQSLQTYVTQQLIRAAEIRASANLAATKMSECVLGQSKRVDFCGKGYHLMSFPQCAPHGVVFLHVTYVPAQEKNFTTAPAICHDGKAHFPREGVFVSNGTHWFVTQRNFYEPQIITTDNTFVSGNCDVVIGIVNNTVYDPLQPELDSFKEELDKYFKNHTSPDVDLGDISGINASVVNIQKEIDRLNEVAKNLNESLIDLQELGKYEQYIKGGGGSDIIKLLNEQVNKEMQSSNLYMSMSSWCYTHSLDGAGLFLFDHAAEEYEHAKKLIIFLNENNVPVQLTSISAPEHKFEGLTQIFQKAYEHEQHISESINNIVDHAIKSKDHATFNFLQWYVAEQHEEEVLFKDILDKIELIGNENHGLYLADQYVKGIAKSRKS

SEQ ID NO: 5568 - protein, 1375 aa, Artificial Sequence
  SARS-CoV-2/bat/Yunnan/RaTG13/2013__EPI_ISL_402131 spike protein (1-1207)(T870C_S1051C) Ferritin construct
MFVFLVLLPLVSSQCVNLTTRTQLPPAYTNSSTRGVYYPDKVFRSSVLHLTQDLFLPFFSNVTWFHAIHVSGTNGIKRFDNPVLPFNDGVYFASTEKSNIIRGWIFGTTLDSKTQSLLIVNNATNVVIKVCEFQFCNDPFLGVYYHKNNKSWMESEFRVYSSANNCTFEYVSQPFLMDLEGKQGNFKNLREFVFKNIDGYFKIYSKHTPINLVRDLPPGFSALEPLVDLPIGINITRFQTLLALHRSYLTPGDSSSGWTAGAAAYYVGYLQPRTFLLKYNENGTITDAVDCALDPLSETKCTLKSFTVEKGIYQTSNFRVQPTDSIVRFPNITNLCPFGEVFNATTFASVYAWNRKRISNCVADYSVLYNSTSFSTFKCYGVSPTKLNDLCFTNVYADSFVITGDEVRQIAPGQTGKIADYNYKLPDDFTGCVIAWNSKHIDAKEGGNFNYLYRLFRKANLKPFERDISTEIYQAGSKPCNGQTGLNCYYPLYRYGFYPTDGVGHQPYRVVVLSFELLNAPATVCGPKKSTNLVKNKCVNFNFNGLTGTGVLTESNKKFLPFQQFGRDIADTTDAVRDPQTLEILDITPCSFGGVSVITPGTNASNQVAVLYQDVNCTEVPVAIHADQLTPTWRVYSTGSNVFQTRAGCLIGAEHVNNSYECDIPIGAGICASYQTQTNSRSVASQSIIAYTMSLGAENSVAYSNNSIAIPTNFTISVTTEILPVSMTKTSVDCTMYICGDSTECSNLLLQYGSFCTQLNRALTGIAVEQDKNTQEVFAQVKQIYKTPPIKDFGGFNFSQILPDPSKPSKRSFIEDLLFNKVTLADAGFIKQYGDCLGDIAARDLICAQKFNGLTVLPPLLTDEMIAQYCSALLAGTITSGWTFGAGAALQIPFAMQMAYRFNGIGVTQNVLYENQKLIANQFNSAIGKIQDSLSSTASALGKLQDVVNQNAQALNTLVKQLSSNFGAISSVLNDILSRLDKVEAEVQIDRLITGRLQSLQTYVTQQLIRAAEIRASANLAATKMSECVLGQSKRVDFCGKGYHLMSFPQCAPHGVVFLHVTYVPAQEKNFTTAPAICHDGKAHFPREGVFVSNGTHWFVTQRNFYEPQIITTDNTFVSGSCDVVIGIVNNTVYDPLQPELDSFKEELDKYFKNHTSPDVDLGDISGINASVVNIQKEIDRLNEVAKNLNESLIDLQELGKYEQYIKGGGGSDIIKLLNEQVNKEMQSSNLYMSMSSWCYTHSLDGAGLFLFDHAAEEYEHAKKLIIFLNENNVPVQLTSISAPEHKFEGLTQIFQKAYEHEQHISESINNIVDHAIKSKDHATFNFLQWYVAEQHEEEVLFKDILDKIELIGNENHGLYLADQYVKGIAKSRKS

SEQ ID NO: 5569 - protein, 1379 aa, Artificial Sequence
  SARS-CoV-2/Wuhan/HBCDC-HB-01/2019__EPI_ISL_402132 spike protein (1-1211)(T874C_S1055C) Ferritin construct
MFVFLVLLPLVSSQCVNLTTRTQLPPAYTNSITRGVYYPDKVFRSSVLHSTQDLFLPFFSNVTWFHAIHVSGTNGTKRFDNPVLPFNDGVYFASTEKSNIIRGWIFGTTLDSKTQSLLIVNNATNVVIKVCEFQFCNDPFLGVYYHKNNKSWMESEFRVYSSANNCTFEYVSQPFLMDLEGKQGNFKNLREFVFKNIDGYFKIYSKHTPINLVRDLPQGFSALEPLVDLPIGINITRFQTLLALHRSYLTPGDSSSGWTAGAAAYYVGYLQPRTFLLKYNENGTITDAVDCALDPLSETKCTLKSFTVEKGIYQTSNFRVQPTESIVRFPNITNLCPFGEVFNATRFASVYAWNRKRISNCVADYSVLYNSASFSTFKCYGVSPTKLNDLCFTNVYADSFVIRGDEVRQIAPGQTGKIADYNYKLPDDFTGCVIAWNSNNLDSKVGGNYNYLYRLFRKSNLKPFERDISTEIYQAGSTPCNGVEGFNCYFPLQSYGFQPTNGVGYQPYRVVVLSFELLHAPATVCGPKKSTNLVKNKCVNFNFNGLTGTGVLTESNKKFLPFQQFGRDIADTTDAVRDPQTLEILDITPCSFGGVSVITPGTNTSNQVAVLYQDVNCTEVPVAIHADQLTPTWRVYSTGSNVFQTRAGCLIGAEHVNNSYECDIPIGAGICASYQTQTNSPRRARSVASQSIIAYTMSLGAENSVAYSNNSIAIPTNFTISVTTEILPVSMTKTSVDCTMYICGDSTECSNLLLQYGSFCTQLNRALTGIAVEQDKNTQEVFAQVKQIYKTPPIKDFGGFNFSQILPDPSKPSKRSFIEDLLFNKVTLADAGFIKQYGDCLGDIAARDLICAQKFNGLTVLPPLLTDEMIAQYCSALLAGTITSGWTFGAGAALQIPFAMQMAYRFNGIGVTQNVLYENQKLIANQFNSAIGKIQDSLSSTASALGKLQDVVNQNAQALNTLVKQLSSNFGAISSVLNDILSRLDKVEAEVQIDRLITGRLQSLQTYVTQQLIRAAEIRASANLAATKMSECVLGQSKRVDFCGKGYHLMSFPQCAPHGVVFLHVTYVPAQEKNFTTAPAICHDGKAHFPREGVFVSNGTHWFVTQRNFYEPQIITTDNTFVSGNCDVVIGIVNNTVYDPLQPELDSFKEELDKYFKNHTSPDVDLGDISGINASVVNIQKEIDRLNEVAKNLNESLIDLQELGKYEQYIKGGGGSDIIKLLNEQVNKEMQSSNLYMSMSSWCYTHSLDGAGLFLFDHAAEEYEHAKKLIIFLNENNVPVQLTSISAPEHKFEGLTQIFQKAYEHEQHISESINNIVDHAIKSKDHATFNFLQWYVAEQHEEEVLFKDILDKIELIGNENHGLYLADQYVKGIAKSRKS

SEQ ID NO: 5570 - protein, 1379 aa, Artificial Sequence
  SARS-CoV-2/Guangdong/20SF028/2020__EPI_ISL_403936 spike protein (1-1211)(T874C_S1055C) Ferritin construct
MFVFLVLLPLVSSQCVNLTTRTQLPPAYTNSFTRGVYYPDKVFRSSVLYSTQDLFLPFFSNVTWFHAIHVSGTNGTKRFDNPVLPFNDGVYFASTEKSNIIRGWIFGTTLDSKTQSLLIVNNATNVVIKVCEFQFCNDPFLGVYYHKNNKSWMESEFRVYSSANNCTFEYVSQPFLMDLEGKQGNFKNLREFVFKNIDGYFKIYSKHTPINLVRDLPQGFSALEPLVDLPIGINITRFQTLLALHRSYLTPGDSSSGWTAGAAAYYVGYLQPRTFLLKYNENGTITDAVDCALDPLSETKCTLKSFTVEKGIYQTSNFRVQPTESIVRFPNITNLCPFGEVFNATRFASVYAWNRKRISNCVADYSVLYNSASFSTFKCYGVSPTKLNDLCFTNVYADSFVIRGDEVRQIAPGQTGKIADYNYKLPDDFTGCVIAWNSNNLDSKVGGNYNYLYRLFRKSNLKPFERDISTEIYQAGSTPCNGVEGFNCYFPLQSYGFQPTNGVGYQPYRVVVLSFELLHAPATVCGPKKSTNLVKNKCVNFNFNGLTGTGVLTESNKKFLPFQQFGRDIADTTDAVRDPQTLEILDITPCSFGGVSVITPGTNTSNQVAVLYQDVNCTEVPVAIHADQLTPTWRVYSTGSNVFQTRAGCLIGAEHVNNSYECDIPIGAGICASYQTQTNSPRRARSVASQSIIAYTMSLGAENSVAYSNNSIAIPTNFTISVTTEILPVSMTKTSVDCTMYICGDSTECSNLLLQYGSFCTQLNRALTGIAVEQDKNTQEVFAQVKQIYKTPPIKDFGGFNFSQILPDPSKPSKRSFIEDLLFNKVTLADAGFIKQYGDCLGDIAARDLICAQKFNGLTVLPPLLTDEMIAQYCSALLAGTITSGWTFGAGAALQIPFAMQMAYRFNGIGVTQNVLYENQKLIANQFNSAIGKIQDSLSSTASALGKLQDVVNQNAQALNTLVKQLSSNFGAISSVLNDILSRLDKVEAEVQIDRLITGRLQSLQTYVTQQLIRAAEIRASANLAATKMSECVLGQSKRVDFCGKGYHLMSFPQCAPHGVVFLHVTYVPAQEKNFTTAPAICHDGKAHFPREGVFVSNGTHWFVTQRNFYEPQIITTDNTFVSGNCDVVIGIVNNTVYDPLQPELDSFKEELDKYFKNHTSPDVDLGDISGINASVVNIQKEIDRLNEVAKNLNESLIDLQELGKYEQYIKGGGGSDIIKLLNEQVNKEMQSSNLYMSMSSWCYTHSLDGAGLFLFDHAAEEYEHAKKLIIFLNENNVPVQLTSISAPEHKFEGLTQIFQKAYEHEQHISESINNIVDHAIKSKDHATFNFLQWYVAEQHEEEVLFKDILDKIELIGNENHGLYLADQYVKGIAKSRKS

SEQ ID NO: 5571 - protein, 1379 aa, Artificial Sequence
  SARS-CoV-2/Shenzhen/SZTH-001/2020__EPI_ISL_406592 spike protein (1-1211)(T874C_S1055C) Ferritin construct
MFVFLVLLPLVSSQCVNLTTRTQLPPAYTNSFTRGVYYPDKVFRSSVLHSTQDLFLPFFSNVTWFHAIHVSGTNGTKRFDNPVLPFNDGVYFASTEKSNIIRGWIFGTTLDSKTQSLLIVNNATNVVIKVCEFQFCNDPFLGVYYHKNNKSWMESEFRVYSSANNCTFEYVSQPFLMDLEGKQGNFKNLREFVFKNIDGYFKIYSKHTPINLVRDLPQGFSALEPLVDLPIGINITRFQTLLALHRSYLTPGDSSSGWTAGAAAYYVGYLQPRTFLLKYNENGTITDAVDCALDPLSETKCTLKSFTVEKGIYQTSNFRVQPTESIVRFPNITNLCPFGEVFNATRFASVYAWNRKRISNCVADYSVLYNSASFSTFKCYGVSPTKLNDLCFTNVYADSFVIRGDEVRQIAPGQTGKIADYNYKLPDDFTGCVIAWNSNNLDSKVGGNYNYLYRLFRKSNLKPFERDISTEIYQAGSTPCNGVEGFNCYFPLQSYGFQPTNGVGYQPYRVVVLSFELLHAPATVCGPKKSTNLVKNKCVNFNFNGLTGTGVLTESNKKFLPFQQFGRDIADTTDAVRDPQTLEILDITPCSFGGVSVITPGTNTSNQVAVLYQDVNCTEVPVAIHADQLTPTWRVYSTGSNVFQTRAGCLIGAEHVNNSYECDIPIGAGICASYQTQTNSPRRARSVASQSIIAYTMSLGAENSVAYSNNSIAIPTNFTISVTTEILPVSMTKTSVDCTMYICGDSTECSNLLLQYGSFCTQLNRALTGIAVEQDKNTQEVFAQVKQIYKTPPIKDFGGFNFSQILPDPSKPSKRSFIEDLLFNKVTLADAGFIKQYGDCLGDIAARDLICAQKFNGLTVLPPLLTDEMIAQYCSALLAGTITSGWTFGAGAALQIPFAMQMAYRFNGIGVTQNVLYENQKLIANQFNSAIGKIQDSLSSTASALGKLQDVVNQNAQALNTLVKQLSSNFGAISSVLNDILSRLDKVEAEVQIDRLITGRLQSLQTYVTQQLIRAAEIRASANLAATKMSECVLGQSKRVDFCGKGYHLMSFPQCAPHGVVFLHVTYVPAQEKNFTTAPAICHDGKAHFPREGVFVSNGTHWFVTQRNFYEPQIITTDNTFVSGNCDVLIGIVNNTVYDPLQPELDSFKEELDKYFKNHTSPDVDLGDISGINASVVNIQKEIDRLNEVAKNLNESLIDLQELGKYEQYIKGGGGSDIIKLLNEQVNKEMQSSNLYMSMSSWCYTHSLDGAGLFLFDHAAEEYEHAKKLIIFLNENNVPVQLTSISAPEHKFEGLTQIFQKAYEHEQHISESINNIVDHAIKSKDHATFNFLQWYVAEQHEEEVLFKDILDKIELIGNENHGLYLADQYVKGIAKSRKS

SEQ ID NO: 5572 - protein, 1379 aa, Artificial Sequence
  SARS-CoV-2/Shenzhen/SZTH-004/2020__EPI_ISL_406595 spike protein (1-1211)(T874C_S1055C) Ferritin construct
MFVFLVLLPLVSSQCVNLTTRTQLPPAYTNSFTRGVYYPDKVFRSSVLHSTQDLFLPFFSNVTWFHAIHVSGTNGTKRFDNPVLPFNDGVYFASTEKSNIIRGWIFGTTLDSKTQSLLIVNNATNVVIKVCEFQFCNDPFLGVYYHKNNKSWMESEFRVYSSANNCTFEYVSQPFLMDLEGKQGNFKNLREFVFKNIDGYFKIYSKHTPINLVRDLPQGFSALEPLVDLPIGINITRFQTLLALHRSYLTPGDSSSGWTAGAAAYYVGYLQPRTFLLKYNENGTITDAVDCALDPLSETKCTLKSFTVEKGIYQTSNFRVQPTESIVRFPNITNLCPFGEVFNATRFASVYAWDRKRISNCVAYYSVLYNSASFSTFKCYGVSPTKLNDLCFTNVYADSFVIRGDEVRQIAPGQTGKIADYNYKLPDDFTGCVIAWNSNNLDSKVGGNYNYLYRLFRKSNLKPFERDISTEIYQAGSTPCNGVEGFNCYFPLQSYGFQPTNGVGYQPYRVVVLSFELLHAPATVCGPKKSTNLVKNKCVNFNFNGLTGTGVLTESNKKFLPFQQFGRDIADTTDAVRDPQTLEILDITPCSFGGVSVITPGTNTSNQVAVLYQDVNCTEVPVAIHADQLTPTWRVYSTGSNVFQTRAGCLIGAEHVNNSYECDIPIGAGICASYQTQTNSPRRARSVASQSIIAYTMSLGAENSVAYSNNSIAIPTNFTISVTTEILPVSMTKTSVDCTMYICGDSTECSNLLLQYGSFCTQLNRALTGIAVEQDKNTQEVFAQVKQIYKTPPIKDFGGFNFSQILPDPSKPSKRSFIEDLLFNKVTLADAGFIKQYGDCLGDIAARDLICAQKFNGLTVLPPLLTDEMIAQYCSALLAGTITSGWTFGAGAALQIPFAMQMAYRFNGIGVTQNVLYENQKLIANQFNSAIGKIQDSLSSTASALGKLQDVVNQNAQALNTLVKQLSSNFGAISSVLNDILSRLDKVEAEVQIDRLITGRLQSLQTYVTQQLIRAAEIRASANLAATKMSECVLGQSKRVDFCGKGYHLMSFPQCAPHGVVFLHVTYVPAQEKNFTTAPAICHDGKAHFPREGVFVSNGTHWFVTQRNFYEPQIITTDNTFVSGNCDVVIGIVNNTVYDPLQPELDSFKEELDKYFKNHTSPDVDLGDISGINASVVNIQKEIDRLNEVAKNLNESLIDLQELGKYEQYIKGGGGSDIIKLLNEQVNKEMQSSNLYMSMSSWCYTHSLDGAGLFLFDHAAEEYEHAKKLIIFLNENNVPVQLTSISAPEHKFEGLTQIFQKAYEHEQHISESINNIVDHAIKSKDHATFNFLQWYVAEQHEEEVLFKDILDKIELIGNENHGLYLADQYVKGIAKSRKS

SEQ ID NO: 5573 - protein, 1379 aa, Artificial Sequence
  SARS-CoV-2/France/IDF0372/2020__EPI_ISL_406596 spike protein (1-1211)(T874C_S1055C) Ferritin construct
MFVFLVLLPLVSSQCVNLTTRTQLPPAYTNSFTRGVYYPDKVFRSSVLHSTQDLFLPFFSNVTWFHAIHVSGTNGTKRFDNPVLPFNDGVYFASTEKSNIIRGWIFGTTLDSKTQSLLIVNNATNVVIKVCEFQFCNDPFLGVYYHKNNKSWMESEFRVYSSANNCTFEYVSQPFLMDLEGKQGNFKNLREFVFKNIDGYFKIYSKHTPINLVRDLPQGFSALEPLVDLPIGINITRFQTLLALHRSYLTPGDSSSGWTAGAAAYYVGYLQPRTFLLKYNENGTITDAVDCALDPLSETKCTLKSFTVEKGIYQTSNFRVQPTESIVRFPNITNLCPFGEVFNATRFASVYAWNRKRISNCVADYSFLYNSASFSTFKCYGVSPTKLNDLCFTNVYADSFVIRGDEVRQIAPGQTGKIADYNYKLPDDFTGCVIAWNSNNLDSKVGGNYNYLYRLFRKSNLKPFERDISTEIYQAGSTPCNGVEGFNCYFPLQSYGFQPTNGVGYQPYRVVVLSFELLHAPATVCGPKKSTNLVKNKCVNFNFNGLTGTGVLTESNKKFLPFQQFGRDIADTTDAVRDPQTLEILDITPCSFGGVSVITPGTNTSNQVAVLYQDVNCTEVPVAIHADQLTPTWRVYSTGSNVFQTRAGCLIGAEHVNNSYECDIPIGAGICASYQTQTNSPRRARSVASQSIIAYTMSLGAENSVAYSNNSIAIPTNFTISVTTEILPVSMTKTSVDCTMYICGDSTECSNLLLQYGSFCTQLNRALTGIAVEQDKNTQEVFAQVKQIYKTPPIKDFGGFNFSQILPDPSKPSKRSFIEDLLFNKVTLADAGFIKQYGDCLGDIAARDLICAQKFNGLTVLPPLLTDEMIAQYCSALLAGTITSGWTFGAGAALQIPFAMQMAYRFNGIGVTQNVLYENQKLIANQFNSAIGKIQDSLSSTASALGKLQDVVNQNAQALNTLVKQLSSNFGAISSVLNDILSRLDKVEAEVQIDRLITGRLQSLQTYVTQQLIRAAEIRASANLAATKMSECVLGQSKRVDFCGKGYHLMSFPQCAPHGVVFLHVTYVPAQEKNFTTAPAICHDGKAHFPREGVFVSNGTHWFVTQRNFYEPQIITTDNTFVSGNCDVVIGIVNNTVYDPLQPELDSFKEELDKYFKNHTSPDVDLGDISGINASVVNIQKEIDRLNEVAKNLNESLIDLQELGKYEQYIKGGGGSDIIKLLNEQVNKEMQSSNLYMSMSSWCYTHSLDGAGLFLFDHAAEEYEHAKKLIIFLNENNVPVQLTSISAPEHKFEGLTQIFQKAYEHEQHISESINNIVDHAIKSKDHATFNFLQWYVAEQHEEEVLFKDILDKIELIGNENHGLYLADQYVKGIAKSRKS

SEQ ID NO: 5574 - protein, 1379 aa, Artificial Sequence
  SARS-CoV-2/Australia/VIC01/2020__EPI_ISL_406844 spike protein (1-1211)(T874C_S1055C) Ferritin construct
MFVFLVLLPLVSSQCVNLTTRTQLPPAYTNSFTRGVYYPDKVFRSSVLHSTQDLFLPFFSNVTWFHAIHVSGTNGTKRFDNPVLPFNDGVYFASTEKSNIIRGWIFGTTLDSKTQSLLIVNNATNVVIKVCEFQFCNDPFLGVYYHKNNKSWMESEFRVYSSANNCTFEYVSQPFLMDLEGKQGNFKNLREFVFKNIDGYFKIYSKHTPINLVRDLPQGFSALEPLVDLPIGINITRFQTLLALHRRYLTPGDSSSGWTAGAAAYYVGYLQPRTFLLKYNENGTITDAVDCALDPLSETKCTLKSFTVEKGIYQTSNFRVQPTESIVRFPNITNLCPFGEVFNATRFASVYAWNRKRISNCVADYSVLYNSASFSTFKCYGVSPTKLNDLCFTNVYADSFVIRGDEVRQIAPGQTGKIADYNYKLPDDFTGCVIAWNSNNLDSKVGGNYNYLYRLFRKSNLKPFERDISTEIYQAGSTPCNGVEGFNCYFPLQSYGFQPTNGVGYQPYRVVVLSFELLHAPATVCGPKKSTNLVKNKCVNFNFNGLTGTGVLTESNKKFLPFQQFGRDIADTTDAVRDPQTLEILDITPCSFGGVSVITPGTNTSNQVAVLYQDVNCTEVPVAIHADQLTPTWRVYSTGSNVFQTRAGCLIGAEHVNNSYECDIPIGAGICASYQTQTNSPRRARSVASQSIIAYTMSLGAENSVAYSNNSIAIPTNFTISVTTEILPVSMTKTSVDCTMYICGDSTECSNLLLQYGSFCTQLNRALTGIAVEQDKNTQEVFAQVKQIYKTPPIKDFGGFNFSQILPDPSKPSKRSFIEDLLFNKVTLADAGFIKQYGDCLGDIAARDLICAQKFNGLTVLPPLLTDEMIAQYCSALLAGTITSGWTFGAGAALQIPFAMQMAYRFNGIGVTQNVLYENQKLIANQFNSAIGKIQDSLSSTASALGKLQDVVNQNAQALNTLVKQLSSNFGAISSVLNDILSRLDKVEAEVQIDRLITGRLQSLQTYVTQQLIRAAEIRASANLAATKMSECVLGQSKRVDFCGKGYHLMSFPQCAPHGVVFLHVTYVPAQEKNFTTAPAICHDGKAHFPREGVFVSNGTHWFVTQRNFYEPQIITTDNTFVSGNCDVVIGIVNNTVYDPLQPELDSFKEELDKYFKNHTSPDVDLGDISGINASVVNIQKEIDRLNEVAKNLNESLIDLQELGKYEQYIKGGGGSDIIKLLNEQVNKEMQSSNLYMSMSSWCYTHSLDGAGLFLFDHAAEEYEHAKKLIIFLNENNVPVQLTSISAPEHKFEGLTQIFQKAYEHEQHISESINNIVDHAIKSKDHATFNFLQWYVAEQHEEEVLFKDILDKIELIGNENHGLYLADQYVKGIAKSRKS

SEQ ID NO: 5575 - protein, 1379 aa, Artificial Sequence
  SARS-CoV-2/Germany/BavPat1/2020__EPI_ISL_406862 spike protein (1-1211)(T874C_S1055C) Ferritin construct
MFVFLVLLPLVSSQCVNLTTRTQLPPAYTNSFTRGVYYPDKVFRSSVLHSTQDLFLPFFSNVTWFHAIHVSGTNGTKRFDNPVLPFNDGVYFASTEKSNIIRGWIFGTTLDSKTQSLLIVNNATNVVIKVCEFQFCNDPFLGVYYHKNNKSWMESEFRVYSSANNCTFEYVSQPFLMDLEGKQGNFKNLREFVFKNIDGYFKIYSKHTPINLVRDLPQGFSALEPLVDLPIGINITRFQTLLALHRSYLTPGDSSSGWTAGAAAYYVGYLQPRTFLLKYNENGTITDAVDCALDPLSETKCTLKSFTVEKGIYQTSNFRVQPTESIVRFPNITNLCPFGEVFNATRFASVYAWNRKRISNCVADYSVLYNSASFSTFKCYGVSPTKLNDLCFTNVYADSFVIRGDEVRQIAPGQTGKIADYNYKLPDDFTGCVIAWNSNNLDSKVGGNYNYLYRLFRKSNLKPFERDISTEIYQAGSTPCNGVEGFNCYFPLQSYGFQPTNGVGYQPYRVVVLSFELLHAPATVCGPKKSTNLVKNKCVNFNFNGLTGTGVLTESNKKFLPFQQFGRDIADTTDAVRDPQTLEILDITPCSFGGVSVITPGTNTSNQVAVLYQGVNCTEVPVAIHADQLTPTWRVYSTGSNVFQTRAGCLIGAEHVNNSYECDIPIGAGICASYQTQTNSPRRARSVASQSIIAYTMSLGAENSVAYSNNSIAIPTNFTISVTTEILPVSMTKTSVDCTMYICGDSTECSNLLLQYGSFCTQLNRALTGIAVEQDKNTQEVFAQVKQIYKTPPIKDFGGFNFSQILPDPSKPSKRSFIEDLLFNKVTLADAGFIKQYGDCLGDIAARDLICAQKFNGLTVLPPLLTDEMIAQYCSALLAGTITSGWTFGAGAALQIPFAMQMAYRFNGIGVTQNVLYENQKLIANQFNSAIGKIQDSLSSTASALGKLQDVVNQNAQALNTLVKQLSSNFGAISSVLNDILSRLDKVEAEVQIDRLITGRLQSLQTYVTQQLIRAAEIRASANLAATKMSECVLGQSKRVDFCGKGYHLMSFPQCAPHGVVFLHVTYVPAQEKNFTTAPAICHDGKAHFPREGVFVSNGTHWFVTQRNFYEPQIITTDNTFVSGNCDVVIGIVNNTVYDPLQPELDSFKEELDKYFKNHTSPDVDLGDISGINASVVNIQKEIDRLNEVAKNLNESLIDLQELGKYEQYIKGGGGSDIIKLLNEQVNKEMQSSNLYMSMSSWCYTHSLDGAGLFLFDHAAEEYEHAKKLIIFLNENNVPVQLTSISAPEHKFEGLTQIFQKAYEHEQHISESINNIVDHAIKSKDHATFNFLQWYVAEQHEEEVLFKDILDKIELIGNENHGLYLADQYVKGIAKSRKS

SEQ ID NO: 5576 - protein, 1379 aa, Artificial Sequence
  SARS-CoV-2/Wuhan/HBCDC-HB-02/2020__EPI_ISL_412978 spike protein (1-1211)(T874C_S1055C) Ferritin construct
MFVFLVLLPLVSSQCVNLTTRTQLPPAYTNSFTRGVYYPDKVFRSSVLHSTQDLFLPFFSNVTWFHAIHVSGTNGTKRFDNPVLPFNDGVYFASTEKSNIIRGWIFGTTLDSKTQSLLIVNNATNVVIKVCEFQFCNDPFLGVYYHKNNKSWMESEFRVYSSANNCTFEYVSQPFLMDLEGKQGNFKNLREFVFKNIDGYFKIYSKHTPINLVRDLPQGFSALEPLVDLPIGINITRFQTLLALHRSYLTPGDSSSGWTAGAAAYYVGYLQPRTFLLKYNENGTITDAVDCALDPLSETKCTLKSFTVEKGIYQTSNFRVQPTESIVRFPNITNLCPFGEVFNATRFASVYAWNRKRISNCVADYSVLYNSASFSTFKCYGVSPTKLNDLCFTNVYADSFVIRGDEVRQIAPGQTGKIADYNYKLPDDFTGCVIAWNSNNLDSKVGGNYNYLYRLFRKSNLKPFERDISTEIYQAGSTPCNGVEGFNCYFPLQSYGFQPTNGVGYQPYRVVVLSFELLHAPATVCGPKKSTNLVKNKCVNFNFNGLTGTGVLTESNKKFLPFQQFGRDIADTTDAVRDPQTLEILDITPCSFGGVSVITPGTNTSNQVAVLYQDVNCTEVPVAIHADQLTPTWRVYSTGSNVFQTRAGCLIGAEHVNNSYECDIPIGAGICASYQTQTNSPRRARSVASQSIIAYTMSLGAENSVAYSNNSIAIPTNFTISVTTEILPVSMTKTSVDCTMYICGDSTECSNFLLQYGSFCTQLNRALTGIAVEQDKNTQEVFAQVKQIYKTPPIKDFGGFNFSQILPDPSKPSKRSFIEDLLFNKVTLADAGFIKQYGDCLGDIAARDLICAQKFNGLTVLPPLLTDEMIAQYCSALLAGTITSGWTFGAGAALQIPFAMQMAYRFNGIGVTQNVLYENQKLIANQFNSAIGKIQDSLSSTASALGKLQDVVNQNAQALNTLVKQLSSNFGAISSVLNDILSRLDKVEAEVQIDRLITGRLQSLQTYVTQQLIRAAEIRASANLAATKMSECVLGQSKRVDFCGKGYHLMSFPQCAPHGVVFLHVTYVPAQEKNFTTAPAICHDGKAHFPREGVFVSNGTHWFVTQRNFYEPQIITTDNTFVSGNCDVVIGIVNNTVYDPLQPELDSFKEELDKYFKNHTSPDVDLGDISGINASVVNIQKEIDRLNEVAKNLNESLIDLQELGKYEQYIKGGGGSDIIKLLNEQVNKEMQSSNLYMSMSSWCYTHSLDGAGLFLFDHAAEEYEHAKKLIIFLNENNVPVQLTSISAPEHKFEGLTQIFQKAYEHEQHISESINNIVDHAIKSKDHATFNFLQWYVAEQHEEEVLFKDILDKIELIGNENHGLYLADQYVKGIAKSRKS

SEQ ID NO: 5577 - protein, 1379 aa, Artificial Sequence
  SARS-CoV-2/Australia/QLD02/2020__EPI_ISL_407896 spike protein (1-1211)(T874C_S1055C) Ferritin construct
MFVFLVLLPLVSSQCVNLTTRTQLPPAYTNSFTRGVYYPDKVFRSSVLHSTQDLFLPFFSNVTWFHAIHVSGTNGTKRFDNPVLPFNDGVYFASTEKSNIIRGWIFGTTLDSKTQSLLIVNNATNVVIKVCEFQFCNDPFLGVYYHKNNKSWMESEFRVYSSANNCTFEYVSQPFLMDLEGKQGNFKNLREFVFKNIDGYFKIYSKHTPINLVRDLPQGFSALEPLVDLPIGINITRFQTLLALHRSYLTPGDSSSGWTAGAAAYYVGYLQPRTFLLKYNENGTITDAVDCALDPLSETKCTLKSFTVEKGIYQTSNFRVQPTESIVRFPNITNLCPFGEVFNATRFASVYAWNRKRISNCVADYSVLYNSASFSTFKCYGVSPTKLNDLCFTNVYADSFVIRGDEVRQIAPGQTGKIADYNYKLPDDFTGCVIAWNSNNLDSKVGGNYNYLYRLFRKSNLKPFERDISTEIYQAGSTPCNGVEGFNCYFPLQSYGFQPTNGVGYQPYRVVVLSFELLHAPATVCGPKKSTNLVKNKCVNFNFNGLTGTGVLTESNKKFLPFQQFGRDIADTTDAVRDPQTLEILDITPCSFGGVSVITPGTNTSNQVAVLYQDVNCTEVPVAIHADQLTPTWRVYSTGSNVFQTRAGCLIGAEHVNNSYECDIPIGAGICASYQTQTNSPRRARSVASQSIIAYTMSLGAENSVAYSNNSIAIPTNFTISVTTEILPVSMTKTSVDCTMYICGDSTECSNLLLQYGSFCTQLNRALTGIAVEQDKNTQEVFAQVKQIYKTPPIKDFGGFNFSQILPDPSKPSKRSFIEDLLFNKVTLADAGFIKQYGDCLGDIAARDLICAQKFNGLTVLPPLLTDEMIAQYCSALLAGTITSGWTFGAGAALQIPFAMQMAYRFNGIGVTQNVLYENQKLIANQFNSAIGKIQDSLSSTASALGKLQDVVNQNAQALNTLVKQLSSNFGAISSVLNDILSRLDKVEAEVQIDRLITGRLQSLQTYVTQQLIRAAEIRASANLAATKMSECVLGQSKRVDFCGKGYHLMSFPQCAPHGVVFLHVTYVPAQEKNFTTAPAICHDGKAHFPREGVFVSNGTHWFVTQRNFYEPQIITTDNTFVSGNCDVVIGIVNNTVYDPLQLELDSFKEELDKYFKNHTSPDVDLGDISGINASVVNIQKEIDRLNEVAKNLNESLIDLQELGKYEQYIKGGGGSDIIKLLNEQVNKEMQSSNLYMSMSSWCYTHSLDGAGLFLFDHAAEEYEHAKKLIIFLNENNVPVQLTSISAPEHKFEGLTQIFQKAYEHEQHISESINNIVDHAIKSKDHATFNFLQWYVAEQHEEEVLFKDILDKIELIGNENHGLYLADQYVKGIAKSRKS

SEQ ID NO: 5578 - protein, 1379 aa, Artificial Sequence
  SARS-CoV-2/India/1-31/2020__EPI_ISL_413523 spike protein (1-1211)(T874C_S1055C) Ferritin construct
MFVFLVLLPLVSSQCVNLTTRTQLPPAYTNSFTRGVYYPDKVFRSSVLHSTQDLFLPFFSNVTWFHAIHVSGTNGTKRFDNPVLPFNDGVYFASTEKSNIIRGWIFGTTLDSKTQSLLIVNNATNVVIKVCEFQFCNDPFLGVYYHKNNKSWMESEFRVYSSANNCTFEYVSQPFLMDLEGKQGNFKNLREFVFKNIDGYFKIYSKHTPINLVRDLPQGFSALEPLVDLPIGINITRFQTLLALHRSYLTPGDSSSGWTAGAAAYYVGYLQPRTFLLKYNENGTITDAVDCALDPLSETKCTLKSFTVEKGIYQTSNFRVQPTESIVRFPNITNLCPFGEVFNATRFASVYAWNRKRISNCVADYSVLYNSASFSTFKCYGVSPTKLNDLCFTNVYADSFVIRGDEVRQIAPGQTGKIADYNYKLPDDFTGCVIAWNSNNLDSKVGGNYNYLYRLFRKSNLKPFERDISTEIYQAGSTPCNGVEGFNCYFPLQSYGFQPTNGVGYQPYRVVVLSFELLHAPATVCGPKKSTNLVKNKCVNFNFNGLTGTGVLTESNKKFLPFQQFGRDIADTTDAVRDPQTLEILDITPCSFGGVSVITPGTNTSNQVAVLYQDVNCTEVPVAIHADQLTPTWRVYSTGSNVFQTRAGCLIGAEHVNNSYECDIPIGAGICASYQTQTNSPRRARSVASQSIIAYTMSLGAENSVAYSNNSIAIPTNFTISVTTEILPVSMTKTSVDCTMYICGDSTECSNLLLQYGSFCTQLNRALTGIAVEQDKNTQEVFAQVKQIYKTPPIKDFGGFNFSQILPDPSKPSKRSFIEDLLFNKVTLADAGFIKQYGDCLGDIAARDLICAQKFNGLTVLPPLLTDEMIAQYCSALLAGTITSGWTFGAGAALQIPFAMQMAYRFNGIGVTQNVLYENQKLIANQFNSVIGKIQDSLSSTASALGKLQDVVNQNAQALNTLVKQLSSNFGAISSVLNDILSRLDKVEAEVQIDRLITGRLQSLQTYVTQQLIRAAEIRASANLAATKMSECVLGQSKRVDFCGKGYHLMSFPQCAPHGVVFLHVTYVPAQEKNFTTAPAICHDGKAHFPREGVFVSNGTHWFVTQRNFYEPQIITTDNTFVSGNCDVVIGIVNNTVYDPLQPELDSFKEELDKYFKNHTSPDVDLGDISGINASVVNIQKEIDRLNEVAKNLNESLIDLQELGKYEQYIKGGGGSDIIKLLNEQVNKEMQSSNLYMSMSSWCYTHSLDGAGLFLFDHAAEEYEHAKKLIIFLNENNVPVQLTSISAPEHKFEGLTQIFQKAYEHEQHISESINNIVDHAIKSKDHATFNFLQWYVAEQHEEEVLFKDILDKIELIGNENHGLYLADQYVKGIAKSRKS

SEQ ID NO: 5579 - protein, 1379 aa, Artificial Sequence
  SARS-CoV-2/Guangdong/GD2020087-P0008/2020__EPI_ISL_413863 spike protein (1-1211)(T874C_S1055C) Ferritin construct
MFVFLVLLPLVSSQCVNLTTRTQLPPAYTNSFTRGVYYPDKVFRSSVLHSTQDLFLPFFSNVTWFHAIHVSGTNGTKRFDNPVLPFNDGVYFASTEKSNIIRGWIFGTTLDSKTQSLLIVNNATNVVIKVCEFQFCNDPFLGVYYHKNNKSWMESEFRVYSSANNCTFEYVSQPFLMDLEGKQGNFKNLREFVFKNIDGYFKIYSKHTPINLVRDLPQGFSALEPLVDLPIGINITRFQTLLALHRSYLTPGDSSSGWTAGAAAYYVGYLQPRTFLLKYNENGTITDAVDCALDPLSETKCTLKSFTVEKGIYQTSNFRVQPTESIVRFPNITNLCPFGEVFNATRFASVYAWNRKRISNCVADYSVLYNSASFSTFKCYGVSPTKLNDLCFTNVYADSFVIRGDEVREIAPGQTGKIADYNYKLPDDFTGCVIAWNSNNLDSKVGGNYNYLYRLFRKSNLKPFERDISTEIYQAGSTPCNGVEGFNCYFPLQSYGFQPTNGVGYQPYRVVVLSFELLHAPATVCGPKKSTNLVKNKCVNFNFNGLTGTGVLTESNKKFLPFQQFGRDIADTTDAVRDPQTLEILDITPCSFGGVSVITPGTNTSNQVAVLYQDVNCTEVPVAIHADQLTPTWRVYSTGSNVFQTRAGCLIGAEHVNNSYECDIPIGAGICASYQTQTNSPRRARSVASQSIIAYTMSLGAENSVAYSNNSIAIPTNFTISVTTEILPVSMTKTSVDCTMYICGDSTECSNLLLQYGSFCTQLNRALTGIAVEQDKNTQEVFAQVKQIYKTPPIKDFGGFNFSQILPDPSKPSKRSFIEDLLFNKVTLADAGFIKQYGDCLGDIAARDLICAQKFNGLTVLPPLLTDEMIAQYCSALLAGTITSGWTFGAGAALQIPFAMQMAYRFNGIGVTQNVLYENQKLIANQFNSAIGKIQDSLSSTASALGKLQDVVNQNAQALNTLVKQLSSNFGAISSVLNDILSRLDKVEAEVQIDRLITGRLQSLQTYVTQQLIRAAEIRASANLAATKMSECVLGQSKRVDFCGKGYHLMSFPQCAPHGVVFLHVTYVPAQEKNFTTAPAICHDGKAHFPREGVFVSNGTHWFVTQRNFYEPQIITTDNTFVSGNCDVVIGIVNNTVYDPLQPELDSFKEELDKYFKNHTSPDVDLGDISGINASVVNIQKEIDRLNEVAKNLNESLIDLQELGKYEQYIKGGGGSDIIKLLNEQVNKEMQSSNLYMSMSSWCYTHSLDGAGLFLFDHAAEEYEHAKKLIIFLNENNVPVQLTSISAPEHKFEGLTQIFQKAYEHEQHISESINNIVDHAIKSKDHATFNFLQWYVAEQHEEEVLFKDILDKIELIGNENHGLYLADQYVKGIAKSRKS

SEQ ID NO: 5580 - protein, 1379 aa, Artificial Sequence
  SARS-CoV-2/Sweden/01/2020__EPI_ISL_411951 spike protein (1-1211)(T874C_S1055C) Ferritin construct
MFVFLVLLPLVSSQCVNLTTRTQLPPAYTNSFTRGVYYPDKVFRSSVLHSTQDLFLPFFSNVTWFHAIHVSGTNGTKRFDNPVLPFNDGVYFASTEKSNIIRGWIFGTTLDSKTQSLLIVNNATNVVIKVCEFQFCNDPFLGVYYHKNNKSWMESEFRVYSSANNCTFEYVSQPFLMDLEGKQGNFKNLREFVFKNIDGYFKIYSKHTPINLVRDLPQGFSALEPLVDLPIGINITRFQTLLALHRSYLTPGDSSSGWTAGAAAYYVGYLQPRTFLLKYNENGTITDAVDCALDPLSETKCTLKSFTVEKGIYQTSNFRVQPTESIVRFPNITNLCPFGEVFNATRFASVYAWNRKRISNCVADYSVLYNSASFSTFKCYGVSPTKLNDLCFTNVYADSFVIRGDEVRQIAPGQTGKIADYNYKLPDDFTGCVIAWNSNNLDSKVGGNYNYLYRLFRKSNLKPFERDISTEIYQAGSTPCNGVEGFNCYFPLQSYGFQPTNGVGYQPYRVVVLSFELLHAPATVCGPKKSTNLVKNKCVNFNFNGLTGTGVLTESNKKFLPFQQFGRDIADTTDAVRDPQTLEILDITPCSFGGVSVITPGTNTSNQVAVLYQDVNCTEVPVAIHADQLTPTWRVYSTGSNVFQTRAGCLIGAEHVNNSYECDIPIGAGICASYQTQTNSPRRARSVASQSIIAYTMSLGAENSVAYSNNSIAIPTNFTISVTTEILPVSMTKTSVDCTMYICGDSTECSNLLLQYGSFCTQLNRALTGIAVEQDKNTQEVFAQVKQIYKTPPIKDCGGFNFSQILPDPSKPSKRSFIEDLLFNKVTLADAGFIKQYGDCLGDIAARDLICAQKFNGLTVLPPLLTDEMIAQYCSALLAGTITSGWTFGAGAALQIPFAMQMAYRFNGIGVTQNVLYENQKLIANQFNSAIGKIQDSLSSTASALGKLQDVVNQNAQALNTLVKQLSSNFGAISSVLNDILSRLDKVEAEVQIDRLITGRLQSLQTYVTQQLIRAAEIRASANLAATKMSECVLGQSKRVDFCGKGYHLMSFPQCAPHGVVFLHVTYVPAQEKNFTTAPAICHDGKAHFPREGVFVSNGTHWFVTQRNFYEPQIITTDNTFVSGNCDVVIGIVNNTVYDPLQPELDSFKEELDKYFKNHTSPDVDLGDISGINASVVNIQKEIDRLNEVAKNLNESLIDLQELGKYEQYIKGGGGSDIIKLLNEQVNKEMQSSNLYMSMSSWCYTHSLDGAGLFLFDHAAEEYEHAKKLIIFLNENNVPVQLTSISAPEHKFEGLTQIFQKAYEHEQHISESINNIVDHAIKSKDHATFNFLQWYVAEQHEEEVLFKDILDKIELIGNENHGLYLADQYVKGIAKSRKS

SEQ ID NO: 5581 - protein, 1379 aa, Artificial Sequence
  SARS-CoV-2/Tianmen/HBCDC-HB-07/2020__EPI_ISL_412983 spike protein (1-1211)(T874C_S1055C) Ferritin construct
MFVFLVLLPLVSSQCVNLTTRTQLPPAYTNSFTRGVYYPDKVFRSSVLHSTQDLFLPFFSNVTWFHAIHVSGTNGTKRFDNPVLPFNDGVYFASTEKSNIIRGWIFGTTLDSKTQSLLIVNNATNVVIKVCEFQFCNDPFLGVYYHKNNKSWMESEFRVYSSANNCTFEYVSQPFLMDLEGKQGNFKNLREFVFKNIDGYFKIYSKHTPINLVRDLPQGFSALEPLVDLPIGINITRFQTLLALHRSYLTPGDSSSGWTAGAAAYYVGYLQPRTFLLKYNENGTITDAVDCALDPLSETKCTLKSFTVEKGIYQTSNFRVQPTESIVRFPNITNLCPFGEVFNATRFASVYAWNRKRISNCVADYSVLYNSASFSTFKCYGVSPTKLNDLCFTNVYADSFVIRGDEVRQIAPGQTGKIADYNYKLPDDFTGCVIAWNSNNLDSKVGGNYNYLYRLFRKSNLKPFERDISTEIYQAGSTPCNGVEGFNCYFPLQSYGFQPTNGVGYQPYRVVVLSFELLHAPATVCGPKKSTNLVKNKCVNFNFNGLTGTGVLTESNKKFLPFQQFGRDIADTTDAVRDPQTLEILDITPCSFGGVSVITPGTNTSNQVAVLYQDLNCTEVPVAIHADQLTPTWRVYSTGSNVFQTRAGCLIGAEHVNNSYECDIPIGAGICASYQTQTNSPRRARSVASQSIIAYTMSLGAENSVAYSNNSIAIPTNFTISVTTEILPVSMTKTSVDCTMYICGDSTECSNLLLQYGSFCTQLNRALTGIAVEQDKNTQEVFAQVKQIYKTPPIKDFGGFNFSQILPDPSKPSKRSFIEDLLFNKVTLADAGFIKQYGDCLGDIAARDLICAQKFNGLTVLPPLLTDEMIAQYCSALLAGTITSGWTFGAGAALQIPFAMQMAYRFNGIGVTQNVLYENQKLIANQFNSAIGKIQDSLSSTASALGKLQDVVNQNAQALNTLVKQLSSNFGAISSVLNDILSRLDKVEAEVQIDRLITGRLQSLQTYVTQQLIRAAEIRASANLAATKMSECVLGQSKRVDFCGKGYHLMSFPQCAPHGVVFLHVTYVPAQEKNFTTAPAICHDGKAHFPREGVFVSNGTHWFVTQRNFYEPQIITTDNTFVSGNCDVVIGIVNNTVYDPLQPELDSFKEELDKYFKNHTSPDVDLGDISGINASVVNIQKEIDRLNEVAKNLNESLIDLQELGKYEQYIKGGGGSDIIKLLNEQVNKEMQSSNLYMSMSSWCYTHSLDGAGLFLFDHAAEEYEHAKKLIIFLNENNVPVQLTSISAPEHKFEGLTQIFQKAYEHEQHISESINNIVDHAIKSKDHATFNFLQWYVAEQHEEEVLFKDILDKIELIGNENHGLYLADQYVKGIAKSRKS

SEQ ID NO: 5582 - protein, 1379 aa, Artificial Sequence
  SARS-CoV-2/Hong Kong/case42_VM20002493/2020__EPI_ISL_414527 spike protein (1-1211)(T874C_S1055C) Ferritin construct
MFVFLVLLPLVSSQCVNLTTRTQLPPAYTNSFTRGVYYPDKVFRSSVLHSTQDLFLPFFSNVTWFHAIHVSGTNGTKRFDNPVLPFNDGVYFASTEKSNIIRGWIFGTTLDSKTQSLLIVNNATNVVIKVCEFQFCNDPFLGVYYHKNNKSWMESEFRVYSSANNCTFEYVSQPFLMDLEGKQGNFKNLREFVFKNIDGYFKIYSKHTPINLVRDLPQGFSALEPLVDLPIGINITRFQTLLALHRSYLTPGDSSSGWTAGAAAYYVGYLQPRTFLLKYNENGTITDAVDCALDPLSETKCTLKSFTVEKGIYQTSNFRVQPTESIVRFPNITNLCPFGEVFNATRFASVYAWNRKRISNCVADYSVLYNSASFSTFKCYGVSPTKLNDLCFTNVYADSFVIRGDEVRQIAPGQTGKIADYNYKLPDDFTGCVIAWNSNNLDSKVGGNYNYLYRLFRKSNLKPFERDISTEIYQAGSTPCNGVEGFNCYFPLQSYGFQPTNGVGYQPYRVVVLSFELLHAPATVCGPKKSTNLVKNKCVNFNFNGLTGTGVLTESNKKFLPFQQFGRDIADTTDAVRDPQTLEILDITPCSFGGVSVITPGTNTSNQVAVLYQDVNCTEVPVAIHADQLTPTWRVYSTGSNVFQTRAGCLIGAEHVNNSYECDIPIGAGICASYQTQTNSPRRARSVASQSIIAYTMSLGAENSVAYSNNSIAIPTNFAISVTTEILPVSMTKTSVDCTMYICGDSTECSNLLLQYGSFCTQLNRALTGIAVEQDKNTQEVFAQVKQIYKTPPIKDFGGFNFSQILPDPSKPSKRSFIEDLLFNKVTLADAGFIKQYGDCLGDIAARDLICAQKFNGLTVLPPLLTDEMIAQYCSALLAGTITSGWTFGAGAALQIPFAMQMAYRFNGIGVTQNVLYENQKLIANQFNSAIGKIQDSLSSTASALGKLQDVVNQNAQALNTLVKQLSSNFGAISSVLNDILSRLDKVEAEVQIDRLITGRLQSLQTYVTQQLIRAAEIRASANLAATKMSECVLGQSKRVDFCGKGYHLMSFPQCAPHGVVFLHVTYVPAQEKNFTTAPAICHDGKAHFPREGVFVSNGTHWFVTQRNFYEPQIITTDNTFVSGNCDVVIGIVNNTVYDPLQPELDSFKEELDKYFKNHTSPDVDLGDISGINASVVNIQKEIDRLNEVAKNLNESLIDLQELGKYEQYIKGGGGSDIIKLLNEQVNKEMQSSNLYMSMSSWCYTHSLDGAGLFLFDHAAEEYEHAKKLIIFLNENNVPVQLTSISAPEHKFEGLTQIFQKAYEHEQHISESINNIVDHAIKSKDHATFNFLQWYVAEQHEEEVLFKDILDKIELIGNENHGLYLADQYVKGIAKSRKS

SEQ ID NO: 5583 - protein, 1379 aa, Artificial Sequence
  SARS-CoV-2/USA/CruiseA-23/2020__EPI_ISL_414482 spike protein (1-1211)(T874C_S1055C) Ferritin construct
MFVFLVLLPLVSSQCVNLTTRTQLPPAYTNSFTRGVYYPDKVFRSSVLHSTQDLFLPFFSNVTWFHAIHVSGTNGTKRFDNPVLPFNDGVYFASTEKSNIIRGWIFGTTLDSKTQSLLIVNNATNVVIKVCEFQFCNDPFLGVYYHKNNKSWMESEFRVYSSANNCTFEYVSQPFLMDLEVKQGNFKNLREFVFKNIDGYFKIYSKHTPINLVRDLPQGFSALEPLVDLPIGINITRFQTLLALHRSYLTPGDSSSGWTAGAAAYYVGYLQPRTFLLKYNENGTITDAVDCALDPLSETKCTLKSFTVEKGIYQTSNFRVQPTESIVRFPNITNLCPFGEVFNATRFASVYAWNRKRISNCVADYSVLYNSASFSTFKCYGVSPTKLNDLCFTNVYADSFVIRGDEVRQIAPGQTGKIADYNYKLPDDFTGCVIAWNSNNLDSKVGGNYNYLYRLFRKSNLKPFERDISTEIYQAGSTPCNGVEGFNCYFPLQSYGFQPTNGVGYQPYRVVVLSFELLHAPATVCGPKKSTNLVKNKCVNFNFNGLTGTGVLTESNKKFLPFQQFGRDIADTTDAVRDPQTLEILDITPCSFGGVSVITPGTNTSNQVAVLYQDVNCTEVPVAIHADQLTPTWRVYSTGSNVFQTRAGCLIGAEHVNNSYECDIPIGAGICASYQTQTNSPRRARSVASQSIIAYTMSLGAENSVAYSNNSIAIPTNFTISVTTEILPVSMTKTSVDCTMYICGDSTECSNLLLQYGSFCTQLNRALTGIAVEQDKNTQEVFAQVKQIYKTPPIKDFGGFNFSQILPDPSKPSKRSFIEDLLFNKVTLADAGFIKQYGDCLGDIAARDLICAQKFNGLTVLPPLLTDEMIAQYCSALLAGTITSGWTFGAGAALQIPFAMQMAYRFNGIGVTQNVLYENQKLIANQFNSAIGKIQDSLSSTASALGKLQDVVNQNAQALNTLVKQLSSNFGAISSVLNDILSRLDKVEAEVQIDRLITGRLQSLQTYVTQQLIRAAEIRASANLAATKMSECVLGQSKRVDFCGKGYHLMSFPQCAPHGVVFLHVTYVPAQEKNFTTAPAICHDGKAHFPREGVFVSNGTHWFVTQRNFYEPQIITTDNTFVSGNCDVVIGIVNNTVYDPLQPELDSFKEELDKYFKNHTSPDVDLGDISGINASVVNIQKEIDRLNEVAKNLNESLIDLQELGKYEQYIKGGGGSDIIKLLNEQVNKEMQSSNLYMSMSSWCYTHSLDGAGLFLFDHAAEEYEHAKKLIIFLNENNVPVQLTSISAPEHKFEGLTQIFQKAYEHEQHISESINNIVDHAIKSKDHATFNFLQWYVAEQHEEEVLFKDILDKIELIGNENHGLYLADQYVKGIAKSRKS

SEQ ID NO: 5584 - protein, 1379 aa, Artificial Sequence
  SARS-CoV-2/Hong Kong/case85_VM20002868/2020__EPI_ISL_414519 spike protein (1-1211)(T874C_S1055C) Ferritin construct
MFVFLVLVPLVSSQCVNLTTRTQLPPAYTNSFTRGVYYPDKVFRSSVLHSTQDLFLPFFSNVTWFHAIHVSGTNGTKRFDNPVLPFNDGVYFASTEKSNIIRGWIFGTTLDSKTQSLLIVNNATNVVIKVCEFQFCNDPFLGVYYHKNNKSWMESEFRVYSSANNCTFEYVSQPFLMDLEGKQGNFKNLREFVFKNIDGYFKIYSKHTPINLVRDLPQGFSALEPLVDLPIGINITRFQTLLALHRSYLTPGDSSSGWTAGAAAYYVGYLQPRTFLLKYNENGTITDAVDCALDPLSETKCTLKSFTVEKGIYQTSNFRVQPTESIVRFPNITNLCPFGEVFNATRFASVYAWNRKRISNCVADYSVLYNSASFSTFKCYGVSPTKLNDLCFTNVYADSFVIRGDEVRQIAPGQTGKIADYNYKLPDDFTGCVIAWNSNNLDSKVGGNYNYLYRLFRKSNLKPFERDISTEIYQAGSTPCNGVEGFNCYFPLQSYGFQPTNGVGYQPYRVVVLSFELLHAPATVCGPKKSTNLVKNKCVNFNFNGLTGTGVLTESNKKFLPFQQFGRDIADTTDAVRDPQTLEILDITPCSFGGVSVITPGTNTSNQVAVLYQDVNCTEVPVAIHADQLTPTWRVYSTGSNVFQTRAGCLIGAEHVNNSYECDIPIGAGICASYQTQTNSPRRARSVASQSIIAYTMSLGAENSVAYSNNSIAIPTNFTISVTTEILPVSMTKTSVDCTMYICGDSTECSNLLLQYGSFCTQLNRALTGIAVEQDKNTQEVFAQVKQIYKTPPIKDFGGFNFSQILPDPSKPSKRSFIEDLLFNKVTLADAGFIKQYGDCLGDIAARDLICAQKFNGLTVLPPLLTDEMIAQYCSALLAGTITSGWTFGAGAALQIPFAMQMAYRFNGIGVTQNVLYENQKLIANQFNSAIGKIQDSLSSTASALGKLQDVVNQNAQALNTLVKQLSSNFGAISSVLNDILSRLDKVEAEVQIDRLITGRLQSLQTYVTQQLIRAAEIRASANLAATKMSECVLGQSKRVDFCGKGYHLMSFPQCAPHGVVFLHVTYVPAQEKNFTTAPAICHDGKAHFPREGVFVSNGTHWFVTQRNFYEPQIITTDNTFVSGNCDVVIGIVNNTVYDPLQPELDSFKEELDKYFKNHTSPDVDLGDISGINASVVNIQKEIDRLNEVAKNLNESLIDLQELGKYEQYIKGGGGSDIIKLLNEQVNKEMQSSNLYMSMSSWCYTHSLDGAGLFLFDHAAEEYEHAKKLIIFLNENNVPVQLTSISAPEHKFEGLTQIFQKAYEHEQHISESINNIVDHAIKSKDHATFNFLQWYVAEQHEEEVLFKDILDKIELIGNENHGLYLADQYVKGIAKSRKS

SEQ ID NO: 5585 - protein, 1379 aa, Artificial Sequence; identical to SEQ ID NO: 5575
  SARS-CoV-2/England/200990660/2020__EPI_ISL_414523 spike protein (1-1211)(T874C_S1055C) Ferritin construct

SEQ ID NO: 5586 - protein, 1379 aa, Artificial Sequence
  SARS-CoV-2/Australia/NSW09/2020__EPI_ISL_413595 spike protein (1-1211)(T874C_S1055C) Ferritin construct
MFVFLVLLPLVSSQCVNLTTRTQLPPAYTNSFTRGVYYPDKVFRSSVLHSTQDLFLPFFSNVTWFHAIHVSGTNGTKRFDNPVLPFNDGVYFASTEKSNIIRGWIFGTTLDSKTQSLLIVNNATNVVIKVCEFQFCNDPFLGVYYHKNNKSWMESEFRVYSSANNCTFEYVSQPFLMDLEGKQGNFKNLREFVFKNIDGYFKIYSKHTPINLVRDLPQGFSALEPLVDLPIGINITRFQTLLALHRSYLTPGDSSSGWTAGAAAYYVGYLQPRTFLLKYNENGTITDAVDCALDPLSETKCTLKSFTVEKGIYQTSNFRVQPTESIVRFPNITNLCPFGEVFNATRFASVYAWNRKRISNCVADYSVLYNSASFSTFKCYGVSPTKLNDLCFTNVYADSFVIRGDEVRQIAPGQTGKIADYNYKLPDDFTGCVIAWNSNNLDSKVGGNYNYLYRLFRKSNLKPFERDISTEIYQAGSTPCNGVEGFNCYFPLQSYGFQPTNGVGYQPYRVVVLSFELLHAPATVCGPKKSTNLVKNKCVNFNFNGLTGTGVLTESNKKFLPFQQFGRDIADTTDAVRDPQTLEILDITPCSFGGVSVITPGTNTSNQVAVLYQDVNCTEVPVAIHADQLTPTWRVYSTGSNVFQTRAGCLIGAEHVNNSYECDIPIGAGICASYQTQTNSPRRARSVASQSIIAYTMSLGAENSVAYSNNSIAIPTNFTISVTTEILPVSMTKTSVDCTMYICGDSTECSNLLLQYGSFCTQLNRALTGIAVEQDKNTQEVFAQVKQIYKTPPIKDFGGFNFSQILPDPSKPSKRSFIEDLLFNKVTLADAGFIKQYGDCLGDIAARDLICAQKFNGLTVLPPLLTDEMIAQYCSALLAGTITSGWTFGAGAALQIPFAMQMAYRFNGIGVTQNVLYENQKLIANQFNSAIGKIQDSLSFTASALGKLQDVVNQNAQALNTLVKQLSSNFGAISSVLNDILSRLDKVEAEVQIDRLITGRLQSLQTYVTQQLIRAAEIRASANLAATKMSECVLGQSKRVDFCGKGYHLMSFPQCAPHGVVFLHVTYVPAQEKNFTTAPAICHDGKAHFPREGVFVSNGTHWFVTQRNFYEPQIITTDNTFVSGNCDVVIGIVNNTVYDPLQPELDSFKEELDKYFKNHTSPDVDLGDISGINASVVNIQKEIDRLNEVAKNLNESLIDLQELGKYEQYIKGGGGSDIIKLLNEQVNKEMQSSNLYMSMSSWCYTHSLDGAGLFLFDHAAEEYEHAKKLIIFLNENNVPVQLTSISAPEHKFEGLTQIFQKAYEHEQHISESINNIVDHAIKSKDHATFNFLQWYVAEQHEEEVLFKDILDKIELIGNENHGLYLADQYVKGIAKSRKS

SEQ ID NO: 5587 - protein, 1379 aa, Artificial Sequence; identical to SEQ ID NO: 5567
  SARS-CoV-2/Australia/NSW10/2020__EPI_ISL_413596 spike protein (1-1211)(T874C_S1055C) Ferritin construct

SEQ ID NO: 5588 - protein, 1379 aa, Artificial Sequence
  SARS-CoV-2/Switzerland/1000477797/2020__EPI_ISL_413023 spike protein (1-1211)(T874C_S1055C) Ferritin construct
MFVFLVLLPLVSSQCVNLTTRTQLPPAYTNSFTRGVYYPDKVFRSSVLHSTQDLFLPFFSNVTWFHAIHVSGTNGTKRFDNPVLPFNDGVYFASTEKSNIIRGWIFGTTLDSKTQSLLIVNNATNVVIKVCEFQFCNDPFLGVYYHKNNKSWMESEFRVYSSANNCTFEYVSQPFLMDLEGKQGNFKNLREFVFKNIDGYFNIYSKHTPINLVRDLPQGFSALEPLVDLPIGINITRFQTLLALHRSYLTPGDSSSGWTAGAAAYYVGYLQPRTFLLKYNENGTITDAVDCALDPLSETKCTLKSFTVEKGIYQTSNFRVQPTESIVRFPNITNLCPFGEVFNATRFASVYAWNRKRISNCVADYSVLYNSASFSTFKCYGVSPTKLNDLCFTNVYADSFVIRGDEVRQIAPGQTGKIADYNYKLPDDFTGCVIAWNSNNLDSKVGGNYNYLYRLFRKSNLKPFERDISTEIYQAGSTPCNGVEGFNCYFPLQSYGFQPTNGVGYQPYRVVVLSFELLHAPATVCGPKKSTNLVKNKCVNFNFNGLTGTGVLTESNKKFLPFQQFGRDIADTTDAVRDPQTLEILDITPCSFGGVSVITPGTNTSNQVAVLYQGVNCTEVPVAIHADQLTPTWRVYSTGSNVFQTRAGCLIGAEHVNNSYECDIPIGAGICASYQTQTNSPRRARSVASQSIIAYTMSLGAENSVAYSNNSIAIPTNFTISVTTEILPVSMTKTSVDCTMYICGDSTECSNLLLQYGSFCTQLNRALTGIAVEQDKNTQEVFAQVKQIYKTPPIKDFGGFNFSQILPDPSKPSKRSFIEDLLFNKVTLADAGFIKQYGDCLGDIAARDLICAQKFNGLTVLPPLLTDEMIAQYCSALLAGTITSGWTFGAGAALQIPFAMQMAYRFNGIGVTQNVLYENQKLIANQFNSAIGKIQDSLSSTASALGKLQDVVNQNAQALNTLVKQLSSNFGAISSVLNDILSRLDKVEAEVQIDRLITGRLQSLQTYVTQQLIRAAEIRASANLAATKMSECVLGQSKRVDFCGKGYHLMSFPQCAPHGVVFLHVTYVPAQEKNFTTAPAICHDGKAHFPREGVFVSNGTHWFVTQRNFYEPQIITTDNTFVSGNCDVVIGIVNNTVYDPLQPELDSFKEELDKYFKNHTSPDVDLGDISGINASVVNIQKEIDRLNEVAKNLNESLIDLQELGKYEQYIKGGGGSDIIKLLNEQVNKEMQSSNLYMSMSSWCYTHSLDGAGLFLFDHAAEEYEHAKKLIIFLNENNVPVQLTSISAPEHKFEGLTQIFQKAYEHEQHISESINNIVDHAIKSKDHATFNFLQWYVAEQHEEEVLFKDILDKIELIGNENHGLYLADQYVKGIAKSRKS

SEQ ID NO: 5589 - protein, 1379 aa, Artificial Sequence
  SARS-CoV-2/Belgium/BA-02291/2020__EPI_ISL_415159 spike protein (1-1211)(T874C_S1055C) Ferritin construct
MFVFLVLLPLVSSQCVNLTTRTQLPPAYTNSFTRGVYYPDKVFRSSVLHSTQDLFLPFFSNVTWFHAIHVSGTNGTKRFDNPVLPFNDGVYFASTEKSNIIRGWIFGTTLDSKTQSLLIVNNATNVVIKVCEFQFCNDPFLGVYYHKNNKSWMESEFRVYSSANNCTFEYVSQPFLMDLEGKQGNFKNLREFVFKNIDGYFKIYSKHTPINLVRDLPQGFSALEPLVDLPIGINITRFQTLLALHRSYLTPGDSSSGWTAGAAAYYVGYLQPRTFLLKYNENGTITDAVDCALDPLSETKCTLKSFTVEKGIYQTSNFRVQPTESIVRFPNITNLCPFGEVFNATRFASVYAWNRKRISNCVADYSVLYNSASFSTFKCYGVSPTKLNDLCFTNVYADSFVIRGDEVRQIAPGQTGKIADYNYKLPDDFTGCVIAWNSNNLDSKVGGNYNYLYRLFRRSNLKPFERDISTEIYQAGSTPCNGVEGFNCYFPLQSYGFQPTNGVGYQPYRVVVLSFELLPAPATVCGPKKSTNLVKNKCVNFNFNGLTGTGVLTESNKKFLPFQQFGRDIADTTDAVRDPQTLEILDITPCSFGGVSVITPGTNTSNQVAVLYQGVNCTEVPVAIHADQLTPTWRVYSTGSNVFQTRAGCLIGAEHVNNSYECDIPIGAGICASYQTQTNSPRRARSVASQSIIAYTMSLGAENSVAYSNNSIAIPTNFTISVTTEILPVSMTKTSVDCTMYICGDSTECSNLLLQYGSFCTQLNRALTGIAVEQDKNTQEVFAQVKQIYKTPPIKDFGGFNFSQILPDPSKPSKRSFIEDLLFNKVTLADAGFIKQYGDCLGDIAARDLICAQKFNGLTVLPPLLTDEMIAQYCSALLAGTITSGWTFGAGAALQIPFAMQMAYRFNGIGVTQNVLYENQKLIANQFNSAIGKIQDSLSSAAPALGKLQDVVNQNAQALNTLVKQLSSNFGAISSVLNDILSRLDKVEAEVQIDRLITGRLQSLQTYVTQQLIRAAEIRASANLAATKMSECVLGQSKRVDFCGKGYHLMSFPQCAPHGVVFLHVTYVPAQEKNFTTAPAICHDGKAHFPREGVFVSNGTHWFVTQRNFYEPQIITTDNTFVSGNCDVVIGIVNNTVYDPLQPELDSFKEELDKYFKNHTSPDVDLGDISGINASVVNIQKEIDRLNEVAKNLNESLIDLQELGKYEQYIKGGGGSDIIKLLNEQVNKEMQSSNLYMSMSSWCYTHSLDGAGLFLFDHAAEEYEHAKKLIIFLNENNVPVQLTSISAPEHKFEGLTQIFQKAYEHEQHISESINNIVDHAIKSKDHATFNFLQWYVAEQHEEEVLFKDILDKIELIGNENHGLYLADQYVKGIAKSRKS

SEQ ID NO: 5590 - protein, 1379 aa, Artificial Sequence
  SARS-CoV-2/USA/WA8-UW5/2020__EPI_ISL_413486 spike protein (1-1211)(T874C_S1055C) Ferritin construct
MFVFLVLLPLVSSQCVNLTTRTQLPPAYTNSFTRGVYYPDKVFRSSVLHSTQDLFLPFFSNVTWFHAIHVSGTNGTKRFDNPVLPFNDGVYFASTEKSNIIRGWIFGTTLDSKTQSLLIVNNATNVVIKVCEFQFCNDPFLGVYYHKNNKSWMESEFRVYSSANNCTFEYVSQPFLMDLEGKQGNFKNLREFVFKNIDGYFKIYSKHTPINLVRDLPQGFSALEPLVDLPIGINITRFQTLLALHRSYLTPGDSSSGWTAGAAAYYVGYLQPRTFLLKYNENGTITDAVDCALDPLSETKCTLKSFTVEKGIYQTSNFRVQPTESIVRFPNITNLCPFGEVFNATRFASVYAWNRKRISNCVADYSVLYNSASFSTFKCYGVSPTKLNDLCFTNVYADSFVIRGDEVRQIAPGQTGKIADYNYKLPDDFTGCVIAWNSNNLDSKVGGNYNYLYRLFRKSNLKPFERDISTEIYQAGSTPCNGVEGFNCYFPLQSYGFQPTNGVGYQPYRVVVLSFELLHAPATVCGPKKSTNLVKNKCVNFNFNGLTGTGVLTESNKKFLPFQQFGRDIADTTDAVRDPQTLEILDITPCSFGGVSVITPGTNTSNQVAVLYQDVNCTEVPVAIHADQLTPTWRVYSTGSNVFQTRAGCLIGAEYVNNSYECDIPIGAGICASYQTQTNSPRRARSVASQSIIAYTMSLGAENSVAYSNNSIAIPTNFTISVTTEILPVSMTKTSVDCTMYICGDSTECSNLLLQYGSFCTQLNRALTGIAVEQDKNTQEVFAQVKQIYKTPPIKDFGGFNFSQILPDPSKPSKRSFIEDLLFNKVTLADAGFIKQYGDCLGDIAARDLICAQKFNGLTVLPPLLTDEMIAQYCSALLAGTITSGWTFGAGAALQIPFAMQMAYRFNGIGVTQNVLYENQKLIANQFNSAIGKIQDSLSSTASALGKLQDVVNQNAQALNTLVKQLSSNFGAISSVLNDILSRLDKVEAEVQIDRLITGRLQSLQTYVTQQLIRAAEIRASANLAATKMSECVLGQSKRVDFCGKGYHLMSFPQCAPHGVVFLHVTYVPAQEKNFTTAPAICHDGKAHFPREGVFVSNGTHWFVTQRNFYEPQIITTDNTFVSGNCDVVIGIVNNTVYDPLQPELDSFKEELDKYFKNHTSPDVDLGDISGINASVVNIQKEIDRLNEVAKNLNESLIDLQELGKYEQYIKGGGGSDIIKLLNEQVNKEMQSSNLYMSMSSWCYTHSLDGAGLFLFDHAAEEYEHAKKLIIFLNENNVPVQLTSISAPEHKFEGLTQIFQKAYEHEQHISESINNIVDHAIKSKDHATFNFLQWYVAEQHEEEVLFKDILDKIELIGNENHGLYLADQYVKGIAKSRKS

SEQ ID NO: 5591 - protein, 1379 aa, Artificial Sequence
  SARS-CoV-2/England/20102000506/2020__EPI_ISL_415147 spike protein (1-1211)(T874C_S1055C) Ferritin construct
MFVFLVLLPLVSSQCVNLTTRTQLPPAYTNSFTRGVYYPDKVFRSSVLHSTQDLFLPFFSNVTWFHAIHVSGTNGTKRFDNPVLPFNDGVYFASTEKSNIIRGWIFGTTLDSKTQSLLIVNNATNVVIKVCEFQFCNDPFLGVYYHKNNKSWMESEFRVYSSANNCTFEYVSQPFLMDLEGKQGNFKNLREFVFKNIDGYFKIYSKHTPINLVRDLPQGFSALEPLVDLPIGINITRFQTLLALHRSYLTPGDSSSGWTAGAAAYYVGYLQPRTFLLKYNENGTITDAVDCALDPLSETKCTLKSFTVEKGIYQTSNFRVQPTESIVRFPNITNLCPFGEVFNATRFASVYAWNRKRISNCVADYSVLYNSASFSTFKCYGVSPTKLNDLCFTNVYADSFVIRGDEVRQIAPGQTGKIADYNYKLPDDFTGCVIAWNSNNLDSKVGGNYNYLYRLFRKSNLKPFERDISTEIYQAGSTPCNGVEGFNCYFPLQSYGFQPTNGVGYQPYRVVVLSFELLHAPATVCGPKKSTNLVKNKCVNFNFNGLTGTGVLTESNKKFLPFQQFGRDIADTTDAVRDPQTLEILDITPCSFGGVSVITPGTNTSNQVAVLYQGVNCTEVPVAIHADQLTPTWRVYSTGSNVFQTRAGCLIGAEHVNNSYECDIPIGAGICASYQTQTNSPRRARSVASQSIIAYTMSLGAENSVAYSNNSIAIPTNFTISVTTEILPVSMTKTSVDCTMYICGDSTECSNLLLQYGSFCTQLNRALTGIAVEQDKNTQEVFAQVKQIYKTPPIKDFGGFNFSQILPDPSKPSKRSFIEDLLFNKVTLADAGFIKQYGYCLGDIAARDLICAQKFNGLTVLPPLLTDEMIAQYCSALLAGTITSGWTFGAGAALQIPFAMQMAYRFNGIGVTQNVLYENQKLIANQFNSAIGKIQDSLSSTASALGKLQDVVNQNAQALNTLVKQLSSNFGAISSVLNDILSRLDKVEAEVQIDRLITGRLQSLQTYVTQQLIRAAEIRASANLAATKMSECVLGQSKRVDFCGKGYHLMSFPQCAPHGVVFLHVTYVPAQEKNFTTAPAICHDGKAHFPREGVFVSNGTHWFVTQRNFYEPQIITTDNTFVSGNCDVVIGIVNNTVYDPLQPELDSFKEELDKYFKNHTSPDVDLGDISGINASVVNIQKEIDRLNEVAKNLNESLIDLQELGKYEQYIKGGGGSDIIKLLNEQVNKEMQSSNLYMSMSSWCYTHSLDGAGLFLFDHAAEEYEHAKKLIIFLNENNVPVQLTSISAPEHKFEGLTQIFQKAYEHEQHISESINNIVDHAIKSKDHATFNFLQWYVAEQHEEEVLFKDILDKIELIGNENHGLYLADQYVKGIAKSRKS

SEQ ID NO: 5592 - protein, 1379 aa, Artificial Sequence
  SARS-CoV-2/Belgium/VAG-03013/2020__EPI_ISL_415155 spike protein (1-1211)(T874C_S1055C) Ferritin construct
MFVFLVLLPLVSSQCVNLTTRTQLPPAYTNSFTRGVYYPDKVFRSSVLHSTQDLFLPFFSNVTWFHAIHVSGTNGTKRFDNPVLPFNDGVYFASTEKSNIIRGWIFGTTLDSKTQSLLIVNNATNVVIKVCEFQFCNDPFLGVYYHKNNKSWMESEFRVYSSANNCTFEYVSQPFLMDLEGKQGNFKNLREFVFKNIDGYFKIYSKHTPINLVRDLPQGFSALEPLVDLPIGINITRFQTLLALHRSYLTPGDSSSGWTAGAAAYYVGYLQPRTFLLKYNENGTITDAVDCALDPLSETKCTLKSFTVEKGIYQTSNFRVQPTESIVRFPNITNLCPFGEVFNATRFASVYAWNRKRISNCVADYSVLYNSASFSTFKCYGVSPTKLNDLCFTNVYADSFVIRGDEVRQIAPGQTGKIADYNYKLPDDFTGCVIAWNSNNLDSKVGGNYNYLYRLFRKSNLKPFERDISTEIYQAGSTPCNGVEGFNCYFPLQSYGFQPTNGVGYQPYRVVVLSFELLHAPATVCGPKKSTNLVKNKCVNFNFNGLTGTGVLTESNKKFLPFQQFGRDIADTTDAVRDPQTLEILDITPCSFGGVSVITPGTNTSNQVAVLYQGVNCTEVPVAIHADQLTPTWRVYSTGSNVFQTRAGCLIGAEHVNNSYECDIPIGAGICASYQTQTNSPRRARSVASQSIIAYTMSLGAENSVAYSNNSIAIPTNFTISVTTEILPVSMTKTSVDCTMYICGDSTECSNLLLQYGSFCTQLNRALTGIAVEQDKNTQEVFAQVKQIYKTPPIKDFGGFNFSQILPDPSKPSKRSFIEDLLFNKVTLADAGFIKQYGDCLGDIAARDLICAQKFNGLTVLPPLLTDEMIAQYCSALLAGTITSGWTFGAGAALQIPFAMQMAYRFNGIGVTQNVLYENQKLIANQFNSAIGKIQDSLSSTATALGKLQDVVNQNAQALNTLVKQLSSNFGAISSVLNDILSRLDKVEAEVQIDRLITGRLQSLQTYVTQQLIRAAEIRASANLAATKMSECVLGQSKRVDFCGKGYHLMSFPQCAPHGVVFLHVTYVPAQEKNFTTAPAICHDGKAHFPREGVFVSNGTHWFVTQRNFYEPQIITTDNTFVSGNCDVVIGIVNNTVYDPLQPELDSFKEELDKYFKNHTSPDVDLGDISGINASVVNIQKEIDRLNEVAKNLNESLIDLQELGKYEQYIKGGGGSDIIKLLNEQVNKEMQSSNLYMSMSSWCYTHSLDGAGLFLFDHAAEEYEHAKKLIIFLNENNVPVQLTSISAPEHKFEGLTQIFQKAYEHEQHISESINNIVDHAIKSKDHATFNFLQWYVAEQHEEEVLFKDILDKIELIGNENHGLYLADQYVKGIAKSRKS

SEQ ID NO: 5593 - protein, 1379 aa, Artificial Sequence
  SARS-CoV-2/Belgium/BC-03016/2020__EPI_ISL_415157 spike protein (1-1211)(T874C_S1055C) Ferritin construct
MFVFLVLLPLVSSQCVNLTTRTQLPPAYTNSFTRGVYYPDKVFRSSVLHSTQDLFLPFFSNVTWFHAIHVSGTNGTKRFDNPVLPFNDGVYFASTEKSNIIRGWIFGTTLDSKTQSLLIVNNATNVVIKVCEFQFCNDPFLGVYYHKNNKSWMESEFRVYSSANNCTFEYVSQPFLMDLEGKQGNFKNLREFVFKNIDGYFKIYSKHTPINLVRDLPQGFSALEPLVDLPIGINITRFQTLLALHRSYLTPGDSSSGWTAGAAAYYVGYLQPRTFLLKYNENGTITDAVDCALDPLSETKCTLKSFTVEKGIYQTSNFRVQPTESIVRFPNITNLCPFGEVFNATRFASVYAWNRKRISNCVADYSVLYNSASFSTFKCYGVSPTKLNDLCFTNVYADSFVIRGDEVRQIAPGQTGKIADYNYKLPDDFTGCVIAWNSNNLDSKVGGNYNYLYRLFRKSNLKPFERDISTEIYQAGSTPCNGVEGFNCYFPLQSYGFQPTNGVGYQPYRVVVLSFELLHAPATVCGPKKSTNLVKNKCVNFNFNGLTGTGVLTESNKKFLPFQQFGRDIADTTDAVRDPQTLEILDITPCSFGGVSVITPGTNTSNQVAVLYQGVNCTEVPVAIHADQLTPTWRVYSTGSNVFQTRAGCLIGAEHVNNSYECDIPIGAGICASYQTQTNSPRRARSVASQSIIAYTMSLGAENSVAYSNNSIAIPTNFTISVTTEILPVSMTKTSVDCTMYICGDSTECSNLLLQYGSFCTQLNRALTGIAVEQDKNTQEVFAQVKQIYKTPPIKDFGGFNFSQILPDPSKPSKRSFIEDLLFNKVTLADAGFIKQYGDCLGDIAARDLICAQKFNGLTVLPPLLTDEMIAQYCSALLAGTITSGWTFGAGAALQIPFAMQMAYRFNGIGVTQNVLYENQKLIANQFNSAIGKIQDSLSSTAPALGKLQDVVNQNAQALNTLVKQLSSNFGAISSVLNDILSRLDKVEAEVQIDRLITGRLQSLQTYVTQQLIRAAEIRASANLAATKMSECVLGQSKRVDFCGKGYHLMSFPQCAPHGVVFLHVTYVPAQEKNFTTAPAICHDGKAHFPREGVFVSNGTHWFVTQRNFYEPQIITTDNTFVSGNCDVVIGIVNNTVYDPLQPELDSFKEELDKYFKNHTSPDVDLGDISGINASVVNIQKEIDRLNEVAKNLNESLIDLQELGKYEQYIKGGGGSDIIKLLNEQVNKEMQSSNLYMSMSSWCYTHSLDGAGLFLFDHAAEEYEHAKKLIIFLNENNVPVQLTSISAPEHKFEGLTQIFQKAYEHEQHISESINNIVDHAIKSKDHATFNFLQWYVAEQHEEEVLFKDILDKIELIGNENHGLYLADQYVKGIAKSRKS

SEQ ID NO: 5594 - protein, 1379 aa, Artificial Sequence
  SARS-CoV-2/Germany/BavPat3/2020__EPI_ISL_414521 spike protein (1-1211)(T874C_S1055C) Ferritin construct
MFVFLVLLPLVSSQCVNLTTRTQLPPAYTNSFTRGVYYPDKVFRSSVLHSTQDLFLPFFSNVTWFHAIHVSGTNGTKRFDNPVLPFNDGVYFASTEKSNIIRGWIFGTTLDSKTQSLLIVNNATNVVIKVCEFQFCNDPFLGVYYHKNNKSWMESEFRVYSSANNCTFEYVSQPFLMDLEGKQGNFKNLREFVFKNIDGYFKIYSKHTPINLVRDLPQGFSALEPLVDLPIGINITRFQTLLALHRSYLTPGDSSSGWTAGAAAYYVGYLQPRTFLLKYNENGTITDAVDCALDPLSETKCTLKSFTVEKGIYQTSNFRVQPTESIVRFPNITNLCPFGEVFNATRFASVYAWNRKRISNCVADYSVLYNSASFSTFKCYGVSPTKLNDLCFTNVYADSFVIRGDEVRQIAPGQTGKIADYNYKLPDDFTGCVIAWNSNNLDSKVGGNYNYLYRLFRKSNLKPFERDISTEIYQAGSTPCNGVEGFNCYFPLQSYGFQPTNGVGYQPYRVVVLSFELLHAPATVCGPKKSTNLVKNKCVNFNFNGLTGTGVLTESNKKFLPFQQFGRDIADTTDAVRDPQTLEILDITPCSFGGVSVITPGTNTSNQVAVLYQDVNCTEVPVAIHADQLTPTWRVYSTGSNVFQTRAGCLIGAEHVNNSYECDIPIGAGICASYQTQTNSPRRARSVASQSIIAYTMSLGAENSVAYSNNSIAIPTNFTISVTTEILPVSMTKTSVDCTMYICGDSTECSNLLLQYGSFCTQLNRALTGIAVEQDKNTQQVFAQVKQIYKTPPIKDFGGFNFSQILPDPSKPSKRSFIEDLLFNKVTLADAGFIKQYGDCLGDIAARDLICAQKFNGLTVLPPLLTDEMIAQYCSALLAGTITSGWTFGAGAALQIPFAMQMAYRFNGIGVTQNVLYENQKLIANQFNSAIGKIQDSLSSTASALGKLQDVVNQNAQALNTLVKQLSSNFGAISSVLNDILSRLDKVEAEVQIDRLITGRLQSLQTYVTQQLIRAAEIRASANLAATKMSECVLGQSKRVDFCGKGYHLMSFPQCAPHGVVFLHVTYVPAQEKNFTTAPAICHDGKAHFPREGVFVSNGTHWFVTQRNFYEPQIITTDNTFVSGNCDVVIGIVNNTVYDPLQPELDSFKEELDKYFKNHTSPDVDLGDISGINASVVNIQKEIDRLNEVAKNLNESLIDLQELGKYEQYIKGGGGSDIIKLLNEQVNKEMQSSNLYMSMSSWCYTHSLDGAGLFLFDHAAEEYEHAKKLIIFLNENNVPVQLTSISAPEHKFEGLTQIFQKAYEHEQHISESINNIVDHAIKSKDHATFNFLQWYVAEQHEEEVLFKDILDKIELIGNENHGLYLADQYVKGIAKSRKS

SEQ ID NO: 5595 - protein, 1379 aa, Artificial Sequence
  SARS-CoV-2/France/HF1805/2020__EPI_ISL_414628 spike protein (1-1211)(T874C_S1055C) Ferritin construct
MFVFLVLLPLVSSQCVNLTTRTQLPPAYTNSFTRGVYYPDKVFRSSVLHSTQDLFLPFFSNVTWFHAIHVSGTNGTKRFDNPVLPFNDGVYFASTEKSNIIRGWIFGTTLDSKTQSLLIVNNATNVVIKVCEFQFCNDPFLGVYYHKNNKSWMESEFRVYSSANNCTFEYVSQPFLMDLEGKQGNFKNLREFVFKNIDGYFKIYSKHTPINLVRDLPQGFSALEPLVDLPIGINITRFQTLLALHRSYLTPGDSSSGWTAGAAAYYVGYLQPRTFLLKYNENGTITDAVDCALDPLSETKCTLKSFTVEKGIYQTSNFRVQPTESIVRFPNITNLCPFGEVFNATRFASVYAWNRKRISNCVADYSVLYNSASFSTFKCYGVSPTKLNDLCFTNVYADSFVIRGDEVRQIAPGQTGKIADYNYKLPDDFTGCVIAWNSNNLDSKVGGNYNYLYRLFRKSNLKPFERDISTEIYQAGSTPCNGVEGFNCYFPLQSYGFQPTNGVGYQPYRVVVLSFELLHAPATVCGPKKSTNLVKNKCVNFNFNGLTGTGVLTESNKKFLPFQQFGRDIADTTDAVRDPQTLEILDITPCSFGGVSVITPGTNTSNQVAVLYQGVNCTEVPVAIHADQLTPTWRVYSTGSNVFQTRAGCLIGAEHVNNSYECDIPIGAGICASYQTQTNSPRRARSVASQSIIAYTMSLGAENSVAYSNNSIAIPTNFTISVTTEILPVSMTKTSVDCTMYICGDSTECSNLLLQYGSFCTQLNRALTGIAVEQDKNTQEVFAQVKQIYKTPPIKDFGGFNFSQILPDPSKPSKRSFIEDLLFNKVTLADAGFIKQYGDCLGDIAARDLICAQKFNGLTVLPPLLTDEMIAQYCSALLAGTITSGWTFGAGAALQIPFAMQMAYRFNGIGVTQNVLYENQKLIANQFNSAIGKIQDSLSSTASALGKLQDVVNQNAQALNTLVKQLSSNFGAISSVLNDILSRLDKVEAEVQIDRLITGRLQSLQTYVTQQLIRAAEIRASANLAATKMSECVLGQSKRVDFCGKGYHLMSFPQCAPHGVVFLHVTYVPAQEKNFTTAPAICHDGKAHFPREGVFVSNGTHWFVTQRNFYEPQIITTDNTFVSGNCDVVIGVVNNTVYDPLQPELDSFKEELDKYFKNHTSPDVDLGDISGINASVVNIQKEIDRLNEVAKNLNESLIDLQELGKYEQYIKGGGGSDIIKLLNEQVNKEMQSSNLYMSMSSWCYTHSLDGAGLFLFDHAAEEYEHAKKLIIFLNENNVPVQLTSISAPEHKFEGLTQIFQKAYEHEQHISESINNIVDHAIKSKDHATFNFLQWYVAEQHEEEVLFKDILDKIELIGNENHGLYLADQYVKGIAKSRKS

SEQ ID NO: 5596 - protein, 1379 aa, Artificial Sequence
  SARS-CoV-2/Netherlands/ZuidHolland_9/2020__EPI_ISL_414445 spike protein (1-1211)(T874C_S1055C) Ferritin construct
MFVFLVLLPLVSSQCVNLTTRTQLPPAYTNSFTRGVYYPDKVFRSSVLHSTQDLFLPFFSNVTWFHAIHVSGTNGTKRFDNPVLPFNDGVYFASTEKSNIIRGWIFGTTLDSKTQSLLIVNNATNVVIKVCEFQFCNDPFLGVYYHKNNKSWMESEFRVYSSANNCTFEYVSQPFLMDLEGKQGNFKNLREFVFKNIDGYFKIYSKHTPINLVRDLPQGFSALEPLVDLPIGINITRFQTLLALHRSYLTPGDSSSGWTAGAAAYYVGYLQPRTFLLKYNENGTITDAVDCALDPLSETKCTLKSFTVEKGIYQTSNFRVQPTESIVRFPNITNLCPFGEVFNATRFASVYAWNRKRISNCVADYSVLYNSASFSTFKCYGVSPTKLNDLCFTNVYADSFVIRGDEVRQIAPGQTGKIADYNYKLPDDFTGCVIAWNSNNLDSKVGGNYNYLYRLFRKSNLKPFERDISTEIYQAGSTPCNGVEGFNCYFPLQSYGFQPTNGVGYQPYRVVVLSFELLHAPATVCGPKKSTNLVKNKCVNFNFNGLTGTGVLTESNKKFLPFQQFGRDIADTTDAVRDPQTLEILDITPCSFGGVSVITPGTNTSNQVAVLYQGVNCTEVPVAIHADQLTPTWRVYSTGSNVFQTRAGCLIGAEHVNNSYECDIPIGAGICASYQTQTNSPRRARSVASQSIIAYTMSLGAENSVAYSNNSIAIPTNFTISVTTEILPVSMTKTSVDCTMYICGDSTECSNLLLQYGSFCTQLNRALTGIAVEQDKNTQEVFAQVKQIYKTPPIKDFGGFNFSQILPDPSKPSKRSFIEDLLFNKVTLADAGFIKQYGDCLGDIAARDLICVQKFNGLTVLPPLLTDEMIAQYCSALLAGTITSGWTFGAGAALQIPFAMQMAYRFNGIGVTQNVLYENQKLIANQFNSAIGKIQDSLSSTASALGKLQDVVNQNAQALNTLVKQLSSNFGAISSVLNDILSRLDKVEAEVQIDRLITGRLQSLQTYVTQQLIRAAEIRASANLAATKMSECVLGQSKRVDFCGKGYHLMSFPQCAPHGVVFLHVTYVPAQEKNFTTAPAICHDGKAHFPREGVFVSNGTHWFVTQRNFYEPQIITTDNTFVSGNCDVVIGIVNNTVYDPLQPELDSFKEELDKYFKNHTSPDVDLGDISGINASVVNIQKEIDRLNEVAKNLNESLIDLQELGKYEQYIKGGGGSDIIKLLNEQVNKEMQSSNLYMSMSSWCYTHSLDGAGLFLFDHAAEEYEHAKKLIIFLNENNVPVQLTSISAPEHKFEGLTQIFQKAYEHEQHISESINNIVDHAIKSKDHATFNFLQWYVAEQHEEEVLFKDILDKIELIGNENHGLYLADQYVKGIAKSRKS

SEQ ID NO: 5597 - protein, 1379 aa, Artificial Sequence
  SARS-CoV-2/Finland/FIN03032020A/2020__EPI_ISL_413602 spike protein (1-1211)(T874C_S1055C) Ferritin construct
MFVFLVLLPLVSSQCVNLTTRTQLPPAYTNSFTRGVYYPDKVFRSSVLHSTQDLFLPFFSNVTWFHAIHVSGTNGTKRFDNPVLPFNDGVYFASTEKSNIIRGWIFGTTLDSKTQSLLIVNNATNVVIKVCEFQFCNDPFLGVYYHKNNKSWMESEFRVYSSANNCTFEYVSQPFLMDLEGKQGNFKNLREFVFKNIDGYFKIYSKHTPINLVRDLPQGFSALEPLVDLPIGINITRFQTLLALHRSYLTPGDSSSGWTAGAAAYYVGYLQPRTFLLKYNENGTITDAVDCALDPLSETKCTLKSFTVEKGIYQTSNFRVQPTESIVRFPNITNLCPFGEVFNATRFASVYAWNRKRISNCVADYSVLYNSASFSTFKCYGVSPTKLNDLCFTNVYADSFVIRGDEVRQIAPGQTGKIADYNYKLPDDFTGCVISWNSNNLDSKVGGNYNYLYRLFRKSNLKPFERDISTEIYQAGSTPCNGVEGFNCYFPLQSYGFQPTNGVGYQPYRVVVLSFELLHAPATVCGPKKSTNLVKNKCVNFNFNGLTGTGVLTESNKKFLPFQQFGRDIADTTDAVRDPQTLEILDITPCSFGGVSVITPGTNTSNQVAVLYQGVNCTEVPVAIHADQLTPTWRVYSTGSNVFQTRAGCLIGAEHVNNSYECDIPIGAGICASYQTQTNSPRRARSVASQSIIAYTMSLGAENSVAYSNNSIAIPTNFTISVTTEILPVSMTKTSVDCTMYICGDSTECSNLLLQYGSFCTQLNRALTGIAVEQDKNTQEVFAQVKQIYKTPPIKDFGGFNFSQILPDPSKPSKRSFIEDLLFNKVTLADAGFIKQYGDCLGDIAARDLICAQKFNGLTVLPPLLTDEMIAQYCSALLAGTITSGWTFGAGAALQIPFAMQMAYRFNGIGVTQNVLYENQKLIANQFNSAIGKIQDSLSSTASALGKLQDVVNQNAQALNTLVKQLSSNFGAISSVLNDILSRLDKVEAEVQIDRLITGRLQSLQTYVTQQLIRAAEIRASANLAATKMSECVLGQSKRVDFCGKGYHLMSFPQCAPHGVVFLHVTYVPAQEKNFTTAPAICHDGKAHFPREGVFVSNGTHWFVTQRNFYEPQIITTDNTFVSGNCDVVIGIVNNTVYDPLQPELDSFKEELDKYFKNHTSPDVDLGDISGINASVVNIQKEIDRLNEVAKNLNESLIDLQELGKYEQYIKGGGGSDIIKLLNEQVNKEMQSSNLYMSMSSWCYTHSLDGAGLFLFDHAAEEYEHAKKLIIFLNENNVPVQLTSISAPEHKFEGLTQIFQKAYEHEQHISESINNIVDHAIKSKDHATFNFLQWYVAEQHEEEVLFKDILDKIELIGNENHGLYLADQYVKGIAKSRKS

SEQ ID NO: 5598 - protein, 1379 aa, Artificial Sequence
  SARS-CoV-2/France/GE1977/2020__EPI_ISL_414632 spike protein (1-1211)(T874C_S1055C) Ferritin construct
MFVFLVLLPLVSSQCVNLTTRTQLPPAYTNSFTRGVYYPDKVFRSSVLHSTQDLFLPFFSNVTWFHAIHVSGTNGTKRFDNPVLPFNDGVYFASTEKSNIIRGWIFGTTLDSKTQSLLIVNNATNVVIKVCEFQFCNDPFLGVYYHKNNKSWMESEFRVYSSANNCTFEYVSQPFLMDLEGKQGNFKNLREFVFKNIDGYFKIYSKHTPINLVRDLPQGFSALEPLVDLPIGINITRFQTLLALHRSYLTPGDSSSGWTAGAAAYYVGYLQPRTFLLKYNENGTITDAVDCALDPLSETKCTLKSFTVEKGIYQTSNFRVQPTESIVRFPNITNLCPFGEVFNATRFASVYAWNRKRISNCVADYSVLYNSASFSTFKCYGVSPTKLNDLCFTNVYADSFVIRGDEVRQIAPGQTGKIADYNYKLPDDFTGCVIAWNSNNLDSKVGGNYNYLYRLFRKSNLKPFERDISTEIYQAGSTPCNGVEGFNCYFPLQSYGFQPTNGVGYQPYRVVVLSFELLHAPATVCGPKKSTNLVKNKCVNFNFNGLTGTGVLTESNKKFLPFQQFGRDIADTTDAVRDPQTLEILDITPCSFGGVSVITPGTNTSNQVAVLYQGVNCTEVPVAIHADQLTPTWRVYSTGSNVFQTRAGCLIGAEHVNNSYECDIPIGAGICASYQTQTNSPRRARSVASQSIIAYTMSLGAENSVAYSNNSIAIPTNFTISVTTEILPVSMTKTSVDCTMYICGDSTECSNLLLQYGSFCTQLNRALTGIAVEQDKNTQEVFAQVKQIYKTPPIKDFGGFNFSQILPDPSKPSKRSFIEDLLFNKVTLADAGFIKQYGDCLGDIAARDLICAQKFNGLTVLPPLLTDEMIAQYCSALLAGTITSGWTFGAGAALQIPFAMQMAYRFNGIGVTQNVLYENQKLIANQFNSAIGKIQDSLFSTASALGKLQDVVNQNAQALNTLVKQLSSNFGAISSVLNDILSRLDKVEAEVQIDRLITGRLQSLQTYVTQQLIRAAEIRASANLAATKMSECVLGQSKRVDFCGKGYHLMSFPQCAPHGVVFLHVTYVPAQEKNFTTAPAICHDGKAHFPREGVFVSNGTHWFVTQRNFYEPQIITTDNTFVSGNCDVVIGIVNNTVYDPLQPELDSFKEELDKYFKNHTSPDVDLGDISGINASVVNIQKEIDRLNEVAKNLNESLIDLQELGKYEQYIKGGGGSDIIKLLNEQVNKEMQSSNLYMSMSSWCYTHSLDGAGLFLFDHAAEEYEHAKKLIIFLNENNVPVQLTSISAPEHKFEGLTQIFQKAYEHEQHISESINNIVDHAIKSKDHATFNFLQWYVAEQHEEEVLFKDILDKIELIGNENHGLYLADQYVKGIAKSRKS

SEQ ID NO: 5599 - protein, 1379 aa, Artificial Sequence
  SARS-CoV-2/Finland/FIN-313/2020__EPI_ISL_414641 spike protein (1-1211)(T874C_S1055C) Ferritin construct
MFVFLVLLPLVSSQCVNLTTRTQLPPAYTNSFTRGVYYPDKVFRSSVLHSTQDLFLPFFSNVTWFHAIHVSGTNGTKRFDNPVLPFNDGVYFASTEKSNIIRGWIFGTTLDSKTQSLLIVNNATNVVIKVCEFQFCNDPFLGVYYHKNNKSWMESEFRVYSSANNCTFEYVSQPFLMDLEGKQGNFKNLREFVFKNIDGYFKIYSKHTPINLVRDLPQGFSALEPLVDLPIGINITRFKTLLALHRSYLTPGDSSSGWTAGAAAYYVGYLQPRTFLLKYNENGTITDAVDCALDPLSETKCTLKSFTVEKGIYQTSNFRVQPTESIVRFPNITNLCPFGEVFNATRFASVYAWNRKRISNCVADYSVLYNSASFSTFKCYGVSPTKLNDLCFTNVYADSFVIRGDEVRQIAPGQTGKIADYNYKLPDDFTGCVIAWNSNNLDSKVGGNYNYLYRLFRKSNLKPFERDISTEIYQAGSTPCNGVEGFNCYFPLQSYGFQPTNGVGYQPYRVVVLSFELLHAPATVCGPKKSTNLVKNKCVNFNFNGLTGTGVLTESNKKFLPFQQFGRDIADTTDAVRDPQTLEILDITPCSFGGVSVITPGTNTSNQVAVLYQGVNCTEVPVAIHADQLTPTWRVYSTGSNVFQTRAGCLIGAEHVNNSYECDIPIGAGICASYQTQTNSPRRARSVASQSIIAYTMSLGAENSVAYSNNSIAIPTNFTISVTTEILPVSMTKTSVDCTMYICGDSTECSNLLLQYGSFCTQLNRALTGIAVEQDKNTQEVFAQVKQIYKTPPIKDFGGFNFSQILPDPSKPSKRSFIEDLLFNKVTLADAGFIKQYGDCLGDIAARDLICAQKFNGLTVLPPLLTDEMIAQYCSALLAGTITSGWTFGAGAALQIPFAMQMAYRFNGIGVTQNVLYENQKLIANQFNSAIGKIQDSLSSTASALGKLQDVVNQNAQALNTLVKQLSSNFGAISSVLNDILSRLDKVEAEVQIDRLITGRLQSLQTYVTQQLIRAAEIRASANLAATKMSECVLGQSKRVDFCGKGYHLMSFPQCAPHGVVFLHVTYVPAQEKNFTTAPAICHDGKAHFPREGVFVSNGTHWFVTQRNFYEPQIITTDNTFVSGNCDVVIGIVNNTVYDPLQPELDSFKEELDKYFKNHTSPDVDLGDISGINASVVNIQKEIDRLNEVAKNLNESLIDLQELGKYEQYIKGGGGSDIIKLLNEQVNKEMQSSNLYMSMSSWCYTHSLDGAGLFLFDHAAEEYEHAKKLIIFLNENNVPVQLTSISAPEHKFEGLTQIFQKAYEHEQHISESINNIVDHAIKSKDHATFNFLQWYVAEQHEEEVLFKDILDKIELIGNENHGLYLADQYVKGIAKSRKS

SEQ ID NO: 5600 - protein, 1379 aa, Artificial Sequence
  SARS-CoV-2/Netherlands/ZuidHolland_2/2020__EPI_ISL_414556 spike protein (1-1211)(T874C_S1055C) Ferritin construct
MFVFLVLLPLVSSQCVNLTTRTQLPPAYTNSFTRGVYYPDKVFRSSVLHSTQDLFLPFFSNVTWFHAIHVSGTNGTKRFDNPVLPFNDGVYFASTEKSNIIRGWIFGTTLDSKTQSLLIVNNATNVVIKVCEFQFCNDPFLGVYYHKNNKSWMESEFRVYSSANNCTFEYVSQPFLMDLEGKQGNFKNLREFVFKNIDGYFKIYSKHTPINLVRDLPQGFSALEPLVDLPIGINITRFQTLLALHRSYLTPGDSSSGWTAGAAAYYVGYLQPRTFLLKYNENGTITDAVDCALDPLSETKCTLKSFTVEKGIYQTSNFRVQPTESIVRFPNITNLCPFGEVFNATRFASVYAWNRKRISNCVADYSVLYNSASFSTFKCYGVSPTKLNDLCFTNVYADSFVIRGDEVRQIAPGQTGKIADYNYKLPDDFTGCVIAWNSNNLDSKVGGNYNYLYRLFRKSNLKPFERDISTEIYQAGSTPCNGVEGFNCYFPLQSYGFQPTNGVGYQPYRVVVLSFELLHAPATVCGPKKSTNLVKNKCVNFNFNGLTGTGVLTESNKKFLPFQQFGRDIADTTDAVRDPQTLEILDITPCSFGGVSVITPGTNTSNQVAVLYQGVNCTEVPVAIHADQLTPTWRVYSTGSNVFQTRAGCLIGAEHVNNSYECDIPIGAGICASYQTQTNSPRRARSVASQSIIAYTMSLGAENSVAYSNNSIAIPTNFTISVTTEILPVSMTKTSVDCTMYICGDSTECSNLLLQYGSFCTQLNRALTGIALEQDKNTQEVFAQVKQIYKTPPIKDFGGFNFSQILPDPSKPSKRSFIEDLLFNKVTLADAGFIKQYGDCLGDIAARDLICAQKFNGLTVLPPLLTDEMIAQYCSALLAGTITSGWTFGAGAALQIPFAMQMAYRFNGIGVTQNVLYENQKLIANQFNSAIGKIQDSLSSTASALGKLQDVVNQNAQALNTLVKQLSSNFGAISSVLNDILSRLDKVEAEVQIDRLITGRLQSLQTYVTQQLIRAAEIRASANLAATKMSECVLGQSKRVDFCGKGYHLMSFPQCAPHGVVFLHVTYVPAQEKNFTTAPAICHDGKAHFPREGVFVSNGTHWFVTQRNFYEPQIITTDNTFVSGNCDVVIGIVNNTVYDPLQPELDSFKEELDKYFKNHTSPDVDLGDISGINASVVNIQKEIDRLNEVAKNLNESLIDLQELGKYEQYIKGGGGSDIIKLLNEQVNKEMQSSNLYMSMSSWCYTHSLDGAGLFLFDHAAEEYEHAKKLIIFLNENNVPVQLTSISAPEHKFEGLTQIFQKAYEHEQHISESINNIVDHAIKSKDHATFNFLQWYVAEQHEEEVLFKDILDKIELIGNENHGLYLADQYVKGIAKSRKS

SEQ ID NO: 5601 - protein, 1379 aa, Artificial Sequence
  SARS-CoV-2/USA/WA-UW31/2020__EPI_ISL_414618 spike protein (1-1211)(T874C_S1055C) Ferritin construct
MFVFLVLLPLVSSQCVNLTTRTQLPPAYTNSFTRGVYYPDKVFRSSVLHSTQDLFLPFFSNVTWFHAIHVSGTNGTKRFDNPVLPFNDGVYFASTEKSNIIRGWIFGTTLDSKTQSLLIVNNATNVVIKVCEFQFCNDPFLGVYYHKNNKSWMESEFRVYSSANNCTFEYVSQPFLMDLEGKQGNFKNLREFVFKNIDGYFKIYSKHTPINLVRDLPQGFSALEPLVDLPIGINITRFQTLLALHRSYLTPGDSSSGWTAGAAAYYVGYLQPRTFLLKYNENGTITDAVDCALDPLSETKCTLKSFTVEKGIYQTSNFRVQPTESIVRFPNITNLCPFGEVFNATRFASVYAWNRKRISNCVADYSVLYNSASFSTFKCYGVSPTKLNDLCFTNVYADSFVIRGDEVRQIAPGQTGKIADYNYKLPDDFTGCVIAWNSNNLDSKVGGNYNYLYRLFRKSNLKPFERDISTEIYQAGSTPCNGAEGFNCYFPLQSYGFQPTNGVGYQPYRVVVLSFELLHAPATVCGPKKSTNLVKNKCVNFNFNGLTGTGVLTESNKKFLPFQQFGRDIADTTDAVRDPQTLEILDITPCSFGGVSVITPGTNTSNQVAVLYQDVNCTEVPVAIHADQLTPTWRVYSTGSNVFQTRAGCLIGAEHVNNSYECDIPIGAGICASYQTQTNSPRRARSVASQSIIAYTMSLGAENSVAYSNNSIAIPTNFTISVTTEILPVSMTKTSVDCTMYICGDSTECSNLLLQYGSFCTQLNRALTGIAVEQDKNTQEVFAQVKQIYKTPPIKDFGGFNFSQILPDPSKPSKRSFIEDLLFNKVTLADAGFIKQYGDCLGDIAARDLICAQKFNGLTVLPPLLTDEMIAQYCSALLAGTITSGWTFGAGAALQIPFAMQMAYRFNGIGVTQNVLYENQKLIANQFNSAIGKIQDSLSSTASALGKLQDVVNQNAQALNTLVKQLSSNFGAISSVLNDILSRLDKVEAEVQIDRLITGRLQSLQTYVTQQLIRAAEIRASANLAATKMSECVLGQSKRVDFCGKGYHLMSFPQCAPHGVVFLHVTYVPAQEKNFTTAPAICHDGKAHFPREGVFVSNGTHWFVTQRNFYEPQIITTDNTFVSGNCDVVIGIVNNTVYDPLQPELDSFKEELDKYFKNHTSPDVDLGDISGINASVVNIQKEIDRLNEVAKNLNESLIDLQELGKYEQYIKGGGGSDIIKLLNEQVNKEMQSSNLYMSMSSWCYTHSLDGAGLFLFDHAAEEYEHAKKLIIFLNENNVPVQLTSISAPEHKFEGLTQIFQKAYEHEQHISESINNIVDHAIKSKDHATFNFLQWYVAEQHEEEVLFKDILDKIELIGNENHGLYLADQYVKGIAKSRKS

SEQ ID NO: 5602 - protein, 1379 aa, Artificial Sequence
  SARS-CoV-2/South Korea/SNU01/2020__EPI_ISL_411929 spike protein (1-1211)(T874C_S1055C) Ferritin construct
MFVFLVLLPLVSSQCVNLTTRTQLPPAYTNSFTRGVYYPDKVFRSSVLHSTQDLFLPFFSNVTWFHAIHVSGTNGTKRFDNPVLPFNDGVYFASTEKSNIIRGWIFGTTLDSKTQSLLIVNNATNVVIKVCEFQFCNDPFLGVYYHKNNKSWMESEFRVYSSANNCTFEYVSQPFLMDLEGKQGNFKNLREFVFKNIDGYFKIYSKHTPINLVRDLPQGFWALEPLVDLPIGINITRFQTLLALHRSYLTPGDSSSGWTAGAAAYYVGYLQPRTFLLKYNENGTITDAVDCALDPLSETKCTLKSFTVEKGIYQTSNFRVQPTESIVRFPNITNLCPFGEVFNATRFASVYAWNRKRISNCVADYSVLYNSASFSTFKCYGVSPTKLNDLCFTNVYADSFVIRGDEVRQIAPGQTGKIADYNYKLPDDFTGCVIAWNSNNLDSKVGGNYNYLYRLFRKSNLKPFERDISTEIYQAGSTPCNGVEGFNCYFPLQSYGFQPTNGVGYQPYRVVVLSFELLHAPATVCGPKKSTNLVKNKCVNFNFNGLTGTGVLTESNKKFLPFQQFGRDIADTTDAVRDPQTLEILDITPCSFGGVSVITPGTNTSNQVAVLYQDVNCTEVPVAIHADQLTPTWRVYSTGSNVFQTRAGCLIGAEHVNNSYECDIPIGAGICASYQTQTNSPRRARSVASQSIIAYTMSLGAENSVAYSNNSIAIPTNFTISVTTEILPVSMTKTSVDCTMYICGDSTECSNLLLQYGSFCTQLNRALTGIAVEQDKNTQEVFAQVKQIYKTPPIKDFGGFNFSQILPDPSKPSKRSFIEDLLFNKVTLADAGFIKQYGDCLGDIAARDLICAQKFNGLTVLPPLLTDEMIAQYCSALLAGTITSGWTFGAGAALQIPFAMQMAYRFNGIGVTQNVLYENQKLIANQFNSAIGKIQDSLSSTASALGKLQDVVNQNAQALNTLVKQLSSNFGAISSVLNDILSRLDKVEAEVQIDRLITGRLQSLQTYVTQQLIRAAEIRASANLAATKMSECVLGQSKRVDFCGKGYHLMSFPQCAPHGVVFLHVTYVPAQEKNFTTAPAICHDGKAHFPREGVFVSNGTHWFVTQRNFYEPQIITTDNTFVSGNCDVVIGIVNNTVYDPLQPELDSFKEELDKYFKNHTSPDVDLGDISGINASVVNIQKEIDRLNEVAKNLNESLIDLQELGKYEQYIKGGGGSDIIKLLNEQVNKEMQSSNLYMSMSSWCYTHSLDGAGLFLFDHAAEEYEHAKKLIIFLNENNVPVQLTSISAPEHKFEGLTQIFQKAYEHEQHISESINNIVDHAIKSKDHATFNFLQWYVAEQHEEEVLFKDILDKIELIGNENHGLYLADQYVKGIAKSRKS

SEQ ID NO: 5603 - protein, 1379 aa, Artificial Sequence
  SARS-CoV-2/China/WF0004/2020__EPI_ISL_413694 spike protein (1-1211)(T874C_S1055C) Ferritin construct
MFVFLVLLPLVSSQCVNLTTRTQLPPAYTNSFTRGVYYPDKVFRSSVLHSTQDLFLPFFSNVTWFHAIHVSGTNGTKRFDNPVLPFNDGVYFASTEKSNIIRGWIFGTTLDSKTQSLLIVNNATNVVIKVCEFQFCNDPFLGVYYHKNNKSWTESEFRVYSSANNCTFEYVSQPFLMDLEGKQGNFKNLREFVFKNIDGYFKIYSKHTPINLVRDLPQGFSALEPLVDLPIGINITRFQTLLALHRSYLTPGDSSSGWTAGAAAYYVGYLQPRTFLLKYNENGTITDAVDCALDPLSETKCTLKSFTVEKGIYQTSNFRVQPTESIVRFPNITNLCPFGEVFNATRFASVYAWNRKRISNCVADYSVLYNSASFSTFKCYGVSPTKLNDLCFTNVYADSFVIRGDEVRQIAPGQTGKIADYNYKLPDDFTGCVIAWNSNNLDSKVGGNYNYLYRLFRKSNLKPFERDISTEIYQAGSTPCNGVEGFNCYFPLQSYGFQPTNGVGYQPYRVVVLSFELLHAPATVCGPKKSTNLVKNKCVNFNFNGLTGTGVLTESNKKFLPFQQFGRDIADTTDAVRDPQTLEILDITPCSFGGVSVITPGTNTSNQVAVLYQDVNCTEVPVAIHADQLTPTWRVYSTGSNVFQTRAGCLIGAEHVNNSYECDIPIGAGICASYQTQTNSPRRARSVASQSIIAYTMSLGAENSVAYSNNSIAIPTNFTISVTTEILPVSMTKTSVDCTMYICGDSTECSNLLLQYGSFCTQLNRALTGIAVEQDKNTQEVFAQVKQIYKTPPIKDFGGFNFSQILPDPSKPSKRSFIEDLLFNKVTLADAGFIKQYGDCLGDIAARDLICAQKFNGLTVLPPLLTDEMIAQYCSALLAGTITSGWTFGAGAALQIPFAMQMAYRFNGIGVTQNVLYENQKLIANQFNSAIGKIQDSLSSTASALGKLQDVVNQNAQALNTLVKQLSSNFGAISSVLNDILSRLDKVEAEVQIDRLITGRLQSLQTYVTQQLIRAAEIRASANLAATKMSECVLGQSKRFDFCGKGYHLMSFPQCAPHGVVFLHVTYVPAQEKNFTTAPAICHDGKAHFPREGVFVSNGTHWFVTQRNFYEPQIITTDNTFVSGNCDVVIGIVNNTVYDPLQPELDSFKEELDKYFKNHTSPDVDLGDISGINASVVNIQKEIDRLNEVAKNLNESLIDLQELGKYEQYIKGGGGSDIIKLLNEQVNKEMQSSNLYMSMSSWCYTHSLDGAGLFLFDHAAEEYEHAKKLIIFLNENNVPVQLTSISAPEHKFEGLTQIFQKAYEHEQHISESINNIVDHAIKSKDHATFNFLQWYVAEQHEEEVLFKDILDKIELIGNENHGLYLADQYVKGIAKSRKS

SEQ ID NO: 5604 - protein, 1379 aa, Artificial Sequence
  SARS-CoV-2/China/WF0028/2020__EPI_ISL_413791 spike protein (1-1211)(T874C_S1055C) Ferritin construct
MFVFLVLLPLVSSQCVNLTTRTQLPPAYTNSFTRGVYYPDKVFRSSVLHSTQDLFLPFFSNVTWFHAIHVSGTNGTKRFDNPVLPFNDGVYFASTEKSNIIRGWIFGTTLDSKTQSLLIVNNATNVVIKVCEFQFCNDPFLGVYYHKNNKSWMESEFRVYSSANNCTFEYVSQPFLMDLEGKQGNFKNLREFVFKNIDGYFKIYSKHTPINLVRDLPQGFSALEPLVDLPIGINITRFQTLLALHRSYLTPGDSSSGWTAGAAAYYVGYLQPRTFLLKYNENGTITDAVDCALDPLSETKCTLKSFTVEKGIYQTSNFRVQPTESIVRFPNITNLCPFGEVFNATRFASVYAWNRKRISNCVADYSVLYNSASFSTFKCYGVSPTKLNDLCFTNVYADSFVIRGDEVRQIAPGQTGKIADYNYKLPDDFTGCVIAWNSNNLDSKVGGNYNYLYRLFRKSNLKPFERDISTEIYQAGSTPCNGVEGFNCYFPLQSYGFQPTNGVGYQPYRVVVLSFELLHAPATVCGPKKSTNLVKNKCVNFNFNGLTGTGVLTESNKKFLPFQQFGRDIADTTDAVRDPQTLEILDITPCSFGGVSVITPGTNTSNQVAVLYQDVNCTEVPVAIHADQLTPTWRVYSTGSNVFQTRAGCLIGAEHVNNSYECDIPIGAGICASYQTQTNSPRRARSVASQSIIAYTMSLGAENSVAYSNNSIAIPTNFTISVTTEILPVSMTKTSVDCTMYICGDSTECSNLLLQYGSFCTQLNRALTGIAVEQDKNTQEVFAQVKQIYKTPPIKDFGGFNFSQILPDPSKPSKRSFIEDLLFNKVTLADAGFIKQYGDCLGDIAARDLICAQKFNGLTVLPPLLTDEMIAQYCSALLAGTITSGWTFGAGAALQIPFAMQMAYRFNGIGVTQNVLYENQKLIANQFNSAIGKIQDSLSSTASALGKLQDVVNQNAQALNTLVKQLSSNFGAISSVLNDILSRLDKVEAEVQIDRLITGRLQSLQTYVTQQLIRAAEIRASANLAATKMSECVLGQSKRVDFCGKGYHLMSFPQCAPHGVVFLHVTYVPAQEKNFTTAPAICHDGKAHFPREGVFVSNGTHWFVTQRNFYEPQIITTDNTFVSGNCDVVIGIVNNTVYDPLQPELESFKEELDKYFKNHTSPDVDLGDISGINASVVNIQKEIDRLNEVAKNLNESLIDLQELGKYEQYIKGGGGSDIIKLLNEQVNKEMQSSNLYMSMSSWCYTHSLDGAGLFLFDHAAEEYEHAKKLIIFLNENNVPVQLTSISAPEHKFEGLTQIFQKAYEHEQHISESINNIVDHAIKSKDHATFNFLQWYVAEQHEEEVLFKDILDKIELIGNENHGLYLADQYVKGIAKSRKS

SEQ ID NO: 5605 - protein, 1379 aa, Artificial Sequence
  SARS-CoV-2/2019-nCoV/USA-CruiseA-18/2020__MT159716.1 spike protein (1-1211)(T874C_S1055C) Ferritin construct
MFVFLVLLPLVSSQCVNLTTRTQLPPAYTNSFTRGVYYPDKVFRSSVLHSTQDLFLPFFSNVTWFHAIHVSGTNGTKRFDNPVLPFNDGVYFASTEKSNIIRGWIFGTTLDSKTQSLLIVNNATNVVIKVCEFQFCNDPFLGVYYHKNNKSWMESELRVYSSANNCTFEYVSQPFLMDLEGKQGNFKNLREFVFKNIDGYFKIYSKHTPINLVRDLPQGFSALEPLVDLPIGINITRFQTLLALHRSYLTPGDSSSGWTAGAAAYYVGYLQPRTFLLKYNENGTITDAVDCALDPLSETKCTLKSFTVEKGIYQTSNFRVQPTESIVRFPNITNLCPFGEVFNATRFASVYAWNRKRISNCVADYSVLYNSASFSTFKCYGVSPTKLNDLCFTNVYADSFVIRGDEVRQIAPGQTGKIADYNYKLPDDFTGCVIAWNSNNLDSKVGGNYNYLYRLFRKSNLKPFERDISTEIYQAGSTPCNGVEGFNCYFPLQSYGFQPTNGVGYQPYRVVVLSFELLHAPATVCGPKKSTNLVKNKCVNFNFNGLTGTGVLTESNKKFLPFQQFGRDIADTTDAVRDPQTLEILDITPCSFGGVSVITPGTNTSNQVAVLYQDVNCTEVPVAIHADQLTPTWRVYSTGSNVFQTRAGCLIGAEHVNNSYECDIPIGAGICASYQTQTNSPRRARSVASQSIIAYTMSLGAENSVAYSNNSIAIPTNFTISVTTEILPVSMTKTSVDCTMYICGDSTECSNLLLQYGSFCTQLNRALTGIAVEQDKNTQEVFAQVKQIYKTPPIKDFGGFNFSQILPDPSKPSKRSFIEDLLFNKVTLADAGFIKQYGDCLGDIAARDLICAQKFNGLTVLPPLLTDEMIAQYCSALLAGTITSGWTFGAGAALQIPFAMQMAYRFNGIGVTQNVLYENQKLIANQFNSAIGKIQDSLSSTASALGKLQDVVNQNAQALNTLVKQLSSNFGAISSVLNDILSRLDKVEAEVQIDRLITGRLQSLQTYVTQQLIRAAEIRASANLAATKMSECVLGQSKRVDFCGKGYHLMSFPQCAPHGVVFLHVTYVPAQEKNFTTAPAICHDGKAHFPREGVFVSNGTHWFVTQRNFYEPQIITTDNTFVSGNCDVVIGIVNNTVYDPLQPELDSFKEELDKYFKNHTSPDVDLGDISGINASVVNIQKEIDRLNEVAKNLNESLIDLQELGKYEQYIKGGGGSDIIKLLNEQVNKEMQSSNLYMSMSSWCYTHSLDGAGLFLFDHAAEEYEHAKKLIIFLNENNVPVQLTSISAPEHKFEGLTQIFQKAYEHEQHISESINNIVDHAIKSKDHATFNFLQWYVAEQHEEEVLFKDILDKIELIGNENHGLYLADQYVKGIAKSRKS

SEQ ID NO: 5606 - protein, 1379 aa, Artificial Sequence
  SARS-CoV-2/SARS-CoV-2/Yunnan-01/human/2020/CHN__MT049951.1 spike protein (1-1211)(T874C_S1055C) Ferritin construct
MFVFLVLLPLVSSQCVNLTTRTQLPPANTNSFTRGVYYPDKVFRSSVLHSTQDLFLPFFSNVTWFHAIHVSGTNGTKRFDNPVLPFNDGVYFASTEKSNIIRGWIFGTTLDSKTQSLLIVNNATNVVIKVCEFQFCNDPFLGVYYHKNNKSWMESEFRVYSSANNCTFEYVSQPFLMDLEGKQGNFKNLREFVFKNIDGYFKIYSKHTPINLVRDLPQGFSALEPLVDLPIGINITRFQTLLALHRSYLTPGDSSSGWTAGAAAYYVGYLQPRTFLLKYNENGTITDAVDCALDPLSETKCTLKSFTVEKGIYQTSNFRVQPTESIVRFPNITNLCPFGEVFNATRFASVYAWNRKRISNCVADYSVLYNSASFSTFKCYGVSPTKLNDLCFTNVYADSFVIRGDEVRQIAPGQTGKIADYNYKLPDDFTGCVIAWNSNNLDSKVGGNYNYLYRLFRKSNLKPFERDISTEIYQAGSTPCNGVEGFNCYFPLQSYGFQPTNGVGYQPYRVVVLSFELLHAPATVCGPKKSTNLVKNKCVNFNFNGLTGTGVLTESNKKFLPFQQFGRDIADTTDAVRDPQTLEILDITPCSFGGVSVITPGTNTSNQVAVLYQDVNCTEVPVAIHADQLTPTWRVYSTGSNVFQTRAGCLIGAEHVNNSYECDIPIGAGICASYQTQTNSPRRARSVASQSIIAYTMSLGAENSVAYSNNSIAIPTNFTISVTTEILPVSMTKTSVDCTMYICGDSTECSNLLLQYGSFCTQLNRALTGIAVEQDKNTQEVFAQVKQIYKTPPIKDFGGFNFSQILPDPSKPSKRSFIEDLLFNKVTLADAGFIKQYGDCLGDIAARDLICAQKFNGLTVLPPLLTDEMIAQYCSALLAGTITSGWTFGAGAALQIPFAMQMAYRFNGIGVTQNVLYENQKLIANQFNSAIGKIQDSLSSTASALGKLQDVVNQNAQALNTLVKQLSSNFGAISSVLNDILSRLDKVEAEVQIDRLITGRLQSLQTYVTQQLIRAAEIRASANLAATKMSECVLGQSKRVDFCGKGYHLMSFPQCAPHGVVFLHVTYVPAQEKNFTTAPAICHDGKAHFPREGVFVSNGTHWFVTQRNFYEPQIITTDNTFVSGNCDVVIGIVNNTVYDPLQPELDSFKEELDKYFKNHTSPDVDLGDISGINASVVNIQKEIDRLNEVAKNLNESLIDLQELGKYEQYIKGGGGSDIIKLLNEQVNKEMQSSNLYMSMSSWCYTHSLDGAGLFLFDHAAEEYEHAKKLIIFLNENNVPVQLTSISAPEHKFEGLTQIFQKAYEHEQHISESINNIVDHAIKSKDHATFNFLQWYVAEQHEEEVLFKDILDKIELIGNENHGLYLADQYVKGIAKSRKS

SEQ ID NO: 5607 - protein, 1379 aa, Artificial Sequence
  SARS-CoV-2/USA/WA-UW292/2020__EPI_ISL_418077 spike protein (1-1211)(T874C_S1055C) Ferritin construct
MFVFLVLLPLVSSQCVNLTTRTQLPPAYTNSFTRGVYYPDKVFRSSVLHSTQDLFLPFFSNVTWFHAIHVSGTNGTKRFDNPVLPFNDGVYFASTEKSNIIRGWIFGTTLDSKTQSLLIVNNATNVVIKVCEFQFCNDPFLGVYYHKNNKSWMESEFRVYSSANNCTFEYVSQPFLMDLEGKQGNFKNLREFVFKNIDGYFKIYSKHTPINLVRDLPQGFSALEPLVDLPIGINITRFQTLLALHRSYLTPGDSSSGWTAGAAAYYVGYLQPRTFLLKYNENGTITDAVDCALDPLSETKCTLKSFTVEKGIYQTSNFRVQPTESIVRFPNITNLCPFGEVFNATRFASVYAWNRKRISNCVADYSVLYNSASFSTFKCYGVSPTKLNDLCFTNVYADSFVIRGDEVRQIAPGQTGKIADYNYKLPDDFTGCVIAWNSNNLDSKVGGNYNYLYRLFRKSNLKPFERDISTEIYQASSTPCNGVEGFNCYFPLQSYGFQPTNGVGYQPYRVVVLSFELLHAPATVCGPKKSTNLVKNKCVNFNFNGLTGTGVLTESNKKFLPFQQFGRDIADTTDAVRDPQTLEILDITPCSFGGVSVITPGTNTSNQVAVLYQDVNCTEVPVAIHADQLTPTWRVYSTGSNVFQTRAGCLIGAEHVNNSYECDIPIGAGICASYQTQTNSPRRARSVASQSIIAYTMSLGAENSVAYSNNSIAIPTNFTISVTTEILPVSMTKTSVDCTMYICGDSTECSNLLLQYGSFCTQLNRALTGIAVEQDKNTQEVFAQVKQIYKTPPIKDFGGFNFSQILPDPSKPSKRSFIEDLLFNKVTLADAGFIKQYGDCLGDIAARDLICAQKFNGLTVLPPLLTDEMIAQYCSALLAGTITSGWTFGAGAALQIPFAMQMAYRFNGIGVTQNVLYENQKLIANQFNSAIGKIQDSLSSTASALGKLQDVVNQNAQALNTLVKQLSSNFGAISSVLNDILSRLDKVEAEVQIDRLITGRLQSLQTYVTQQLIRAAEIRASANLAATKMSECVLGQSKRVDFCGKGYHLMSFPQCAPHGVVFLHVTYVPAQEKNFTTAPAICHDGKAHFPREGVFVSNGTHWFVTQRNFYEPQIITTDNTFVSGNCDVVIGIVNNTVYDPLQPELDSFKEELDKYFKNHTSPDVDLGDISGINASVVNIQKEIDRLNEVAKNLNESLIDLQELGKYEQYIKGGGGSDIIKLLNEQVNKEMQSSNLYMSMSSWCYTHSLDGAGLFLFDHAAEEYEHAKKLIIFLNENNVPVQLTSISAPEHKFEGLTQIFQKAYEHEQHISESINNIVDHAIKSKDHATFNFLQWYVAEQHEEEVLFKDILDKIELIGNENHGLYLADQYVKGIAKSRKS

SEQ ID NO: 5608 - protein, 1379 aa, Artificial Sequence
  SARS-CoV-2/Iceland/192/2020__EPI_ISL_417819 spike protein (1-1211)(T874C_S1055C) Ferritin construct
MFVFFVLLPLVSSQCVNLTTRTQLPPAYTNSFTRGVYYPDKVFRSSVLHSTQDLFLPFFSNVTWFHAIHVSGTNGTKRFDNPVLPFNDGVYFASTEKSNIIRGWIFGTTLDSKTQSLLIVNNATNVVIKVCEFQFCNDPFLGVYYHKNNKSWMESEFRVYSSANNCTFEYVSQPFLMDLEGKQGNFKNLREFVFKNIDGYFKIYSKHTPINLVRDLPQGFSALEPLVDLPIGINITRFQTLLALHRSYLTPGDSSSGWTAGAAAYYVGYLQPRTFLLKYNENGTITDAVDCALDPLSETKCTLKSFTVEKGIYQTSNFRVQPTESIVRFPNITNLCPFGEVFNATRFASVYAWNRKRISNCVADYSVLYNSASFSTFKCYGVSPTKLNDLCFTNVYADSFVIRGDEVRQIAPGQTGKIADYNYKLPDDFTGCVIAWNSNNLDSKVGGNYNYLYRLFRKSNLKPFERDISTEIYQAGSTPCNGVEGFNCYFPLQSYGFQPTNGVGYQPYRVVVLSFELLHAPATVCGPKKSTNLVKNKCVNFNFNGLTGTGVLTESNKKFLPFQQFGRDIADTTDAVRDPQTLEILDITPCSFGGVSVITPGTNTSNQVAVLYQGVNCTEVPVAIHADQLTPTWRVYSTGSNVFQTRAGCLIGAEHVNNSYECDIPIGAGICASYQTQTNSPRRARSVASQSIIAYTMSLGAENSVAYSNNSIAIPTNFTISVTTEILPVSMTKTSVDCTMYICGDSTECSNLLLQYGSFCTQLNRALTGIAVEQDKNTQEVFAQVKQIYKTPPIKDFGGFNFSQILPDPSKPSKRSFIEDLLFNKVTLADAGFIKQYGDCLGDIAARDLICAQKFNGLTVLPPLLTDEMIAQYCSALLAGTITSGWTFGAGAALQIPFAMQMAYRFNGIGVTQNVLYENQKLIANQFNSAIGKIQDSLSSTASALGKLQDVVNQNAQALNTLVKQLSSNFGAISSVLNDILSRLDKVEAEVQIDRLITGRLQSLQTYVTQQLIRAAEIRASANLAATKMSECVLGQSKRVDFCGKGYHLMSFPQCAPHGVVFLHVTYVPAQEKNFTTAPAICHDGKAHFPREGVFVSNGTHWFVTQRNFYEPQIITTDNTFVSGNCDVVIGIVNNTVYDPLQPELDSFKEELDKYFKNHTSPDVDLGDISGINASVVNIQKEIDRLNEVAKNLNESLIDLQELGKYEQYIKGGGGSDIIKLLNEQVNKEMQSSNLYMSMSSWCYTHSLDGAGLFLFDHAAEEYEHAKKLIIFLNENNVPVQLTSISAPEHKFEGLTQIFQKAYEHEQHISESINNIVDHAIKSKDHATFNFLQWYVAEQHEEEVLFKDILDKIELIGNENHGLYLADQYVKGIAKSRKS

SEQ ID NO: 5609 - protein, 1379 aa, Artificial Sequence
  SARS-CoV-2/Belgium/ULG-6939/2020__EPI_ISL_417020 spike protein (1-1211)(T874C_S1055C) Ferritin construct
MFVFLVLLPLVSSQCVNLTTRTQLPPAYTNSFTRGVYYPDKVFRSSVLHSTQDLFLPFFSNVTWFHAIHVSGTNGTKRFDNPVLPFNDGVYFASTEKSNIIRGWIFGTTLDSKTQSLLIVNNATNVVIKVCEFQFCNDPFLGVYYHKNNKSWMESEFRVYSSANNCTFEYVSQPFLMDLEGKQGNFKNLREFVFKNIDGYFKIYSKHTPINLVRDLPQGFSALEPLVDLPIGINITRFQTLLALHRSYLTPGDSSSGWTAGAAAYYVGYLQPRTFLLKYNENGTITDAVDCALDPLSETKCTLKSFTVEKGIYQTSNFRVQPTESIVRFPNITNLCPFGEVFNATRFASVYAWNRKRISNCVADYSVLYNSASFSTFKCYGVSPTKLNDLCFTNVYADSFVIRGDEVRQIAPGQTGKIADYNYKLPDDFTGCVIAWNSNNLDSKVGGNYNYLYRLFRKSNLKPFERDISTEIYQAGSTPCNGVEGFNCYFPLQSYGFQPTNGVGYQPYRVVVLSFELLHAPATVCGPKKSTNLVKNKCVNFNFNGLTGTGVLTESNKKFLPFQQFGRDIADTTDAVRDPQTLEILDITPCSFGGVSVITPGTNTSNQVAVLYQGVNCTEVPVAIHADQLTPTWRVYSTGSNVFQTRAGCLIGAEHVNNSYECDIPIGAGICASYQTQTNSPRRARSVASQSIIAYTMSLGAENSVVYSNNSIAIPTNFTISVTTEILPVSMTKTSVDCTMYICGDSTECSNLLLQYGSFCTQLNRALTGIAVEQDKNTQEVFAQVKQIYKTPPIKDFGGFNFSQILPDPSKPSKRSFIEDLLFNKVTLADAGFIKQYGDCLGDIAARDLICAQKFNGLTVLPPLLTDEMIAQYCSALLAGTITSGWTFGAGAALQIPFAMQMAYRFNGIGVTQNVLYENQKLIANQFNSAIGKIQDSLSSTASALGKLQDVVNQNAQALNTLVKQLSSNFGAISSVLNDILSRLDKVEAEVQIDRLITGRLQSLQTYVTQQLIRAAEIRASANLAATKMSECVLGQSKRVDFCGKGYHLMSFPQCAPHGVVFLHVTYVPAQEKNFTTAPAICHDGKAHFPREGVFVSNGTHWFVTQRNFYEPQIITTDNTFVSGNCDVVIGIVNNTVYDPLQPELDSFKEELDKYFKNHTSPDVDLGDISGINASVVNIQKEIDRLNEVAKNLNESLIDLQELGKYEQYIKGGGGSDIIKLLNEQVNKEMQSSNLYMSMSSWCYTHSLDGAGLFLFDHAAEEYEHAKKLIIFLNENNVPVQLTSISAPEHKFEGLTQIFQKAYEHEQHISESINNIVDHAIKSKDHATFNFLQWYVAEQHEEEVLFKDILDKIELIGNENHGLYLADQYVKGIAKSRKS

SEQ ID NO: 5610 - protein, 1379 aa, Artificial Sequence
  SARS-CoV-2/France/HF2496/2020__EPI_ISL_418231 spike protein (1-1211)(T874C_S1055C) Ferritin construct
MFVFLVLLPLVSSQCVNLTTRTQLPPAYTNSFTRGVYYPDKVFRSSVLHSTQDLFLPFFSNVTWFHAIHVSGTNGTKRFDNPVLPFNDGVYFASTEKSNIIRGWIFGTTLDSKTQSLLIVNNATNVVIKVCEFQFCNDPFLGVYYHKNNKSWMESEFRVYSSANNCTFEYVSQPFLMDLEGKQGNFKNLREFVFKNIDGYFKIYSKHTPINLVRDLPQGFSALEPLVDLPIGINITRFQTLLALHRSYLTPGDSSSGWTAGAAAYYVGYLQPRTFLLKYNENGTITDAVDCALDPLSETKCTLKSFTVEKGIYQTSNFRVQPTESIVRFPNITNLCPFGEVFNATRFASVYAWNRKRISNCVADYSVLYNSASFSTFKCYGVSPTKLNDLCFTNVYADSFVIRGDEVRQIAPGQTGKIADYNYKLPDDFTGCVIAWNSNNLDSKVGGNYNYLYRLFRKSNLKPFERDISTEIYQAGSTPCNGVEGFNCYFPLQSYGFQPTNGVGYQPYRVVVLSFELLHAPATVCGPKKSTNLVKNKCVNFNFNGLTGTGVLTESNKKFLPFQQFGRDIADTTDAVRDPQTLEILDITPCSFGGVSVITPGTNTSNQVAVLYQGVNCTEVPVAIHADQLTPTWRVYSTGSNVFQTRAGCLIGAEHVNNSYECDIPIGAGICASYQTQTNSPRRARSVASQSIIAYTMSLGAENSVAYSNNSIAIPTNFTISVTTEILPVSMTKTSVDCTMYICGDSTECSNLLLQYGSFCTQLNRALTGIAVEQDKNTQEVFAQVKQIYKTPPIKDFGGFNFSQILPDPSKPSKRSFIEDLLFNKVTLADAGFIKQYGDCLGDIVARDLICAQKFNGLTVLPPLLTDEMIAQYCSALLAGTITSGWTFGAGAALQIPFAMQMAYRFNGIGVTQNVLYENQKLIANQFNSAIGKIQDSLSSTASALGKLQDVVNQNAQALNTLVKQLSSNFGAISSVLNDILSRLDKVEAEVQIDRLITGRLQSLQTYVTQQLIRAAEIRASANLAATKMSECVLGQSKRVDFCGKGYHLMSFPQCAPHGVVFLHVTYVPAQEKNFTTAPAICHDGKAHFPREGVFVSNGTHWFVTQRNFYEPQIITTDNTFVSGNCDVVIGIVNNTVYDPLQPELDSFKEELDKYFKNHTSPDVDLGDISGINASVVNIQKEIDRLNEVAKNLNESLIDLQELGKYEQYIKGGGGSDIIKLLNEQVNKEMQSSNLYMSMSSWCYTHSLDGAGLFLFDHAAEEYEHAKKLIIFLNENNVPVQLTSISAPEHKFEGLTQIFQKAYEHEQHISESINNIVDHAIKSKDHATFNFLQWYVAEQHEEEVLFKDILDKIELIGNENHGLYLADQYVKGIAKSRKS

SEQ ID NO: 5611 - protein, 1379 aa, Artificial Sequence
  SARS-CoV-2/USA/WA-UW291/2020__EPI_ISL_418076 spike protein (1-1211)(T874C_S1055C) Ferritin construct
MFVFLVLLPLVSSQCVNLTTRTQLPPAYTNSFTRGVYYPDKVFRSSVLHSTQDLFLPFFSNVTWFHAIHVSGTNGTKRFDNPVLPFNDGVYFASTEKSNIIRGWIFGTTLDSKTQSLLIVNNATNVVIKVCEFQFCNDPFLGVYYHKNNKSWMESEFRVYSSANNCTFEYVSQPFLMDLEGKQGNFKNLREFVFKNIDGYFKIYSKHTPINLVRDLPQGFSALEPLVDLPIGINITRFQTLLALHRSYLTPGDSSSGWTAGAAAYYVGYLQPRTFLLKYNENGTITDAVDCALDPLSETKCTLKSFTVEKGIYQTSNFRVQPTESIVRFPNITNLCPFGEVFNATRFASVYAWNRKRISNCVADYSVLYNSASFSTFKCYGVSPTKLNDLCFTNVYADSFVIRGDEVRQIAPGQTGKIADYNYKLPDDFTGCVIAWNSNNLDSKVGGNYNYLYRLFRKSNLKPFERDISTEIYQAGSTPCNGVEGFNCYFPLQSYGFQPTNGVGYQPYRVVVLSFELLHAPATVCGPKKSTNLVKNKCVNFNFNGLTGTGVLTESNKKFLPFQQFGRDIADTTDAVRDPQTLEILDITPCSFGGVSVITPGTNTSNQVAVLYQGVNCTEVPVAIHADQLTPTWRVYSTGSNVFQTRAGCLIGAEHVNNSYECDIPIGAGICASYQTQTNSPRRARSVASQSIIAYTMSLGAENSVAYSNNSIAIPTNFTISVTTEILPVSMTKTSVDCTMYICGDSTECSNLLLQYGSFCTQLNRALTGIAVEQDKNTQEVFAQVKQIYKTPPIKDFGGFNFSQILPDPSKPSKRSFIEDLLFNKVTLADAGFIKQYGDCLGDIAARDLICAQKFNGLTVLPPLLTDEMIAQYCSALLAGTITSGWTFGAGAALQIPFAMQMAYRFNGIGVTQNVLYENQKLIANQFNSAIGKIQYSLSSTASALGKLQDVVNQNAQALNTLVKQLSSNFGAISSVLNDILSRLDKVEAEVQIDRLITGRLQSLQTYVTQQLIRAAEIRASANLAATKMSECVLGQSKRVDFCGKGYHLMSFPQCAPHGVVFLHVTYVPAQEKNFTTAPAICHDGKAHFPREGVFVSNGTHWFVTQRNFYEPQIITTDNTFVSGNCDVVIGIVNNTVYDPLQPELDSFKEELDKYFKNHTSPDVDLGDISGINASVVNIQKEIDRLNEVAKNLNESLIDLQELGKYEQYIKGGGGSDIIKLLNEQVNKEMQSSNLYMSMSSWCYTHSLDGAGLFLFDHAAEEYEHAKKLIIFLNENNVPVQLTSISAPEHKFEGLTQIFQKAYEHEQHISESINNIVDHAIKSKDHATFNFLQWYVAEQHEEEVLFKDILDKIELIGNENHGLYLADQYVKGIAKSRKS

SEQ ID NO: 5612 - protein, 1379 aa, Artificial Sequence; identical to SEQ ID NO: 5575
  SARS-CoV-2/Portugal/PT0034/2020__EPI_ISL_418019 spike protein (1-1211)(T874C_S1055C) Ferritin construct

SEQ ID NO: 5613 - protein, 1379 aa, Artificial Sequence
  SARS-CoV-2/Iceland/202/2020__EPI_ISL_417750 spike protein (1-1211)(T874C_S1055C) Ferritin construct
MFVFLVLLPLVSSQCVNLTTRTQLPPAYTNSFTRGVYYPDKVFRSSVLHSTQDLFLPFFSNVTWFHAIHVSGTNGTKRFDNPVLPFNDGVYFASTEKSNIIRGWIFGTTLDSKTQSLLIVNNATNVVIKVCEFQFCNDPFLGVYYHKNNKSWMESEFRVYSSANNCTFEYVSQPFLMDLEGKQGNFKNLREFVFKNIDGYFKIYSKHTPINLVRDLPQGFSALEPLVDLPIGINITRFQTLLALHRSYLTPGDSSSGWTAGAAAYYVGYLQPRTFLLKYNENGTITDAVDCALDPLSETKCTLKSFTVEKGIYQTSNFRVQPTESIVRFPNITNLCPFGEVFNATRFASVYAWNRKRISNCVADYSVLYNSASFSTFKCYGVSPTKLNDLCFTNVYADSFVIRGDEVRQIAPGQTGKIADYNYKLPDDFTGCVIAWNSNNLDSKVGGNYNYLYRLFRKSNLKPFERDISTEIYQAGSTPCNGVEGFNCYFPLQSYGFQPTNGVGYQPYRVVVLSFELLHAPATVCGPKKSTNLVKNKCVNFNFNGLTGTGVLTESNKKFLPFQQFGRDIADTTDAVRDPQTLEILDITPCSFGGVSVITPGTNTSNQVAVLYQDVNCTEVPVAIHADQLTPTWRVYSTGSNVFQTRAGCLIGAEHVNNSYECDIPIGAGICASYQTQTNSPRRARSVASQSIIAYTMSLGAENSVAYSNNSIAIPTNFTISVTTEILPVSMTKTSVDCTMYICGDSTECSNLLLQYGSFCTQLNRALTGIAVEQDKNTQEVFAQVKQIYKTPPIKDFGGFNFSQILPDPSKPSKRSFIEDLLFNKVTLADAGFIKQYGDCLGDIAARDLICAQKFNGLTVLPPLLTDEMIAQYCSALLAGTITSGWTFGAGAALQIPFAMQMAYRFNGIGVTQNVLYENQKLIANQFNSAIGKIQDSLSSTASALGKLQDVVNQNAQALNTLVKQLSSNFGAISSVLNDILSRLDKVEAEVQIDRLITGRLQSLQTYVTQQLIRAAEIRASANLAATKMSECVLGQSKRVDFCGKGYHLMSFPQCAPHGVVFLHVTYVPAQEKNFTTAPAICHDGKAHFPREGVFVSNGTHWFVTQRNFYEPQIITTDNTFVSGNCDVVIGIVNNTVYDPLQPELDSFKEELDKYFKNHTSPDVDLGDIPGINASVVNIQKEIDRLNEVAKNLNESLIDLQELGKYEQYIKGGGGSDIIKLLNEQVNKEMQSSNLYMSMSSWCYTHSLDGAGLFLFDHAAEEYEHAKKLIIFLNENNVPVQLTSISAPEHKFEGLTQIFQKAYEHEQHISESINNIVDHAIKSKDHATFNFLQWYVAEQHEEEVLFKDILDKIELIGNENHGLYLADQYVKGIAKSRKS

SEQ ID NO: 5614 - protein, 1379 aa, Artificial Sequence
  SARS-CoV-2/USA/WA-UW261/2020__EPI_ISL_418046 spike protein (1-1211)(T874C_S1055C) Ferritin construct
MFVFLVLLPLVSSQCVNLTTRTQLPPAYTNSFTRGVYYPDKVFRSSVLHSTQDLFLPFFSNVTWFHAIHVSGTNGTKRFDNPVLPFNDGVYFASTEKSNIIRGWIFGTTLDSKTQSLLIVNNATNVVIKVCEFQFCNDPFLGVYYHKNNKSWMESEFRVYSSANNCTFEYVSQPFLMDLEGKQGNFKNLREFVFKNIDGYFKIYSKHTPINLVRDLPQGFSALEPLVDLPIGINITRFQTLLALHRSYLTPGDSSSGWTAGAAAYYVGYLQPRTFLLKYNENGTITDAVDCALDPLSETKCTLKSFTVEKGIYQTSNFRVQPTESIVRFPNITNLCPFGEVFNATRFTSVYAWNRKRISNCVADYSVLYNSASFSTFKCYGVSPTKLNDLCFTNVYADSFVIRGDEVRQIAPGQTGKIADYNYKLPDDFTGCVIAWNSNNLDSKVGGNYNYLYRLFRKSNLKPFERDISTEIYQAGSTPCNGVEGFNCYFPLQSYGFQPTNGVGYQPYRVVVLSFELLHAPATVCGPKKSTNLVKNKCVNFNFNGLTGTGVLTESNKKFLPFQQFGRDIADTTDAVRDPQTLEILDITPCSFGGVSVITPGTNTSNQVAVLYQDVNCTEVPVAIHADQLTPTWRVYSTGSNVFQTRAGCLIGAEHVNNSYECDIPIGAGICASYQTQTNSPRRARSVASQSIIAYTMSLGAENSVAYSNNSIAIPTNFTISVTTEILPVSMTKTSVDCTMYICGDSTECSNLLLQYGSFCTQLNRALTGIAVEQDKNTQEVFAQVKQIYKTPPIKDFGGFNFSQILPDPSKPSKRSFIEDLLFNKVTLADAGFIKQYGDCLGDIAARDLICAQKFNGLTVLPPLLTDEMIAQYCSALLAGTITSGWTFGAGAALQIPFAMQMAYRFNGIGVTQNVLYENQKLIANQFNSAIGKIQDSLSSTASALGKLQDVVNQNAQALNTLVKQLSSNFGAISSVLNDILSRLDKVEAEVQIDRLITGRLQSLQTYVTQQLIRAAEIRASANLAATKMSECVLGQSKRVDFCGKGYHLMSFPQCAPHGVVFLHVTYVPAQEKNFTTAPAICHDGKAHFPREGVFVSNGTHWFVTQRNFYEPQIITTDNTFVSGNCDVVIGIVNNTVYDPLQPELDSFKEELDKYFKNHTSPDVDLGDISGINASVVNIQKEIDRLNEVAKNLNESLIDLQELGKYEQYIKGGGGSDIIKLLNEQVNKEMQSSNLYMSMSSWCYTHSLDGAGLFLFDHAAEEYEHAKKLIIFLNENNVPVQLTSISAPEHKFEGLTQIFQKAYEHEQHISESINNIVDHAIKSKDHATFNFLQWYVAEQHEEEVLFKDILDKIELIGNENHGLYLADQYVKGIAKSRKS

SEQ ID NO: 5615 - protein, 1379 aa, Artificial Sequence
  SARS-CoV-2/Portugal/PT0035/2020__EPI_ISL_418020 spike protein (1-1211)(T874C_S1055C) Ferritin construct
MFVFLVLLPLVSSQCVNLTTRTQLPPAYTNSFTRGVYYPDKVFRSSVLHSTQDLFLPFFSNVTWFHAIHVSGTNGTKRFDNPVLPFNDGVYFASTEKSNIIRGWIFGTTLDSKTQSLLIVNNATNVVIKVCEFQFCNDPFLGVYYHKNNKSWMESEFRVYSSANNCTFEYVSQPFLMDLEGKQGNFKNLREFVFKNIDGYFKIYSKHTPINLVRDLPQGFSALEPLVDLPIGINITRFQTLLALHRSYLTPGDSSSGWTAGAAAYYVGYLQPRTFLLKYNENGTITDAVDCALDPLSETKCTLKSFTVEKGIYQTSNFRVQPTESIVRFPNITNLCPFGEVFNATRFASVYAWNRKRISNCVADYSVLYNSASFSTFKCYGVSPTKLNDLCFTNVYADSFVIRGDEVRQIAPGQTGKIADYNYKLPDDFTGCVIAWNSNNLDSKVGGNYNYLYRLFRKSNLKPFERDISTEIYQAGSTPCNGVEGFNCYFPLQSYGFQPTNGVGYQPYRVVVLSFELLHAPATVCGPKKSTNLVKNKCVNFNFNGLTGTGVLTESNKKFLPFQQFGRDIADTTDAVRDPQTLEILDITPCSFGGVSVITPGTNTSNQVAVLYQDVNCTEVPVAIHADQLTPTWRVYSTGSNVFQTRAGCLIGAEHVNNSYECDIPIGAGICASYQTQTNSPRRARSVASQSIIAYTMSLGAENSVAYSNNSIAIPTNFTISVTTEILPVSMTKTSVDCTMYICGDSTECSNLLLQYGSFCTQLNRALTGIAVEQDKNTQEVFAQVKQIYKTPPIKDFGGFNFSQILPDPSKPSKRSFIEDLLFNKVTLADAGFIKQYGDCLGDISARDLICAQKFNGLTVLPPLLTDEMIAQYCSALLAGTITSGWTFGAGAALQIPFAMQMAYRFNGIGVTQNVLYENQKLIANQFNSAIGKIQDSLSSTASALGKLQDVVNQNAQALNTLVKQLSSNFGAISSVLNDILSRLDKVEAEVQIDRLITGRLQSLQTYVTQQLIRAAEIRASANLAATKMSECVLGQSKRVDFCGKGYHLMSFPQCAPHGVVFLHVTYVPAQEKNFTTAPAICHDGKAHFPREGVFVSNGTHWFVTQRNFYEPQIITTDNTFVSGNCDVVIGIVNNTVYDPLQPELDSFKEELDKYFKNHTSPDVDLGDISGINASVVNIQKEIDRLNEVAKNLNESLIDLQELGKYEQYIKGGGGSDIIKLLNEQVNKEMQSSNLYMSMSSWCYTHSLDGAGLFLFDHAAEEYEHAKKLIIFLNENNVPVQLTSISAPEHKFEGLTQIFQKAYEHEQHISESINNIVDHAIKSKDHATFNFLQWYVAEQHEEEVLFKDILDKIELIGNENHGLYLADQYVKGIAKSRKS

SEQ ID NO: 5616 - protein, 1379 aa, Artificial Sequence
  SARS-CoV-2/USA/NY-NYUMC7/2020__EPI_ISL_418192 spike protein (1-1211)(T874C_S1055C) Ferritin construct
MFVFLVLLPLVSSQCVNLTTRTQLPPAYTNSFTRGVYYPDKVFRSSVLHSTQDLFLPFFSNVTWFHAIHVSGTNGTKRFDNPVLPFNDGVYFASTEKSNIIRGWIFGTTLDSKTQSLLIVNNATNVVIKVCEFQFCNDPFLGVYHHKNNKSWMESEFRVYSSANNCTFEYVSQPFLMDLEGKQGNFKNLREFVFKNIDGYFKIYSKHTPINLVRDLPQGFSALEPLVDLPIGINITRFQTLLALHRSYLTPGDSSSGWTAGAAAYYVGYLQPRTFLLKYNENGTITDAVDCALDPLSETKCTLKSFTVEKGIYQTSNFRVQPTESIVRFPNITNLCPFGEVFNATRFASVYAWNRKRISNCVADYSVLYNSASFSTFKCYGVSPTKLNDLCFTNVYADSFVIRGDEVRQIAPGQTGKIADYNYKLPDDFTGCVIAWNSNNLDSKVGGNYNYLYRLFRKSNLKPFERDISTEIYQAGSTPCNGVEGFNCYFPLQSYGFQPTNGVGYQPYRVVVLSFELLHAPATVCGPKKSTNLVKNKCVNFNFNGLTGTGVLTESNKKFLPFQQFGRDIADTTDAVRDPQTLEILDITPCSFGGVSVITPGTNTSNQVAVLYQGVNCTEVPVAIHADQLTPTWRVYSTGSNVFQTRAGCLIGAEHVNNSYECDIPIGAGICASYQTQTNSPRRARSVASQSIIAYTMSLGAENSVAYSNNSIAIPTNFTISVTTEILPVSMTKTSVDCTMYICGDSTECSNLLLQYGSFCTQLNRALTGIAVEQDKNTQEVFAQVKQIYKTPPIKDFGGFNFSQILPDPSKPSKRSFIEDLLFNKVTLADAGFIKQYGDCLGDIAARDLICAQKFNGLTVLPPLLTDEMIAQYCSALLAGTITSGWTFGAGAALQIPFAMQMAYRFNGIGVTQNVLYENQKLIANQFNSAIGKIQDSLSSTASALGKLQDVVNQNAQALNTLVKQLSSNFGAISSVLNDILSRLDKVEAEVQIDRLITGRLQSLQTYVTQQLIRAAEIRASANLAATKMSECVLGQSKRVDFCGKGYHLMSFPQCAPHGVVFLHVTYVPAQEKNFTTAPAICHDGKAHFPREGVFVSNGTHWFVTQRNFYEPQIITTDNTFVSGNCDVVIGIVNNTVYDPLQPELDSFKEELDKYFKNHTSPDVDLGDISGINASVVNIQKEIDRLNEVAKNLNESLIDLQELGKYEQYIKGGGGSDIIKLLNEQVNKEMQSSNLYMSMSSWCYTHSLDGAGLFLFDHAAEEYEHAKKLIIFLNENNVPVQLTSISAPEHKFEGLTQIFQKAYEHEQHISESINNIVDHAIKSKDHATFNFLQWYVAEQHEEEVLFKDILDKIELIGNENHGLYLADQYVKGIAKSRKS

SEQ ID NO: 5617 - protein, 1379 aa, Artificial Sequence
  SARS-CoV-2/Iceland/189/2020__EPI_ISL_417709 spike protein (1-1211)(T874C_S1055C) Ferritin construct
MFVFLVLLPLVSSQCVNLTTRTQLPPAYTNSFTRGVYYPDKVFRSSVLHSTQDLFLPFFSNVTWFHAIHVSGTNGTKRFDNPVLPFNDGVYFASTEKSNIIRGWIFGTTLDSKTQSLLIVNNATNVVIKVCEFQFCNDPFLGVYYHKNNKSWMESEFRVYSSANNCTFEYVSQPFLMDLEGKQGNFKNLREFVFKNIDGYFKIYSKHTPINLVRDLPQGFSALEPLVDLPIGINITRFQTLLALHRSYLTPGDSSSGWTAGAAAYYVGYLQPRTFLLKYNENGTITDAVDCALDPLSETKCTLKSFTVEKGIYQTSNFRVQPTESIVRFPNITNLCPFGEVFNATRFASVYAWNRKRISNCVADYSVLYNSASFSTFKCYGVSPTKLNDLCFTNVYADSFVIRGDEVRQIAPGQTGKIADYNYKLPDDFTGCVIAWNSNNLDSKVGGNYNYLYRLFRKSNLKPFERDISTEIYQAGSTPCNGVEGFNCYFPLQSYGFQPTNGVGYQPYRVVVLSFELLHAPATVCGPKKSTNLVKNKCVNFNFNGLTGTGVLTESNKKFLPFQQFGRDIADTTDAVRDPQTLEILDITPCSFGGVSVITPGTNTSNQVAVLYQGVNCTEVPVAIHADQLTPTWRVYSTGSNVFQTRAGCLIGAEHVNNSYECDIPIGAGICASYQTQTNSPRRARSVASQSIIAYTMSLGAENSVAYSNNSIAIPTNFTISVTTEILPVSMTKTSVDCTMYICGDSTECSNLLLQYGSFCTQLNRALTGIAVEQDKNTQEVFAQVKQIYKTPPIKDFGGFNFSQILPDPSKPSKRSFIEDLLFNKVTLADAGFTKQYGDCLGDIAARDLICAQKFNGLTVLPPLLTDEMIAQYCSALLAGTITSGWTFGAGAALQIPFAMQMAYRFNGIGVTQNVLYENQKLIANQFNSAIGKIQDSLSSTASALGKLQDVVNQNAQALNTLVKQLSSNFGAISSVLNDILSRLDKVEAEVQIDRLITGRLQSLQTYVTQQLIRAAEIRASANLAATKMSECVLGQSKRVDFCGKGYHLMSFPQCAPHGVVFLHVTYVPAQEKNFTTAPAICHDGKAHFPREGVFVSNGTHWFVTQRNFYEPQIITTDNTFVSGNCDVVIGIVNNTVYDPLQPELDSFKEELDKYFKNHTSPDVDLGDISGINASVVNIQKEIDRLNEVAKNLNESLIDLQELGKYEQYIKGGGGSDIIKLLNEQVNKEMQSSNLYMSMSSWCYTHSLDGAGLFLFDHAAEEYEHAKKLIIFLNENNVPVQLTSISAPEHKFEGLTQIFQKAYEHEQHISESINNIVDHAIKSKDHATFNFLQWYVAEQHEEEVLFKDILDKIELIGNENHGLYLADQYVKGIAKSRKS

SEQ ID NO: 5618 - protein, 1379 aa, Artificial Sequence
  SARS-CoV-2/Australia/NSW56/2020__EPI_ISL_417408 spike protein (1-1211)(T874C_S1055C) Ferritin construct
MFVFLVLLPLVSSQCVNLTTRTQLPPAYTNSFTRGVYYPDKVFRSSVLHSTQDLFLPFFSNVTWFHAIHVSGTNGTKRFDNPVLPFNDGVYFASTEKSNIIRGWIFGTTLDSKTQSLLIVNNATNVVIKVCEFQFCNDPFLGVYYHKNNKSWMESEFRVYSSANNCTFEYVSQPFLMDLEGKQGNFKNLREFVFKNIDGYFKIYSKHTPINLVRDLPQGFSALEPLVDLPIGINITRFQTLLALHRSYLTPGDSSSGWTAGAAAYYVGYLQPRTFLLKYNENGTITDAVDCALDPLSETKCTLKSFTVEKGIYQTSNFRVQPTESIVRFPNITNLCPFGEVFNATRFASVYAWNRKRISNCVADYSVLYNSASFSTFKCYGVSPTKLNDLCFTNVYADSFVIRGDEVRQIAPGQTGKIADYNYKLPDDFTGCVIAWNSNNLDSKVGGNYNYLYRLFRKSNLKPFERDISTEIYQAGSTPCNGVEGFNCYFPLQSYGFQPTNGVGYQPYRVVVLSFELLHAPATVCGPKKSTNLVKNKCVNFNFNGLTGTGVLTESNKKFLPFQQFGRDIADTTDAVRDPQTLEILDITPCSFGGVSVITPGTNTSNQVAVLYQDVNCTEVPVAIHADQLTPTWRVYSTGSNVFQTRAGCLIGAEHVNNSYECDIPIGAGICASYQTQTNSPRRARSVASQSIIAYTMSLGAENSVAYSNNSIAIPTNFTISVTTEILPVSMTKTSVDCTMYICGDSTECSNLLLQYGSFCTQLNRALTGIAVEQDKNTQEVFAQVKQIYKTPPIKDFGGFNFSQILPDSSKPSKRSFIEDLLFNKVTLADAGFIKQYGDCLGDIAARDLICAQKFNGLTVLPPLLTDEMIAQYCSALLAGTITSGWTFGAGAALQIPFAMQMAYRFNGIGVTQNVLYENQKLIANQFNSAIGKIQDSLSSTASALGKLQDVVNQNAQALNTLVKQLSSNFGAISSVLNDILSRLDKVEAEVQIDRLITGRLQSLQTYVTQQLIRAAEIRASANLAATKMSECVLGQSKRVDFCGKGYHLMSFPQCAPHGVVFLHVTYVPAQEKNFTTAPAICHDGKAHFPREGVFVSNGTHWFVTQRNFYEPQIITTDNTFVSGNCDVVIGIVNNTVYDPLQPELDSFKEELDKYFKNHTSPDVDLGDISGINASVVNIQKEIDRLNEVAKNLNESLIDLQELGKYEQYIKGGGGSDIIKLLNEQVNKEMQSSNLYMSMSSWCYTHSLDGAGLFLFDHAAEEYEHAKKLIIFLNENNVPVQLTSISAPEHKFEGLTQIFQKAYEHEQHISESINNIVDHAIKSKDHATFNFLQWYVAEQHEEEVLFKDILDKIELIGNENHGLYLADQYVKGIAKSRKS

SEQ ID NO: 5619 - protein, 1379 aa, Artificial Sequence
  SARS-CoV-2/Iceland/280/2020__EPI_ISL_417608 spike protein (1-1211)(T874C_S1055C) Ferritin construct
MFVFLVLLPLVSSQCVNLTTRTQLPPAYTNSFTRGVYYPDKVFRSSVLHSTQDLFLPFFSNVTWFHAIHVSGTNGTKRFDNPVLPFNDGVYFASTEKSNIIRGWIFGTTLDSKTQSLLIVNNATNVVIKVCEFQFCNDPFLGVYYHKNNKSWMESEFRVYSSANNCTFEYVSQPFLMDLEGKQGNFKNLREFVFKNIDGYFKIYSKHTPINLVRDLPQGFSALEPLVDLPIGINITRFQTLLALHRSYLTPGDSSSGWTAGAAAYYVGYLQPRTFLLKYNENGTITDAVDCALDPLSETKCTLKSFTVEKGIYQTSNFRVQPTESIVRFPNITNLCPFGEVFNATRFASVYAWNRKRISNCVADYSVLYNSASFSTFKCYGVSPTKLNDLCFTNVYADSFVIRGDEVRQIAPGQTGKIADYNYKLPDDFTGCVIAWNSNNLDSKVGGNYNYLYRLFRKSNLKPFERDISTEIYQAGSTPCNGVEGFNCYFPLQSYGFQPTNGVGYQPYRVVVLSFELLHAPATVCGPKKSTNLVKNKCVNFNFNGLTGTGVLTESNKKFLPFQQFGRDIADTTDAVRDPQTLEILDITPCSFGGVSVITPGTNTSNQVAVLYQGVNCTEVPVAIHADQLTPTWRVYSTGSNVFQTRAGCLIGAEHVNNSYECDIPIGAGICASYHTQTNSPRRARSVASQSIIAYTMSLGAENSVAYSNNSIAIPTNFTISVTTEILPVSMTKTSVDCTMYICGDSTECSNLLLQYGSFCTQLNRALTGIAVEQDKNTQEVFAQVKQIYKTPPIKDFGGFNFSQILPDPSKPSKRSFIEDLLFNKVTLADAGFIKQYGDCLGDIAARDLICAQKFNGLTVLPPLLTDEMIAQYCSALLAGTITSGWTFGAGAALQIPFAMQMAYRFNGIGVTQNVLYENQKLIANQFNSAIGKIQDSLSSTASALGKLQDVVNQNAQALNTLVKQLSSNFGAISSVLNDILSRLDKVEAEVQIDRLITGRLQSLQTYVTQQLIRAAEIRASANLAATKMSECVLGQSKRVDFCGKGYHLMSFPQCAPHGVVFLHVTYVPAQEKNFTTAPAICHDGKAHFPREGVFVSNGTHWFVTQRNFYEPQIITTDNTFVSGNCDVVIGIVNNTVYDPLQPELDSFKEELDKYFKNHTSPDVDLGDISGINASVVNIQKEIDRLNEVAKNLNESLIDLQELGKYEQYIKGGGGSDIIKLLNEQVNKEMQSSNLYMSMSSWCYTHSLDGAGLFLFDHAAEEYEHAKKLIIFLNENNVPVQLTSISAPEHKFEGLTQIFQKAYEHEQHISESINNIVDHAIKSKDHATFNFLQWYVAEQHEEEVLFKDILDKIELIGNENHGLYLADQYVKGIAKSRKS

SEQ ID NO: 5620 - protein, 1379 aa, Artificial Sequence; identical to SEQ ID NO: 5575
  SARS-CoV-2/Iceland/247/2020__EPI_ISL_417575 spike protein (1-1211)(T874C_S1055C) Ferritin construct

SEQ ID NO: 5621 - protein, 1379 aa, Artificial Sequence
  SARS-CoV-2/Iceland/238/2020__EPI_ISL_417566 spike protein (1-1211)(T874C_S1055C) Ferritin construct
MFVFLVLLPLVSSQCVNLTTRTQLPPAYTNSFTRGVYYPDKVFRSSVLHSTQDLFLPFFSNVTWFHAIHVSGTNGTKRFDNPVLPFNDGVYFASTEKSNIIRGWIFGTTLDSKTQSLLIVNNATNVVIKVCEFQFCNDPFLGVYYHKNNKSWMESEFRVYSSANNCTFEYVSQPFLMDLEGKQGNFKNLREFVFKNIDGYFKIYSKHTPINLVRDLPQGFSALEPLVDLPIGINITRFQTLLALHRSYLTPGDSSSGWTAGAAAYYVGYLQPRTFLLKYNENGTITDAVDCALDPLSETKCTLKSFTVEKGIYQTSNFRVQPTESIVRFPNITNLCPFGEVFNATRFASVYAWNRKRISNCVADYSVLYNSASFSTFKCYGVSPTKLNDLCFTNVYADSFVIRGDEVRQIAPGQTGKIADYNYKLPDDFTGCVIAWNSNNLDSKVGGNYNYLYRLFRKSNLKPFERDISTEIYQAGSTPCNGVEGFNCYFPLQSYGFQPTNGVGYQPYRVVVLSFELLHAPATVCGPKKSTNLVKNKCVNFNFNGLTGTGVLTESNKKFLPFQQFGRDIADTTDAVRDPQTLEILDITPCSFGGVSVITPGTNTSNQVAVLYQGVNCTEVPVAIHADQLTPTWRVYSTGSNVFQTRAGCLIGAEHVNNSYECDIPIGAGICASYQTQTNSPRRARSVASQSIIAYTMSLGAENSVAYSNNSIAIPTNFTISVTTEILPVSMTKTSVDCTMYICGDSTECSNLLLQYGSFCTQLNRALTGIAVEQDKNTQEVFAQVKQIYKTPPIKDFGGFNFSQILPDPSKPSKRSFIEDLLFNKVTLADVGFIKQYGDCLGDIAARDLICAQKFNGLTVLPPLLTDEMIAQYCSALLAGTITSGWTFGAGAALQIPFAMQMAYRFNGIGVTQNVLYENQKLIANQFNSAIGKIQDSLSSTASALGKLQDVVNQNAQALNTLVKQLSSNFGAISSVLNDILSRLDKVEAEVQIDRLITGRLQSLQTYVTQQLIRAAEIRASANLAATKMSECVLGQSKRVDFCGKGYHLMSFPQCAPHGVVFLHVTYVPAQEKNFTTAPAICHDGKAHFPREGVFVSNGTHWFVTQRNFYEPQIITTDNTFVSGNCDVVIGIVNNTVYDPLQPELDSFKEELDKYFKNHTSPDVDLGDISGINASVVNIQKEIDRLNEVAKNLNESLIDLQELGKYEQYIKGGGGSDIIKLLNEQVNKEMQSSNLYMSMSSWCYTHSLDGAGLFLFDHAAEEYEHAKKLIIFLNENNVPVQLTSISAPEHKFEGLTQIFQKAYEHEQHISESINNIVDHAIKSKDHATFNFLQWYVAEQHEEEVLFKDILDKIELIGNENHGLYLADQYVKGIAKSRKS

SEQ ID NO: 5622 - protein, 1379 aa, Artificial Sequence
  SARS-CoV-2/Greece/16/2020__EPI_ISL_418265 spike protein (1-1211)(T874C_S1055C) Ferritin construct
MFVFLVLLPLVSSQCVNLTTRTQLPPAYTNSFTRGVYYPDKVFRSSVLHSTQDLFLPFFSNVTWFHAIHVSGTNGTKRFDNPVLPFNDGVYFASTEKSNIIRGWIFGTTLDSKTQSLLIVNNATNVVIKVCEFQFCNDPFLGVYYHKNNKSWMESEFRVYSSANNCTFEYVSQPFLMDLEGKQGNFKNLREFVFKNVDGYFKIYSKHTPINLVRDLPQGFSALEPLVDLPIGINITRFQTLLALHRSYLTPGDSSSGWTAGAAAYYVGYLQPRTFLLKYNENGTITDAVDCALDPLSETKCTLKSFTVEKGIYQTSNFRVQPTESIVRFPNITNLCPFGEVFNATRFASVYAWNRKRISNCVADYSVLYNSASFSTFKCYGVSPTKLNDLCFTNVYADSFVIRGDEVRQIAPGQTGKIADYNYKLPDDFTGCVIAWNSNNLDSKVGGNYNYLYRLFRKSNLKPFERDISTEIYQAGSTPCNGVEGFNCYFPLQSYGFQPTNGVGYQPYRVVVLSFELLHAPATVCGPKKSTNLVKNKCVNFNFNGLTGTGVLTESNKKFLPFQQFGRDIADTTDAVRDPQTLEILDITPCSFGGVSVITPGTNTSNQVAVLYQDVNCTEVPVAIHADQLTPTWRVYSTGSNVFQTRAGCLIGAEHVNNSYECDIPIGAGICASYQTQTNSPRRARSVASQSIIAYTMSLGAENSVAYSNNSIAIPTNFTISVTTEILPVSMTKTSVDCTMYICGDSTECSNLLLQYGSFCTQLNRALTGIAVEQDKNTQEVFAQVKQIYKTPPIKDFGGFNFSQILPDPSKPSKRSFIEDLLFNKVTLADAGFIKQYGDCLGDIAARDLICAQKFNGLTVLPPLLTDEMIAQYCSALLAGTITSGWTFGAGAALQIPFAMQMAYRFNGIGVTQNVLYENQKLIANQFNSAIGKIQDSLSSTASALGKLQDVVNQNAQALNTLVKQLSSNFGAISSVLNDILSRLDKVEAEVQIDRLITGRLQSLQTYVTQQLIRAAEIRASANLAATKMSECVLGQSKRVDFCGKGYHLMSFPQCAPHGVVFLHVTYVPAQEKNFTTAPAICHDGKAHFPREGVFVSNGTHWFVTQRNFYEPQIITTDNTFVSGNCDVVIGIVNNTVYDPLQPELDSFKEELDKYFKNHTSPDVDLGDISGINASVVNIQKEIDRLNEVAKNLNESLIDLQELGKYEQYIKGGGGSDIIKLLNEQVNKEMQSSNLYMSMSSWCYTHSLDGAGLFLFDHAAEEYEHAKKLIIFLNENNVPVQLTSISAPEHKFEGLTQIFQKAYEHEQHISESINNIVDHAIKSKDHATFNFLQWYVAEQHEEEVLFKDILDKIELIGNENHGLYLADQYVKGIAKSRKS

SEQ ID NO: 5623 - protein, 1379 aa, Artificial Sequence
  SARS-CoV-2/Iceland/319/2020__EPI_ISL_417648 spike protein (1-1211)(T874C_S1055C) Ferritin construct
MFVFLVLLPLVSSQCVNLTTRTQLPPAYTNSFTRGVYYPDKVFRSSVLHSTQDLFLPFFSNVTWFHAIHVSGTNGTKRFDNPVLPFNDGVYFASTEKSNIIRGWIFGTTLDSKTQSLLIVNNATNVVIKVCEFQFCNDPFLGVYYHKNNKSWMESEFRVYSSANNCTFEYVSQPFLIDLEGKQGNFKNLREFVFKNIDGYFKIYSKHTPINLVRDLPQGFSALEPLVDLPIGINITRFQTLLALHRSYLTPGDSSSGWTAGAAAYYVGYLQPRTFLLKYNENGTITDAVDCALDPLSETKCTLKSFTVEKGIYQTSNFRVQPTESIVRFPNITNLCPFGEVFNATRFASVYAWNRKRISNCVADYSVLYNSASFSTFKCYGVSPTKLNDLCFTNVYADSFVIRGDEVRQIAPGQTGKIADYNYKLPDDFTGCVIAWNSNNLDSKVGGNYNYLYRLFRKSNLKPFERDISTEIYQAGSTPCNGVEGFNCYFPLQSYGFQPTNGVGYQPYRVVVLSFELLHAPATVCGPKKSTNLVKNKCVNFNFNGLTGTGVLTESNKKFLPFQQFGRDIADTTDAVRDPQTLEILDITPCSFGGVSVITPGTNTSNQVAVLYQGVNCTEVPVAIHADQLTPTWRVYSTGSNVFQTRAGCLIGAEHVNNSYECDIPIGAGICASYQTQTNSPRRARSVASQSIIAYTMSLGAENSVAYSNNSIAIPTNFTISVTTEILPVSMTKTSVDCTMYICGDSTECSNLLLQYGSFCTQLNRALTGIAVEQDKNTQEVFAQVKQIYKTPPIKDFGGFNFSQILPDPSKPSKRSFIEDLLFNKVTLADAGFIKQYGDCLGDIAARDLICAQKFNGLTVLPPLLTDEMIAQYCSALLAGTITSGWTFGAGAALQIPFAMQMAYRFNGIGVTQNVLYENQKLIANQFNSAIGKIQDSLSSTASALGKLQDVVNQNAQALNTLVKQLSSNFGAISSVLNDILSRLDKVEAEVQIDRLITGRLQSLQTYVTQQLIRAAEIRASANLAATKMSECVLGQSKRVDFCGKGYHLMSFPQCAPHGVVFLHVTYVPAQEKNFTTAPAICHDGKAHFPREGVFVSNGTHWFVTQRNFYEPQIITTDNTFVSGNCDVVIGIVNNTVYDPLQPELDSFKEELDKYFKNHTSPDVDLGDISGINASVVNIQKEIDRLNEVAKNLNESLIDLQELGKYEQYIKGGGGSDIIKLLNEQVNKEMQSSNLYMSMSSWCYTHSLDGAGLFLFDHAAEEYEHAKKLIIFLNENNVPVQLTSISAPEHKFEGLTQIFQKAYEHEQHISESINNIVDHAIKSKDHATFNFLQWYVAEQHEEEVLFKDILDKIELIGNENHGLYLADQYVKGIAKSRKS

SEQ ID NO: 5624 - protein, 1379 aa, Artificial Sequence
  SARS-CoV-2/Congo/94/2020__EPI_ISL_417947 spike protein (1-1211)(T874C_S1055C) Ferritin construct
MFVFLVLLPLVSSQCVNLTTRTQLPPAYTNSFTRGVYYPDKVFRSSVLHSTQDLFLPFFSNVTWFHAIHVSGTNGTKRFDNPVLPFNDGVYFASTEKSNIIRGWIFGTTLDSKTQSLLIVNNATNVVIKVCEFQFCNDPFLGVYYHKNNKSWMESEFRVYSSANNCTFEYVSQPFLMDLEGKQGNFKNLREFVFKNIDGYFKIYSKHTPINLVRDLPQGFSALEPLVDLPIGINITRFQTLLALHRSYLTPGDSSSGWTAGAAAYYVGYLQPRTFLLKYNENGTITDAVDCALDPLSETKCTLKSFTVEKGIYQTSNFRVQPTESIVRFPNITNLCPFGEVFNATRFASVYAWNRKRISNCVADYSVLYNSASFSTFKCYGVSPTKLNDLCFTNVYADSFVIRGDEVRQIAPGQTGKIADYNYKLPDDFTGCVIAWNSNNLDSKVGGNYNYLYRLFRKSNLKPFERDISTEIYQAGSTPCNGVEGFNCYFPLQSYGFQPTNGVGYQPYRVVVLSFELLHAPATVCGPKKSTNLVKNKCVNFNFNGLTGTGVLTESNKKFLPFQQFGRDIADTTDAVRDPQTLEILDITPCSFGGVSVITPGTNTSNQVAVLYQGVNCTEVPVAIHADQLTPTWRVYSTGSNVFQTRAGCLIGAEHVNNSYECDIPIGAGICASYQTQTNSPRRARSVASQSIIAYTMSLGAENSVAYSNNSIAIPTNFTISVTTEILPVSMTKTSVDCTMYICGDSTECSNLLLQYGSFCTQLNRALTGIAVEQDKNTQEVFAQVKQIYKTPPIKDFGGFNFSQILPDPSKPSKRSFIEDILFNKVTLADAGFIKQYGDCLGDIAARDLICAQKFNGLTVLPPLLTDEMIAQYCSALLAGTITSGWTFGAGAALQIPFAMQMAYRFNGIGVTQNVLYENQKLIANQFNSAIGKIQDSLSSTASALGKLQDVVNQNAQALNTLVKQLSSNFGAISSVLNDILSRLDKVEAEVQIDRLITGRLQSLQTYVTQQLIRAAEIRASANLAATKMSECVLGQSKRVDFCGKGYHLMSFPQCAPHGVVFLHVTYVPAQEKNFTTAPAICHDGKAHFPREGVFVSNGTHWFVTQRNFYEPQIITTDNTFVSGNCDVVIGIVNNTVYDPLQPELDSFKEELDKYFKNHTSPDVDLGDISGINASVVNIQKEIDRLNEVAKNLNESLIDLQELGKYEQYIKGGGGSDIIKLLNEQVNKEMQSSNLYMSMSSWCYTHSLDGAGLFLFDHAAEEYEHAKKLIIFLNENNVPVQLTSISAPEHKFEGLTQIFQKAYEHEQHISESINNIVDHAIKSKDHATFNFLQWYVAEQHEEEVLFKDILDKIELIGNENHGLYLADQYVKGIAKSRKS

SEQ ID NO: 5625 - protein, 1379 aa, Artificial Sequence
  SARS-CoV-2/Congo/158/2020__EPI_ISL_417950 spike protein (1-1211)(T874C_S1055C) Ferritin construct
MFVFLVLLPLVSSQCVNLTTRTQLPPAYTNSFTRGVYYPDKVFRSSVLHSTQDLFLPFFSNVTWFHAIHVSGTNGTKRFDNPVLPFNDGVYFASTEKSNIIRGWIFGTTLDSKTQSLLIVNNATNVVIKVCEFQFCNDPFLGVYYHKNNKSWMESEFRVYSSANNCTFEYVSQPFLMDLEGKQGNFKNLREFVFKNIDGYFKIYSKHTPINLVRDLPQGFSALEPLVDLPIGINITRFQTLLALHRSYLTPGDSSSGWTAGAAAYYVGYLQPRTFLLKYNENGTITDAVDCALDPLSETKCTLKSFTVEKGIYQTSNFRVQPTESIVRFPNITNLCPFGEVFNATRFASVYAWNRKRISNCVADYSVLYNSASFSTFKCYGVSPTKLNDLCFTNVYADSFVIRGDEVRQIAPGQTGKIADYNYKLPDDFTGCVIAWNSNNLDSKVGGNYNYLYRLFRKSNLKPFERDISTEIYQAGSTPCNGVEGFNCYFPLQSYGFQPTNGVGYQPYRVVVLSFELLHAPATVCGPKKSTNLVKNKCVNFNFNGLTGTGVLTESNKKFLPFQQFGRDIADTTDAVRDPQTLEILDITPCSFGGVSVITPGTNTSNQVAVLYQDVNCTEVPVAIHADQLTPTWRVYSTGSNVFQTRAGCLIGAEHVNNSYECDIPIGAGICASYQTQTNSPRRARSVASQSIIAYTMSLGAENSVAYSNNSIAIPTNFTISVTTEILPVSMTKTSVDCTMYICGDSTECSNLLLQYGSFCTQLNRALTGIAVEQDKNTQEVFAQVKQIYKTPPIKDFGGFNFSQILPDPSKPSKRSFIEDLLFNKVTLADAGFIKQYGDCLGDIAARDLICAQKFNGLTVLPPLLTDEMIAQYCSALLAGTITSGWTFGAGAALQIPFAMQMAYRFNGIGVTQNVLYENQKLIANQFNSAIGKIQDSLSSTASALGKLQDVVNQNAQALNTLVKQLSSNFGAISSVLNDILSRLDKVEAEVQIDRLITGRLQSLQTYVTQQLIRAAEIRASANLAATKMSECVLGQSKRVDFCGKGYHLMSFPQCAPHGVVFLHVTYVPAQEKNFTTAPAICHDGKAHFPREGVFVSNGTHWFVTQRNFYEPQIITTDNTFLSGNCDVVIGIVNNTVYDPLQPELDSFKEELDKYFKNHTSPDVDLGDISGINASVVNIQKEIDRLNEVAKNLNESLIDLQELGKYEQYIKGGGGSDIIKLLNEQVNKEMQSSNLYMSMSSWCYTHSLDGAGLFLFDHAAEEYEHAKKLIIFLNENNVPVQLTSISAPEHKFEGLTQIFQKAYEHEQHISESINNIVDHAIKSKDHATFNFLQWYVAEQHEEEVLFKDILDKIELIGNENHGLYLADQYVKGIAKSRKS

SEQ ID NO: 5626 - protein, 1379 aa, Artificial Sequence
  SARS-CoV-2/USA/UT-00034/2020__EPI_ISL_417977 spike protein (1-1211)(T874C_S1055C) Ferritin construct
MFVFLVLLPLVSSQCVNLTTRTQLPPAYTNSFTRGVYYPDKVFRSSVLHSTQDLFLPFFSNVTWFHAIHVSGTNGTKRFDNPVLPFNDGVYFASTEKSNIIRGWIFGTTLDSKTQSLLIVNNATNVVIKVCEFQFCNDPFLGVYYYKNNKSWMESEFRVYSSANNCTFEYVSQPFLMDLEGKQGNFKNLREFVFKNIDGYFKIYSKHTPINLVRDLPQGFSALEPLVDLPIGINITRFQTLLALHRSYLTPGDSSSGWTAGAAAYYVGYLQPRTFLLKYNENGTITDAVDCALDPLSETKCTLKSFTVEKGIYQTSNFRVQPTESIVRFPNITNLCPFGEVFNATRFASVYAWNRKRISNCVADYSVLYNSASFSTFKCYGVSPTKLNDLCFTNVYADSFVIRGDEVRQIAPGQTGKIADYNYKLPDDFTGCVIAWNSNNLDSKVGGNYNYLYRLFRKSNLKPFERDISTEIYQAGSTPCNGVEGFNCYFPLQSYGFQPTNGVGYQPYRVVVLSFELLHAPATVCGPKKSTNLVKNKCVNFNFNGLTGTGVLTESNKKFLPFQQFGRDIADTTDAVRDPQTLEILDITPCSFGGVSVITPGTNTSNQVAVLYQGVNCTEVPVAIHADQLTPTWRVYSTGSNVFQTRAGCLIGAEHVNNSYECDIPIGAGICASYQTQTNSPRRARSVASQSIIAYTMSLGAENSVAYSNNSIAIPTNFTISVTTEILPVSMTKTSVDCTMYICGDSTECSNLLLQYGSFCTQLNRALTGIAVEQDKNTQEVFAQVKQIYKTPPIKDFGGFNFSQILPDPSKPSKRSFIEDLLFNKVTLADAGFIKQYGDCLGDIAARDLICAQKFNGLTVLPPLLTDEMIAQYCSALLAGTITSGWTFGAGAALQIPFAMQMAYRFNGIGVTQNVLYENQKLIANQFNSAIGKIQDSLSSTASALGKLQDVVNQNAQALNTLVKQLSSNFGAISSVLNDILSRLDKVEAEVQIDRLITGRLQSLQTYVTQQLIRAAEIRASANLAATKMSECVLGQSKRVDFCGKGYHLMSFPQCAPHGVVFLHVTYVPAQEKNFTTAPAICHDGKAHFPREGVFVSNGTHWFVTQRNFYEPQIITTDNTFVSGNCDVVIGIVNNTVYDPLQPELDSFKEELDKYFKNHTSPDVDLGDISGINASVVNIQKEIDRLNEVAKNLNESLIDLQELGKYEQYIKGGGGSDIIKLLNEQVNKEMQSSNLYMSMSSWCYTHSLDGAGLFLFDHAAEEYEHAKKLIIFLNENNVPVQLTSISAPEHKFEGLTQIFQKAYEHEQHISESINNIVDHAIKSKDHATFNFLQWYVAEQHEEEVLFKDILDKIELIGNENHGLYLADQYVKGIAKSRKS

SEQ ID NO: 5627 - protein, 1379 aa, Artificial Sequence
  SARS-CoV-2/USA/UT-00033/2020__EPI_ISL_417976 spike protein (1-1211)(T874C_S1055C) Ferritin construct
MFVFLVLLPLVSSQCVNLTTRTQLPPAYTNSFTRGVYYPDKVFRSSVLHSTQDLFLPFFSNVTWFHAIHVSGTNGTKRFDNPVLPFNDGVYFASTEKSNIIRGWIFGTTLDSKTQSLLIVNNATNVVIKVCEFQFCNDPFLGVYYHKNNKSWMESEFRVYSSANNCTFEYVSQPFLMDLEGKQGNFKNLREFVFKNIDGYFKIYSKHTPINLVRDLPQGFSALEPLVDLPIGINITRFQTLLALHRSYLTPGDSSSGLTAGAAAYYVGYLQPRTFLLKYNENGTITDAVDCALDPLSETKCTLKSFTVEKGIYQTSNFRVQPTESIVRFPNITNLCPFGEVFNATRFASVYAWNRKRISNCVADYSVLYNSASFSTFKCYGVSPTKLNDLCFTNVYADSFVIRGDEVRQIAPGQTGKIADYNYKLPDDFTGCVIAWNSNNLDSKVGGNYNYLYRLFRKSNLKPFERDISTEIYQAGSTPCNGVEGFNCYFPLQSYGFQPTNGVGYQPYRVVVLSFELLHAPATVCGPKKSTNLVKNKCVNFNFNGLTGTGVLTESNKKFLPFQQFGRDIADTTDAVRDPQTLEILDITPCSFGGVSVITPGTNTSNQVAVLYQGVNCTEVPVAIHADQLTPTWRVYSTGSNVFQTRAGCLIGAEHVNNSYECDIPIGAGICASYQTQTNSPRRARSVASQSIIAYTMSLGAENSVAYSNNSIAIPTNFTISVTTEILPVSMTKTSVDCTMYICGDSTECSNLLLQYGSFCTQLNRALTGIAVEQDKNTQEVFAQVKQIYKTPPIKDFGGFNFSQILPDPSKPSKRSFIEDLLFNKVTLADAGFIKQYGDCLGDIAARDLICAQKFNGLTVLPPLLTDEMIAQYCSALLAGTITSGWTFGAGAALQIPFAMQMAYRFNGIGVTQNVLYENQKLIANQFNSAIGKIQDSLSSTASALGKLQDVVNQNAQALNTLVKQLSSNFGAISSVLNDILSRLDKVEAEVQIDRLITGRLQSLQTYVTQQLIRAAEIRASANLAATKMSECVLGQSKRVDFCGKGYHLMSFPQCAPHGVVFLHVTYVPAQEKNFTTAPAICHDGKAHFPREGVFVSNGTHWFVTQRNFYEPQIITTDNTFVSGNCDVVIGIVNNTVYDPLQPELDSFKEELDKYFKNHTSPDVDLGDISGINASVVNIQKEIDRLNEVAKNLNESLIDLQELGKYEQYIKGGGGSDIIKLLNEQVNKEMQSSNLYMSMSSWCYTHSLDGAGLFLFDHAAEEYEHAKKLIIFLNENNVPVQLTSISAPEHKFEGLTQIFQKAYEHEQHISESINNIVDHAIKSKDHATFNFLQWYVAEQHEEEVLFKDILDKIELIGNENHGLYLADQYVKGIAKSRKS

SEQ ID NO: 5628 - protein, 1379 aa, Artificial Sequence
  SARS-CoV-2/USA/WI-13/2020__EPI_ISL_417516 spike protein (1-1211)(T874C_S1055C) Ferritin construct
MFVFLVLLPLVSSQCVNLTTRTQLPPAYTNSFTRGVYYPDKVFRSSVLHSTQDLFLPFFSNVTWFHAIHVSGTNGTKRFDNPVLPFNDGVYFASTEKSNIIRGWIFGTTLDSKTQSLLIVNNATNVVIKVCEFQFCNDPFLGVYYHKNNKSWMESEFRVYSSANNCTFEYVSQPFLMDLEGKQGNFKNLREFVFKNIDGYFKIYSKHTPINLVRDLPQGFSALEPLVDLPIGINITRFQTLLALHRSYLTPGDSSSGWTAGAAAYYVGYLQPRTFLLKYNENGTITDAVDCALDPLSETKCTLKSFTVEKGIYQTSNFRVLPTESIVRFPNITNLCPFGEVFNATRFASVYAWNRKRISNCVADYSVLYNSASFSTFKCYGVSPTKLNDLCFTNVYADSFVIRGDEVRQIAPGQTGKIADYNYKLPDDFTGCVIAWNSNNLDSKVGGNYNYLYRLFRKSNLKPFERDISTEIYQAGSTPCNGVEGFNCYFPLQSYGFQPTNGVGYQPYRVVVLSFELLHAPATVCGPKKSTNLVKNKCVNFNFNGLTGTGVLTESNKKFLPFQQFGRDIADTTDAVRDPQTLEILDITPCSFGGVSVITPGTNTSNQVAVLYQGVNCTEVPVAIHADQLTPTWRVYSTGSNVFQTRAGCLIGAEHVNNSYECDIPIGAGICASYQTQTNSPRRARSVASQSIIAYTMSLGAENSVAYSNNSIAIPTNFTISVTTEILPVSMTKTSVDCTMYICGDSTECSNLLLQYGSFCTQLNRALTGIAVEQDKNTQEVFAQVKQIYKTPPIKDFGGFNFSQILPDPSKPSKRSFIEDLLFNKVTLADAGFIKQYGDCLGDIAARDLICAQKFNGLTVLPPLLTDEMIAQYCSALLAGTITSGWTFGAGAALQIPFAMQMAYRFNGIGVTQNVLYENQKLIANQFNSAIGKIQDSLSSTASALGKLQDVVNQNAQALNTLVKQLSSNFGAISSVLNDILSRLDKVEAEVQIDRLITGRLQSLQTYVTQQLIRAAEIRASANLAATKMSECVLGQSKRVDFCGKGYHLMSFPQCAPHGVVFLHVTYVPAQEKNFTTAPAICHDGKAHFPREGVFVSNGTHWFVTQRNFYEPQIITTDNTFVSGNCDVVIGIVNNTVYDPLQPELDSFKEELDKYFKNHTSPDVDLGDISGINASVVNIQKEIDRLNEVAKNLNESLIDLQELGKYEQYIKGGGGSDIIKLLNEQVNKEMQSSNLYMSMSSWCYTHSLDGAGLFLFDHAAEEYEHAKKLIIFLNENNVPVQLTSISAPEHKFEGLTQIFQKAYEHEQHISESINNIVDHAIKSKDHATFNFLQWYVAEQHEEEVLFKDILDKIELIGNENHGLYLADQYVKGIAKSRKS

SEQ ID NO: 5629 - protein, 1378 aa, Artificial Sequence
  SARS-CoV-2/India/1-27/2020__EPI_ISL_413522 spike protein (1-1210)(T873C_S1054C) Ferritin construct
MFVFLVLLPLVSSQCVNLTTRTQLPPAYTNSFTRGVYYPDKVFRSSVLHSTQDLFLPFFSNVTWFHAIHVSGTNGTKRFDNPVLPFNDGVYFASTEKSNIIRGWIFGTTLDSKTQSLLIVNNATNVVIKVCEFQFCNDPFLGVYHKNNKSWMESEFRVYSSANNCTFEYVSQPFLMDLEGKQGNFKNLREFVFKNIDGYFKIYSKHTPINLVRDLPQGFSALEPLVDLPIGINITRFQTLLALHRSYLTPGDSSSGWTAGAAAYYVGYLQPRTFLLKYNENGTITDAVDCALDPLSETKCTLKSFTVEKGIYQTSNFRVQPTESIVRFPNITNLCPFGEVFNATRFASVYAWNRKRISNCVADYSVLYNSASFSTFKCYGVSPTKLNDLCFTNVYADSFVIRGDEVIQIAPGQTGKIADYNYKLPDDFTGCVIAWNSNNLDSKVGGNYNYLYRLFRKSNLKPFERDISTEIYQAGSTPCNGVEGFNCYFPLQSYGFQPTNGVGYQPYRVVVLSFELLHAPATVCGPKKSTNLVKNKCVNFNFNGLTGTGVLTESNKKFLPFQQFGRDIADTTDAVRDPQTLEILDITPCSFGGVSVITPGTNTSNQVAVLYQDVNCTEVPVAIHADQLTPTWRVYSTGSNVFQTRAGCLIGAEHVNNSYECDIPIGAGICASYQTQTNSPRRARSVASQSIIAYTMSLGAENSVAYSNNSIAIPTNFTISVTTEILPVSMTKTSVDCTMYICGDSTECSNLLLQYGSFCTQLNRALTGIAVEQDKNTQEVFAQVKQIYKTPPIKDFGGFNFSQILPDPSKPSKRSFIEDLLFNKVTLADAGFIKQYGDCLGDIAARDLICAQKFNGLTVLPPLLTDEMIAQYCSALLAGTITSGWTFGAGAALQIPFAMQMAYRFNGIGVTQNVLYENQKLIANQFNSAIGKIQDSLSSTASALGKLQDVVNQNAQALNTLVKQLSSNFGAISSVLNDILSRLDKVEAEVQIDRLITGRLQSLQTYVTQQLIRAAEIRASANLAATKMSECVLGQSKRVDFCGKGYHLMSFPQCAPHGVVFLHVTYVPAQEKNFTTAPAICHDGKAHFPREGVFVSNGTHWFVTQRNFYEPQIITTDNTFVSGNCDVVIGIVNNTVYDPLQPELDSFKEELDKYFKNHTSPDVDLGDISGINASVVNIQKEIDRLNEVAKNLNESLIDLQELGKYEQYIKGGGGSDIIKLLNEQVNKEMQSSNLYMSMSSWCYTHSLDGAGLFLFDHAAEEYEHAKKLIIFLNENNVPVQLTSISAPEHKFEGLTQIFQKAYEHEQHISESINNIVDHAIKSKDHATFNFLQWYVAEQHEEEVLFKDILDKIELIGNENHGLYLADQYVKGIAKSRKS

SEQ ID NO: 5630 - protein, 1373 aa, Artificial Sequence
  SARS-CoV-2/pangolin/Guangxi/P4L/2017__EPI_ISL_410538 spike protein (1-1205)(T868C_S1049C) Ferritin construct
MFVFLFVLPLVSSQCVNLTTRTGIPPGYTNSSTRGVYYPDKVFRSSILHLTQDLFLPFFSNVTWFNTINYQGGFKKFDNPVLPFNDGVYFASTEKSNIIRGWIFGTTLDARTQSLLIVNNATNVVIKVCEFQFCTDPFLGVYYHNNNKTWVENEFRVYSSANNCTFEYISQPFLMDLEGKQGNFKNLREFVFKNVDGYFKIYSKHTPIDLVRDLPRGFAALEPLVDLPIGINITRFQTLLALHRSYLTPGNLESGWTTGAAAYYVGYLQQRTFLLSYNQNGTITDAVDCSLDPLSETKCTLKSLTVEKGIYQTSNFRVQPTISIVRFPNITNLCPFGEVFNASKFASVYAWNRKRISNCVADYSVLYNSTSFSTFKCYGVSPTKLNDLCFTNVYADSFVVKGDEVRQIAPGQTGVIADYNYKLPDDFTGCVIAWNSVKQDALTGGNYGYLYRLFRKSKLKPFERDISTEIYQAGSTPCNGQVGLNCYYPLERYGFHPTTGVNYQPFRVVVLSFELLNGPATVCGPKLSTTLVKDKCVNFNFNGLTGTGVLTTSKKQFLPFQQFGRDISDTTDAVRDPQTLEILDITPCSFGGVSVITPGTNTSNQVAVLYQDVNCTEVPMAIHAEQLTPAWRVYSAGANVFQTRAGCLVGAEHVNNSYECDIPVGAGICASYHSMSSLRSVNQRSIIAYTMSLGAENSVAYSNNSIAIPTNFTISVTTEILPVSMTKTSVDCTMYICGDSIECSNLLLQYGSFCTQLNRALTGIAVEQDKNTQEVFAQVKQIYKTPPIKDFGGFNFSQILPDPSKPSKRSFIEDLLFNKVTLADAGFIKQYGDCLGDIAARDLICAQKFNGLTVLPPLLTDEMIAQYCSALLAGTITSGWTFGAGAALQIPFAMQMAYRFNGIGVTQNVLYENQKLIANQFNSAIGKIQDSLSSTASALGKLQDVVNQNAQALNTLVKQLSSNFGAISSVLNDILSRLDKVEAEVQIDRLITGRLQSLQTYVTQQLIRAAEIRASANLAATKMSECVLGQSKRVDFCGKGYHLMSFPQCAPHGVVFLHVTYVPAQEKNFTTAPAICHEGKAHFPREGVFVSNGTHWFITQRNFYEPQIITTDNTFVSGSCDVVIGIVNNTVYDPLQPELDSFKEELDKYFKNHTSPDVDLGDISGINASVVNIQKEIDRLNEVAKNLNESPIDLQELGKYEQYIKGGGGSDIIKLLNEQVNKEMQSSNLYMSMSSWCYTHSLDGAGLFLFDHAAEEYEHAKKLIIFLNENNVPVQLTSISAPEHKFEGLTQIFQKAYEHEQHISESINNIVDHAIKSKDHATFNFLQWYVAEQHEEEVLFKDILDKIELIGNENHGLYLADQYVKGIAKSRKS

SEQ ID NO: 5631 - protein, 1373 aa, Artificial Sequence
  SARS-CoV-2/pangolin/Guangxi/P5L/2017__EPI_ISL_410540 spike protein (1-1205)(T868C_S1049C) Ferritin construct
MFVFLFVLPLVSSQCVNLTTRTGIPPGYTNSSTRGVYYPDKVFRSSILHLTQDLFLPFFSNVTWFNTINYQGGFKKFDNPVLPFNDGVYFASTEKSNIIRGWIFGTTLDARTQSLLIVNNATNVVIKVCEFQFCTDPFLGVYYHNNNKTWVENEFRVYSSANNCTFEYISQPFLMDLEGKQGNFKNLREFVFKNVDGYFKIYSKHTPIDLVRDLPRGFAALEPLVDLPIGINITRFQTLLALHRSYLTPGKLESGWTTGAAAYYVGYLQQRTFLLSYNQNGTITDAVDCSLDPLSETKCTLKSLTVEKGIYQTSNFRVQPTISIVRFPNITNLCPFGEVFNASKFASVYAWNRKRISNCVADYSVLYNSTSFSTFKCYGVSPTKLNDLCFTNVYADSFVVKGDEVRQIAPGQTGVIADYNYKLPDDFTGCVIAWNSVKQDALTGGNYGYLYRLFRKSKLKPFERDISTEIYQAGSTPCNGQVGLNCYYPLERYGFHPTTGVNYQPFRVVVLSFELLNGPATVCGPKLSTTLVKDKCVNFNFNGLTGTGVLTTSKKQFLPFQQFGRDISDTTDAVRDPQTLEILDITPCSFGGVSVITPGTNTSNQVAVLYQDVNCTEVPMAIHAEQLTPAWRVYSAGANVFQTRAGCLVGAEHVNNSYECDIPVGAGICASYHSMSSFRSVNQRSIIAYTMSLGAENSVAYSNNSIAIPTNFTISVTTEILPVSMTKTSVDCTMYICGDSIECSNLLLQYGSFCTQLNRALTGIAVEQDKNTQEVFAQVKQIYKTPPIKDFGGFNFSQILPDPSKPSKRSFIEDLLFNKVTLADAGFIKQYGDCLGDIAARDLICAQKFNGLTVLPPLLTDEMIAQYCSALLAGTITSGWTFGAGAALQIPFAMQMAYRFNGIGVTQNVLYENQKLIANQFNSAIGKIQDSLSSTASALGKLQDVVNQNAQALNTLVKQLSSNFGAISSVLNDILSRLDKVEAEVQIDRLITGRLQSLQTYVTQQLIRAAEIRASANLAATKMSECVLGQSKRVDFCGKGYHLMSFPQCAPHGVVFLHVTYVPAQEKNFTTAPAICHEGKAHFPREGVFVSNGTHWFITQRNFYEPQIITTDNTFVSGSCDVVIGIVNNTVYDPLQPELDSFKEELDKYFKNHTSPDVDLGDISGINASVVNIQKEIDRLNEVAKNLNESLIDLQELGKYEQYIKGGGGSDIIKLLNEQVNKEMQSSNLYMSMSSWCYTHSLDGAGLFLFDHAAEEYEHAKKLIIFLNENNVPVQLTSISAPEHKFEGLTQIFQKAYEHEQHISESINNIVDHAIKSKDHATFNFLQWYVAEQHEEEVLFKDILDKIELIGNENHGLYLADQYVKGIAKSRKS

SEQ ID NO: 5632 - protein, 1373 aa, Artificial Sequence
  SARS-CoV-2/pangolin/Guangxi/P5E/2017__EPI_ISL_410541 spike protein (1-1205)(T868C_S1049C) Ferritin construct
MFVFLFVLPLVSSQCVNLTTRTGIPPGYTNSSTRGVYYPDKVFRSSILHLTQDLFLPFFSNVTWFNTITYQGGSKKFDNPVLPFNDGVYFASTEKSNIIRGWIFGTTLDARTQSLLIVNNATNVVIKVCEFQFCTDPFLGVYYHNNNKTWVENEFRVYSSANNCTFEYISQPFLMDLEGKQGNFKNLREFVFKNVDGYFKIYSKHTPIDLVRDLPRGFAALEPLVDLPIGINITRFQTLLALHRSYLTPGKLESGWTTGAAAYYVGYLQQRTFLLSYNQNGTITDAVDCSLDPLSETKCTLKSLTVEKGIYQTSNFRVQPTISIVRFPNITNLCPFGEVFNASKFASVYAWNRKRISNCVADYSVLYNSTSFSTFKCYGVSPTKLNDLCFTNVYADSFVVKGDEVRQIAPGQTGVIADYNYKLPDDFTGCVIAWNSVKQDALTGDNYGYLYRLFRKSKLKPFERDISTEIYQAGSTPCNGQVGLNCYYPLERYGFHPTTGVNYQPFRVVVLSFELLNGPATVCGPKLSTTLVKDKCVNFNFNGLTGTGVLTTSKKQFLPFQQFGRDISDTTDAVRDPQTLEILDITPCSFGGVSVITPGTNTSNQVAVLYQDVNCTEVPMAIHAEQLTPAWRVYSAGANVFQTRAGCLVGAEHVNNSYECDIPVGAGICASYHSMSSFRSVNQRSIIAYTMSLGAENSVAYSNNSIAIPTNFTISVTTEILPVSMTKTSVDCTMYICGDSIECSNLLLQYGSFCTQLNRALTGIAVEQDKNTQEVFAQVKQIYKTPPIKDFGGFNFSQILPDPSKPSKRSFIEDLLFNKVTLADAGFIKQYGDCLGDIAARDLICAQKFNGLTVLPPLLTDEMIAQYCSALLAGTITSGWTFGAGAALQIPFAMQMAYRFNGIGVTQNVLYENQKLIANQFNSAIGKIQDSLSSTASALGKLQDVVNQNAQALNTLVKQLSSNFGAISSVLNDILSRLDKVEAEVQIDRLITGRLQSLQTYVTQQLIRAAEIRASANLAATKMSECVLGQSKRVDFCGKGYHLMSFPQCAPHGVVFLHVTYVPAQEKNFTTAPAICHEGKAHFPREGVFVSNGTHWFITQRNFYEPQIITTDNTFVSGSCDVVIGIVNNTVYDPLQPELDSFKEELDKYFKNHTSPDVDLGDISGINASVVNIQKEIDRLNEVAKNLNESLIDLQELGKYEQYIKGGGGSDIIKLLNEQVNKEMQSSNLYMSMSSWCYTHSLDGAGLFLFDHAAEEYEHAKKLIIFLNENNVPVQLTSISAPEHKFEGLTQIFQKAYEHEQHISESINNIVDHAIKSKDHATFNFLQWYVAEQHEEEVLFKDILDKIELIGNENHGLYLADQYVKGIAKSRKS

SEQ ID NO: 5633 - protein, 1371 aa, Artificial Sequence
  SARS-CoV-2/pangolin/Guangxi/P1E/2017__EPI_ISL_410539 spike protein (1-1203)(T866C_S1047C) Ferritin construct
MFVFLFVLPLVSSQCVNLTTRTGIQPGYTNSSTRGVYYPDKVFRSSILHLTQDLFLPFFSNVTWFNTINYQGGFKKFDNPVLPFNDGVYFASTEKSNIIRGWIFGTTLDARTQSLLIVNNATNVVIKVCEFQFCTDPFLGVYYHNNNKTWVENEFRVYSSANNCTFEYISQPFLMDLEGKQGNFKNLREFVFKNVDGYFKIYSKHTPIDLVRDLPRGFAALEPLVDLPIGINITRFQTLLALHRSYLTPGKLESGWTTGAAAYYVGYLQQRTFLLSYNQNGTITDAVDCSLDPLSETKCTLKSLTVEKGIYQTSNFRVQPTISIVRFPNITNLCPFGEVFNASKFASVYAWNRKRISNCVADYSVLYNSTSFSTFKCYGVSPTKLNDLCFTNVYADSFVVKGDEVRQIAPGQTGVIADYNYKLPDDFTGCVIAWNSVKQDALTGGNYLYRLFRKSKLKPFERDISTEIYQAGSTPCNGQVGLNCYYPLERYGFHPTTGVNYQPFRVVVLSFELLNGPATVCGPKLSTTLVKDKCVNFNFNGLTGTGVLTTSKKQFLPFQQFGRDISDTTDAVRDPQTLEILDITPCSFGGVSVITPGTNTSNQVAVLYQDVNCTEVPMAIHAEQLTPAWRVYSAGANVFQTRAGCLVGAEHVNNSYECDIPVGAGICASYHSMSSLRSVNQRSIIAYTMSLGAENSVAYSNNSIAIPTNFTISVTTEILPVSMTKTSVDCTMYICGDSIECSNLLLQYGSFCTQLNRALTGIAVEQDKNTQEVFAQVKQIYKTPPIKDFGGFNFSQILPDPSKPSKRSFIEDLLFNKVTLADAGFIKQYGDCLGDIAARDLICAQKFNGLTVLPPLLTDEMIAQYCSALLAGTITSGWTFGAGAALQIPFAMQMAYRFNGIGVTQNVLYENQKLIANQFNSAIGKIQDSLSSTASALGKLQDVVNQNAQALNTLVKQLSSNFGAISSVLNDILSRLDKVEAEVQIDRLITGRLQSLQTYVTQQLIRAAEIRASANLAATKMSECVLGQSKRVDFCGKGYHLMSFPQCAPHGVVFLHVTYVPAQEKNFTTAPAICHEGKAHFPREGVFVSNGTHWFITQRNFYEPQIITTDNTFVSGSCDVVIGIVNNTVYDPLQPELDSFKEELDKYFKNHTSPDVDLGDISGINASVVNIQKEIDRLNEVAKNLNESLIDLQELGKYEQYIKGGGGSDIIKLLNEQVNKEMQSSNLYMSMSSWCYTHSLDGAGLFLFDHAAEEYEHAKKLIIFLNENNVPVQLTSISAPEHKFEGLTQIFQKAYEHEQHISESINNIVDHAIKSKDHATFNFLQWYVAEQHEEEVLFKDILDKIELIGNENHGLYLADQYVKGIAKSRKS

SEQ ID NO: 5634 - protein, 1241 aa, Artificial Sequence; identical to SEQ ID NO: 76
  SARS-CoV-2/Wuhan/WIV05/2019__EPI_ISL_402128 spike protein (1-1211) Foldon construct

SEQ ID NO: 5635 - protein, 1237 aa, Artificial Sequence; identical to SEQ ID NO: 77
  SARS-CoV-2/bat/Yunnan/RaTG13/2013__EPI_ISL_402131 spike protein (1-1207) Foldon construct

SEQ ID NO: 5636 - protein, 1241 aa, Artificial Sequence; identical to SEQ ID NO: 78
  SARS-CoV-2/Wuhan/HBCDC-HB-01/2019__EPI_ISL_402132 spike protein (1-1211) Foldon construct

SEQ ID NO: 5637 - protein, 1241 aa, Artificial Sequence; identical to SEQ ID NO: 79
  SARS-CoV-2/Guangdong/20SF028/2020__EPI_ISL_403936 spike protein (1-1211) Foldon construct

SEQ ID NO: 5638 - protein, 1241 aa, Artificial Sequence; identical to SEQ ID NO: 80
  SARS-CoV-2/Shenzhen/SZTH-001/2020__EPI_ISL_406592 spike protein (1-1211) Foldon construct

SEQ ID NO: 5639 - protein, 1241 aa, Artificial Sequence; identical to SEQ ID NO: 81
  SARS-CoV-2/Shenzhen/SZTH-004/2020__EPI_ISL_406595 spike protein (1-1211) Foldon construct

SEQ ID NO: 5640 - protein, 1241 aa, Artificial Sequence; identical to SEQ ID NO: 82
  SARS-CoV-2/France/IDF0372/2020__EPI_ISL_406596 spike protein (1-1211) Foldon construct

SEQ ID NO: 5641 - protein, 1241 aa, Artificial Sequence; identical to SEQ ID NO: 83
  SARS-CoV-2/Australia/VIC01/2020__EPI_ISL_406844 spike protein (1-1211) Foldon construct

SEQ ID NO: 5642 - protein, 1241 aa, Artificial Sequence; identical to SEQ ID NO: 84
  SARS-CoV-2/Germany/BavPat1/2020__EPI_ISL_406862 spike protein (1-1211) Foldon construct

SEQ ID NO: 5643 - protein, 1241 aa, Artificial Sequence
  SARS-CoV-2/Wuhan/HBCDC-HB-02/2020__EPI_ISL_412978 spike protein (1-1211) Foldon construct
MFVFLVLLPLVSSQCVNLTTRTQLPPAYTNSFTRGVYYPDKVFRSSVLHSTQDLFLPFFSNVTWFHAIHVSGTNGTKRFDNPVLPFNDGVYFASTEKSNIIRGWIFGTTLDSKTQSLLIVNNATNVVIKVCEFQFCNDPFLGVYYHKNNKSWMESEFRVYSSANNCTFEYVSQPFLMDLEGKQGNFKNLREFVFKNIDGYFKIYSKHTPINLVRDLPQGFSALEPLVDLPIGINITRFQTLLALHRSYLTPGDSSSGWTAGAAAYYVGYLQPRTFLLKYNENGTITDAVDCALDPLSETKCTLKSFTVEKGIYQTSNFRVQPTESIVRFPNITNLCPFGEVFNATRFASVYAWNRKRISNCVADYSVLYNSASFSTFKCYGVSPTKLNDLCFTNVYADSFVIRGDEVRQIAPGQTGKIADYNYKLPDDFTGCVIAWNSNNLDSKVGGNYNYLYRLFRKSNLKPFERDISTEIYQAGSTPCNGVEGFNCYFPLQSYGFQPTNGVGYQPYRVVVLSFELLHAPATVCGPKKSTNLVKNKCVNFNFNGLTGTGVLTESNKKFLPFQQFGRDIADTTDAVRDPQTLEILDITPCSFGGVSVITPGTNTSNQVAVLYQDVNCTEVPVAIHADQLTPTWRVYSTGSNVFQTRAGCLIGAEHVNNSYECDIPIGAGICASYQTQTNSPRRARSVASQSIIAYTMSLGAENSVAYSNNSIAIPTNFTISVTTEILPVSMTKTSVDCTMYICGDSTECSNFLLQYGSFCTQLNRALTGIAVEQDKNTQEVFAQVKQIYKTPPIKDFGGFNFSQILPDPSKPSKRSFIEDLLFNKVTLADAGFIKQYGDCLGDIAARDLICAQKFNGLTVLPPLLTDEMIAQYTSALLAGTITSGWTFGAGAALQIPFAMQMAYRFNGIGVTQNVLYENQKLIANQFNSAIGKIQDSLSSTASALGKLQDVVNQNAQALNTLVKQLSSNFGAISSVLNDILSRLDKVEAEVQIDRLITGRLQSLQTYVTQQLIRAAEIRASANLAATKMSECVLGQSKRVDFCGKGYHLMSFPQSAPHGVVFLHVTYVPAQEKNFTTAPAICHDGKAHFPREGVFVSNGTHWFVTQRNFYEPQIITTDNTFVSGNCDVVIGIVNNTVYDPLQPELDSFKEELDKYFKNHTSPDVDLGDISGINASVVNIQKEIDRLNEVAKNLNESLIDLQELGKYEQYIKGGSGYIPEAPRDGQAYVRKDGEWVLLSTFL

SEQ ID NO: 5644 - protein, 1241 aa, Artificial Sequence
  SARS-CoV-2/Australia/QLD02/2020__EPI_ISL_407896 spike protein (1-1211) Foldon construct
MFVFLVLLPLVSSQCVNLTTRTQLPPAYTNSFTRGVYYPDKVFRSSVLHSTQDLFLPFFSNVTWFHAIHVSGTNGTKRFDNPVLPFNDGVYFASTEKSNIIRGWIFGTTLDSKTQSLLIVNNATNVVIKVCEFQFCNDPFLGVYYHKNNKSWMESEFRVYSSANNCTFEYVSQPFLMDLEGKQGNFKNLREFVFKNIDGYFKIYSKHTPINLVRDLPQGFSALEPLVDLPIGINITRFQTLLALHRSYLTPGDSSSGWTAGAAAYYVGYLQPRTFLLKYNENGTITDAVDCALDPLSETKCTLKSFTVEKGIYQTSNFRVQPTESIVRFPNITNLCPFGEVFNATRFASVYAWNRKRISNCVADYSVLYNSASFSTFKCYGVSPTKLNDLCFTNVYADSFVIRGDEVRQIAPGQTGKIADYNYKLPDDFTGCVIAWNSNNLDSKVGGNYNYLYRLFRKSNLKPFERDISTEIYQAGSTPCNGVEGFNCYFPLQSYGFQPTNGVGYQPYRVVVLSFELLHAPATVCGPKKSTNLVKNKCVNFNFNGLTGTGVLTESNKKFLPFQQFGRDIADTTDAVRDPQTLEILDITPCSFGGVSVITPGTNTSNQVAVLYQDVNCTEVPVAIHADQLTPTWRVYSTGSNVFQTRAGCLIGAEHVNNSYECDIPIGAGICASYQTQTNSPRRARSVASQSIIAYTMSLGAENSVAYSNNSIAIPTNFTISVTTEILPVSMTKTSVDCTMYICGDSTECSNLLLQYGSFCTQLNRALTGIAVEQDKNTQEVFAQVKQIYKTPPIKDFGGFNFSQILPDPSKPSKRSFIEDLLFNKVTLADAGFIKQYGDCLGDIAARDLICAQKFNGLTVLPPLLTDEMIAQYTSALLAGTITSGWTFGAGAALQIPFAMQMAYRFNGIGVTQNVLYENQKLIANQFNSAIGKIQDSLSSTASALGKLQDVVNQNAQALNTLVKQLSSNFGAISSVLNDILSRLDKVEAEVQIDRLITGRLQSLQTYVTQQLIRAAEIRASANLAATKMSECVLGQSKRVDFCGKGYHLMSFPQSAPHGVVFLHVTYVPAQEKNFTTAPAICHDGKAHFPREGVFVSNGTHWFVTQRNFYEPQIITTDNTFVSGNCDVVIGIVNNTVYDPLQLELDSFKEELDKYFKNHTSPDVDLGDISGINASVVNIQKEIDRLNEVAKNLNESLIDLQELGKYEQYIKGGSGYIPEAPRDGQAYVRKDGEWVLLSTFL

SEQ ID NO: 5645 - protein, 1241 aa, Artificial Sequence
  SARS-CoV-2/India/1-31/2020__EPI_ISL_413523 spike protein (1-1211) Foldon construct
MFVFLVLLPLVSSQCVNLTTRTQLPPAYTNSFTRGVYYPDKVFRSSVLHSTQDLFLPFFSNVTWFHAIHVSGTNGTKRFDNPVLPFNDGVYFASTEKSNIIRGWIFGTTLDSKTQSLLIVNNATNVVIKVCEFQFCNDPFLGVYYHKNNKSWMESEFRVYSSANNCTFEYVSQPFLMDLEGKQGNFKNLREFVFKNIDGYFKIYSKHTPINLVRDLPQGFSALEPLVDLPIGINITRFQTLLALHRSYLTPGDSSSGWTAGAAAYYVGYLQPRTFLLKYNENGTITDAVDCALDPLSETKCTLKSFTVEKGIYQTSNFRVQPTESIVRFPNITNLCPFGEVFNATRFASVYAWNRKRISNCVADYSVLYNSASFSTFKCYGVSPTKLNDLCFTNVYADSFVIRGDEVRQIAPGQTGKIADYNYKLPDDFTGCVIAWNSNNLDSKVGGNYNYLYRLFRKSNLKPFERDISTEIYQAGSTPCNGVEGFNCYFPLQSYGFQPTNGVGYQPYRVVVLSFELLHAPATVCGPKKSTNLVKNKCVNFNFNGLTGTGVLTESNKKFLPFQQFGRDIADTTDAVRDPQTLEILDITPCSFGGVSVITPGTNTSNQVAVLYQDVNCTEVPVAIHADQLTPTWRVYSTGSNVFQTRAGCLIGAEHVNNSYECDIPIGAGICASYQTQTNSPRRARSVASQSIIAYTMSLGAENSVAYSNNSIAIPTNFTISVTTEILPVSMTKTSVDCTMYICGDSTECSNLLLQYGSFCTQLNRALTGIAVEQDKNTQEVFAQVKQIYKTPPIKDFGGFNFSQILPDPSKPSKRSFIEDLLFNKVTLADAGFIKQYGDCLGDIAARDLICAQKFNGLTVLPPLLTDEMIAQYTSALLAGTITSGWTFGAGAALQIPFAMQMAYRFNGIGVTQNVLYENQKLIANQFNSVIGKIQDSLSSTASALGKLQDVVNQNAQALNTLVKQLSSNFGAISSVLNDILSRLDKVEAEVQIDRLITGRLQSLQTYVTQQLIRAAEIRASANLAATKMSECVLGQSKRVDFCGKGYHLMSFPQSAPHGVVFLHVTYVPAQEKNFTTAPAICHDGKAHFPREGVFVSNGTHWFVTQRNFYEPQIITTDNTFVSGNCDVVIGIVNNTVYDPLQPELDSFKEELDKYFKNHTSPDVDLGDISGINASVVNIQKEIDRLNEVAKNLNESLIDLQELGKYEQYIKGGSGYIPEAPRDGQAYVRKDGEWVLLSTFL

SEQ ID NO: 5646 - protein, 1241 aa, Artificial Sequence
  SARS-CoV-2/Guangdong/GD2020087-P0008/2020__EPI_ISL_413863 spike protein (1-1211) Foldon construct
MFVFLVLLPLVSSQCVNLTTRTQLPPAYTNSFTRGVYYPDKVFRSSVLHSTQDLFLPFFSNVTWFHAIHVSGTNGTKRFDNPVLPFNDGVYFASTEKSNIIRGWIFGTTLDSKTQSLLIVNNATNVVIKVCEFQFCNDPFLGVYYHKNNKSWMESEFRVYSSANNCTFEYVSQPFLMDLEGKQGNFKNLREFVFKNIDGYFKIYSKHTPINLVRDLPQGFSALEPLVDLPIGINITRFQTLLALHRSYLTPGDSSSGWTAGAAAYYVGYLQPRTFLLKYNENGTITDAVDCALDPLSETKCTLKSFTVEKGIYQTSNFRVQPTESIVRFPNITNLCPFGEVFNATRFASVYAWNRKRISNCVADYSVLYNSASFSTFKCYGVSPTKLNDLCFTNVYADSFVIRGDEVREIAPGQTGKIADYNYKLPDDFTGCVIAWNSNNLDSKVGGNYNYLYRLFRKSNLKPFERDISTEIYQAGSTPCNGVEGFNCYFPLQSYGFQPTNGVGYQPYRVVVLSFELLHAPATVCGPKKSTNLVKNKCVNFNFNGLTGTGVLTESNKKFLPFQQFGRDIADTTDAVRDPQTLEILDITPCSFGGVSVITPGTNTSNQVAVLYQDVNCTEVPVAIHADQLTPTWRVYSTGSNVFQTRAGCLIGAEHVNNSYECDIPIGAGICASYQTQTNSPRRARSVASQSIIAYTMSLGAENSVAYSNNSIAIPTNFTISVTTEILPVSMTKTSVDCTMYICGDSTECSNLLLQYGSFCTQLNRALTGIAVEQDKNTQEVFAQVKQIYKTPPIKDFGGFNFSQILPDPSKPSKRSFIEDLLFNKVTLADAGFIKQYGDCLGDIAARDLICAQKFNGLTVLPPLLTDEMIAQYTSALLAGTITSGWTFGAGAALQIPFAMQMAYRFNGIGVTQNVLYENQKLIANQFNSAIGKIQDSLSSTASALGKLQDVVNQNAQALNTLVKQLSSNFGAISSVLNDILSRLDKVEAEVQIDRLITGRLQSLQTYVTQQLIRAAEIRASANLAATKMSECVLGQSKRVDFCGKGYHLMSFPQSAPHGVVFLHVTYVPAQEKNFTTAPAICHDGKAHFPREGVFVSNGTHWFVTQRNFYEPQIITTDNTFVSGNCDVVIGIVNNTVYDPLQPELDSFKEELDKYFKNHTSPDVDLGDISGINASVVNIQKEIDRLNEVAKNLNESLIDLQELGKYEQYIKGGSGYIPEAPRDGQAYVRKDGEWVLLSTFL

SEQ ID NO: 5647 - protein, 1241 aa, Artificial Sequence
  SARS-CoV-2/Sweden/01/2020__EPI_ISL_411951 spike protein (1-1211) Foldon construct
MFVFLVLLPLVSSQCVNLTTRTQLPPAYTNSFTRGVYYPDKVFRSSVLHSTQDLFLPFFSNVTWFHAIHVSGTNGTKRFDNPVLPFNDGVYFASTEKSNIIRGWIFGTTLDSKTQSLLIVNNATNVVIKVCEFQFCNDPFLGVYYHKNNKSWMESEFRVYSSANNCTFEYVSQPFLMDLEGKQGNFKNLREFVFKNIDGYFKIYSKHTPINLVRDLPQGFSALEPLVDLPIGINITRFQTLLALHRSYLTPGDSSSGWTAGAAAYYVGYLQPRTFLLKYNENGTITDAVDCALDPLSETKCTLKSFTVEKGIYQTSNFRVQPTESIVRFPNITNLCPFGEVFNATRFASVYAWNRKRISNCVADYSVLYNSASFSTFKCYGVSPTKLNDLCFTNVYADSFVIRGDEVRQIAPGQTGKIADYNYKLPDDFTGCVIAWNSNNLDSKVGGNYNYLYRLFRKSNLKPFERDISTEIYQAGSTPCNGVEGFNCYFPLQSYGFQPTNGVGYQPYRVVVLSFELLHAPATVCGPKKSTNLVKNKCVNFNFNGLTGTGVLTESNKKFLPFQQFGRDIADTTDAVRDPQTLEILDITPCSFGGVSVITPGTNTSNQVAVLYQDVNCTEVPVAIHADQLTPTWRVYSTGSNVFQTRAGCLIGAEHVNNSYECDIPIGAGICASYQTQTNSPRRARSVASQSIIAYTMSLGAENSVAYSNNSIAIPTNFTISVTTEILPVSMTKTSVDCTMYICGDSTECSNLLLQYGSFCTQLNRALTGIAVEQDKNTQEVFAQVKQIYKTPPIKDCGGFNFSQILPDPSKPSKRSFIEDLLFNKVTLADAGFIKQYGDCLGDIAARDLICAQKFNGLTVLPPLLTDEMIAQYTSALLAGTITSGWTFGAGAALQIPFAMQMAYRFNGIGVTQNVLYENQKLIANQFNSAIGKIQDSLSSTASALGKLQDVVNQNAQALNTLVKQLSSNFGAISSVLNDILSRLDKVEAEVQIDRLITGRLQSLQTYVTQQLIRAAEIRASANLAATKMSECVLGQSKRVDFCGKGYHLMSFPQSAPHGVVFLHVTYVPAQEKNFTTAPAICHDGKAHFPREGVFVSNGTHWFVTQRNFYEPQIITTDNTFVSGNCDVVIGIVNNTVYDPLQPELDSFKEELDKYFKNHTSPDVDLGDISGINASVVNIQKEIDRLNEVAKNLNESLIDLQELGKYEQYIKGGSGYIPEAPRDGQAYVRKDGEWVLLSTFL

SEQ ID NO: 5648 - protein, 1241 aa, Artificial Sequence
  SARS-CoV-2/Tianmen/HBCDC-HB-07/2020__EPI_ISL_412983 spike protein (1-1211) Foldon construct
MFVFLVLLPLVSSQCVNLTTRTQLPPAYTNSFTRGVYYPDKVFRSSVLHSTQDLFLPFFSNVTWFHAIHVSGTNGTKRFDNPVLPFNDGVYFASTEKSNIIRGWIFGTTLDSKTQSLLIVNNATNVVIKVCEFQFCNDPFLGVYYHKNNKSWMESEFRVYSSANNCTFEYVSQPFLMDLEGKQGNFKNLREFVFKNIDGYFKIYSKHTPINLVRDLPQGFSALEPLVDLPIGINITRFQTLLALHRSYLTPGDSSSGWTAGAAAYYVGYLQPRTFLLKYNENGTITDAVDCALDPLSETKCTLKSFTVEKGIYQTSNFRVQPTESIVRFPNITNLCPFGEVFNATRFASVYAWNRKRISNCVADYSVLYNSASFSTFKCYGVSPTKLNDLCFTNVYADSFVIRGDEVRQIAPGQTGKIADYNYKLPDDFTGCVIAWNSNNLDSKVGGNYNYLYRLFRKSNLKPFERDISTEIYQAGSTPCNGVEGFNCYFPLQSYGFQPTNGVGYQPYRVVVLSFELLHAPATVCGPKKSTNLVKNKCVNFNFNGLTGTGVLTESNKKFLPFQQFGRDIADTTDAVRDPQTLEILDITPCSFGGVSVITPGTNTSNQVAVLYQDLNCTEVPVAIHADQLTPTWRVYSTGSNVFQTRAGCLIGAEHVNNSYECDIPIGAGICASYQTQTNSPRRARSVASQSIIAYTMSLGAENSVAYSNNSIAIPTNFTISVTTEILPVSMTKTSVDCTMYICGDSTECSNLLLQYGSFCTQLNRALTGIAVEQDKNTQEVFAQVKQIYKTPPIKDFGGFNFSQILPDPSKPSKRSFIEDLLFNKVTLADAGFIKQYGDCLGDIAARDLICAQKFNGLTVLPPLLTDEMIAQYTSALLAGTITSGWTFGAGAALQIPFAMQMAYRFNGIGVTQNVLYENQKLIANQFNSAIGKIQDSLSSTASALGKLQDVVNQNAQALNTLVKQLSSNFGAISSVLNDILSRLDKVEAEVQIDRLITGRLQSLQTYVTQQLIRAAEIRASANLAATKMSECVLGQSKRVDFCGKGYHLMSFPQSAPHGVVFLHVTYVPAQEKNFTTAPAICHDGKAHFPREGVFVSNGTHWFVTQRNFYEPQIITTDNTFVSGNCDVVIGIVNNTVYDPLQPELDSFKEELDKYFKNHTSPDVDLGDISGINASVVNIQKEIDRLNEVAKNLNESLIDLQELGKYEQYIKGGSGYIPEAPRDGQAYVRKDGEWVLLSTFL

SEQ ID NO: 5649 - protein, 1241 aa, Artificial Sequence
  SARS-CoV-2/Hong Kong/case42_VM20002493/2020__EPI_ISL_414527 spike protein (1-1211) Foldon construct
MFVFLVLLPLVSSQCVNLTTRTQLPPAYTNSFTRGVYYPDKVFRSSVLHSTQDLFLPFFSNVTWFHAIHVSGTNGTKRFDNPVLPFNDGVYFASTEKSNIIRGWIFGTTLDSKTQSLLIVNNATNVVIKVCEFQFCNDPFLGVYYHKNNKSWMESEFRVYSSANNCTFEYVSQPFLMDLEGKQGNFKNLREFVFKNIDGYFKIYSKHTPINLVRDLPQGFSALEPLVDLPIGINITRFQTLLALHRSYLTPGDSSSGWTAGAAAYYVGYLQPRTFLLKYNENGTITDAVDCALDPLSETKCTLKSFTVEKGIYQTSNFRVQPTESIVRFPNITNLCPFGEVFNATRFASVYAWNRKRISNCVADYSVLYNSASFSTFKCYGVSPTKLNDLCFTNVYADSFVIRGDEVRQIAPGQTGKIADYNYKLPDDFTGCVIAWNSNNLDSKVGGNYNYLYRLFRKSNLKPFERDISTEIYQAGSTPCNGVEGFNCYFPLQSYGFQPTNGVGYQPYRVVVLSFELLHAPATVCGPKKSTNLVKNKCVNFNFNGLTGTGVLTESNKKFLPFQQFGRDIADTTDAVRDPQTLEILDITPCSFGGVSVITPGTNTSNQVAVLYQDVNCTEVPVAIHADQLTPTWRVYSTGSNVFQTRAGCLIGAEHVNNSYECDIPIGAGICASYQTQTNSPRRARSVASQSIIAYTMSLGAENSVAYSNNSIAIPTNFAISVTTEILPVSMTKTSVDCTMYICGDSTECSNLLLQYGSFCTQLNRALTGIAVEQDKNTQEVFAQVKQIYKTPPIKDFGGFNFSQILPDPSKPSKRSFIEDLLFNKVTLADAGFIKQYGDCLGDIAARDLICAQKFNGLTVLPPLLTDEMIAQYTSALLAGTITSGWTFGAGAALQIPFAMQMAYRFNGIGVTQNVLYENQKLIANQFNSAIGKIQDSLSSTASALGKLQDVVNQNAQALNTLVKQLSSNFGAISSVLNDILSRLDKVEAEVQIDRLITGRLQSLQTYVTQQLIRAAEIRASANLAATKMSECVLGQSKRVDFCGKGYHLMSFPQSAPHGVVFLHVTYVPAQEKNFTTAPAICHDGKAHFPREGVFVSNGTHWFVTQRNFYEPQIITTDNTFVSGNCDVVIGIVNNTVYDPLQPELDSFKEELDKYFKNHTSPDVDLGDISGINASVVNIQKEIDRLNEVAKNLNESLIDLQELGKYEQYIKGGSGYIPEAPRDGQAYVRKDGEWVLLSTFL

SEQ ID NO: 5650 - protein, 1241 aa, Artificial Sequence
  SARS-CoV-2/USA/CruiseA-23/2020__EPI_ISL_414482 spike protein (1-1211) Foldon construct
MFVFLVLLPLVSSQCVNLTTRTQLPPAYTNSFTRGVYYPDKVFRSSVLHSTQDLFLPFFSNVTWFHAIHVSGTNGTKRFDNPVLPFNDGVYFASTEKSNIIRGWIFGTTLDSKTQSLLIVNNATNVVIKVCEFQFCNDPFLGVYYHKNNKSWMESEFRVYSSANNCTFEYVSQPFLMDLEVKQGNFKNLREFVFKNIDGYFKIYSKHTPINLVRDLPQGFSALEPLVDLPIGINITRFQTLLALHRSYLTPGDSSSGWTAGAAAYYVGYLQPRTFLLKYNENGTITDAVDCALDPLSETKCTLKSFTVEKGIYQTSNFRVQPTESIVRFPNITNLCPFGEVFNATRFASVYAWNRKRISNCVADYSVLYNSASFSTFKCYGVSPTKLNDLCFTNVYADSFVIRGDEVRQIAPGQTGKIADYNYKLPDDFTGCVIAWNSNNLDSKVGGNYNYLYRLFRKSNLKPFERDISTEIYQAGSTPCNGVEGFNCYFPLQSYGFQPTNGVGYQPYRVVVLSFELLHAPATVCGPKKSTNLVKNKCVNFNFNGLTGTGVLTESNKKFLPFQQFGRDIADTTDAVRDPQTLEILDITPCSFGGVSVITPGTNTSNQVAVLYQDVNCTEVPVAIHADQLTPTWRVYSTGSNVFQTRAGCLIGAEHVNNSYECDIPIGAGICASYQTQTNSPRRARSVASQSIIAYTMSLGAENSVAYSNNSIAIPTNFTISVTTEILPVSMTKTSVDCTMYICGDSTECSNLLLQYGSFCTQLNRALTGIAVEQDKNTQEVFAQVKQIYKTPPIKDFGGFNFSQILPDPSKPSKRSFIEDLLFNKVTLADAGFIKQYGDCLGDIAARDLICAQKFNGLTVLPPLLTDEMIAQYTSALLAGTITSGWTFGAGAALQIPFAMQMAYRFNGIGVTQNVLYENQKLIANQFNSAIGKIQDSLSSTASALGKLQDVVNQNAQALNTLVKQLSSNFGAISSVLNDILSRLDKVEAEVQIDRLITGRLQSLQTYVTQQLIRAAEIRASANLAATKMSECVLGQSKRVDFCGKGYHLMSFPQSAPHGVVFLHVTYVPAQEKNFTTAPAICHDGKAHFPREGVFVSNGTHWFVTQRNFYEPQIITTDNTFVSGNCDVVIGIVNNTVYDPLQPELDSFKEELDKYFKNHTSPDVDLGDISGINASVVNIQKEIDRLNEVAKNLNESLIDLQELGKYEQYIKGGSGYIPEAPRDGQAYVRKDGEWVLLSTFL

SEQ ID NO: 5651 - protein, 1241 aa, Artificial Sequence
  SARS-CoV-2/Hong Kong/case85_VM20002868/2020__EPI_ISL_414519 spike protein (1-1211) Foldon construct
MFVFLVLVPLVSSQCVNLTTRTQLPPAYTNSFTRGVYYPDKVFRSSVLHSTQDLFLPFFSNVTWFHAIHVSGTNGTKRFDNPVLPFNDGVYFASTEKSNIIRGWIFGTTLDSKTQSLLIVNNATNVVIKVCEFQFCNDPFLGVYYHKNNKSWMESEFRVYSSANNCTFEYVSQPFLMDLEGKQGNFKNLREFVFKNIDGYFKIYSKHTPINLVRDLPQGFSALEPLVDLPIGINITRFQTLLALHRSYLTPGDSSSGWTAGAAAYYVGYLQPRTFLLKYNENGTITDAVDCALDPLSETKCTLKSFTVEKGIYQTSNFRVQPTESIVRFPNITNLCPFGEVFNATRFASVYAWNRKRISNCVADYSVLYNSASFSTFKCYGVSPTKLNDLCFTNVYADSFVIRGDEVRQIAPGQTGKIADYNYKLPDDFTGCVIAWNSNNLDSKVGGNYNYLYRLFRKSNLKPFERDISTEIYQAGSTPCNGVEGFNCYFPLQSYGFQPTNGVGYQPYRVVVLSFELLHAPATVCGPKKSTNLVKNKCVNFNFNGLTGTGVLTESNKKFLPFQQFGRDIADTTDAVRDPQTLEILDITPCSFGGVSVITPGTNTSNQVAVLYQDVNCTEVPVAIHADQLTPTWRVYSTGSNVFQTRAGCLIGAEHVNNSYECDIPIGAGICASYQTQTNSPRRARSVASQSIIAYTMSLGAENSVAYSNNSIAIPTNFTISVTTEILPVSMTKTSVDCTMYICGDSTECSNLLLQYGSFCTQLNRALTGIAVEQDKNTQEVFAQVKQIYKTPPIKDFGGFNFSQILPDPSKPSKRSFIEDLLFNKVTLADAGFIKQYGDCLGDIAARDLICAQKFNGLTVLPPLLTDEMIAQYTSALLAGTITSGWTFGAGAALQIPFAMQMAYRFNGIGVTQNVLYENQKLIANQFNSAIGKIQDSLSSTASALGKLQDVVNQNAQALNTLVKQLSSNFGAISSVLNDILSRLDKVEAEVQIDRLITGRLQSLQTYVTQQLIRAAEIRASANLAATKMSECVLGQSKRVDFCGKGYHLMSFPQSAPHGVVFLHVTYVPAQEKNFTTAPAICHDGKAHFPREGVFVSNGTHWFVTQRNFYEPQIITTDNTFVSGNCDVVIGIVNNTVYDPLQPELDSFKEELDKYFKNHTSPDVDLGDISGINASVVNIQKEIDRLNEVAKNLNESLIDLQELGKYEQYIKGGSGYIPEAPRDGQAYVRKDGEWVLLSTFL

SEQ ID NO: 5652 - protein, 1241 aa, Artificial Sequence; identical to SEQ ID NO: 84
  SARS-CoV-2/England/200990660/2020__EPI_ISL_414523 spike protein (1-1211) Foldon construct

SEQ ID NO: 5653 - protein, 1241 aa, Artificial Sequence
  SARS-CoV-2/Australia/NSW09/2020__EPI_ISL_413595 spike protein (1-1211) Foldon construct
MFVFLVLLPLVSSQCVNLTTRTQLPPAYTNSFTRGVYYPDKVFRSSVLHSTQDLFLPFFSNVTWFHAIHVSGTNGTKRFDNPVLPFNDGVYFASTEKSNIIRGWIFGTTLDSKTQSLLIVNNATNVVIKVCEFQFCNDPFLGVYYHKNNKSWMESEFRVYSSANNCTFEYVSQPFLMDLEGKQGNFKNLREFVFKNIDGYFKIYSKHTPINLVRDLPQGFSALEPLVDLPIGINITRFQTLLALHRSYLTPGDSSSGWTAGAAAYYVGYLQPRTFLLKYNENGTITDAVDCALDPLSETKCTLKSFTVEKGIYQTSNFRVQPTESIVRFPNITNLCPFGEVFNATRFASVYAWNRKRISNCVADYSVLYNSASFSTFKCYGVSPTKLNDLCFTNVYADSFVIRGDEVRQIAPGQTGKIADYNYKLPDDFTGCVIAWNSNNLDSKVGGNYNYLYRLFRKSNLKPFERDISTEIYQAGSTPCNGVEGFNCYFPLQSYGFQPTNGVGYQPYRVVVLSFELLHAPATVCGPKKSTNLVKNKCVNFNFNGLTGTGVLTESNKKFLPFQQFGRDIADTTDAVRDPQTLEILDITPCSFGGVSVITPGTNTSNQVAVLYQDVNCTEVPVAIHADQLTPTWRVYSTGSNVFQTRAGCLIGAEHVNNSYECDIPIGAGICASYQTQTNSPRRARSVASQSIIAYTMSLGAENSVAYSNNSIAIPTNFTISVTTEILPVSMTKTSVDCTMYICGDSTECSNLLLQYGSFCTQLNRALTGIAVEQDKNTQEVFAQVKQIYKTPPIKDFGGFNFSQILPDPSKPSKRSFIEDLLFNKVTLADAGFIKQYGDCLGDIAARDLICAQKFNGLTVLPPLLTDEMIAQYTSALLAGTITSGWTFGAGAALQIPFAMQMAYRFNGIGVTQNVLYENQKLIANQFNSAIGKIQDSLSFTASALGKLQDVVNQNAQALNTLVKQLSSNFGAISSVLNDILSRLDKVEAEVQIDRLITGRLQSLQTYVTQQLIRAAEIRASANLAATKMSECVLGQSKRVDFCGKGYHLMSFPQSAPHGVVFLHVTYVPAQEKNFTTAPAICHDGKAHFPREGVFVSNGTHWFVTQRNFYEPQIITTDNTFVSGNCDVVIGIVNNTVYDPLQPELDSFKEELDKYFKNHTSPDVDLGDISGINASVVNIQKEIDRLNEVAKNLNESLIDLQELGKYEQYIKGGSGYIPEAPRDGQAYVRKDGEWVLLSTFL

SEQ ID NO: 5654 - protein, 1241 aa, Artificial Sequence; identical to SEQ ID NO: 76
  SARS-CoV-2/Australia/NSW10/2020__EPI_ISL_413596 spike protein (1-1211) Foldon construct

SEQ ID NO: 5655 - protein, 1241 aa, Artificial Sequence
  SARS-CoV-2/Switzerland/1000477797/2020__EPI_ISL_413023 spike protein (1-1211) Foldon construct
MFVFLVLLPLVSSQCVNLTTRTQLPPAYTNSFTRGVYYPDKVFRSSVLHSTQDLFLPFFSNVTWFHAIHVSGTNGTKRFDNPVLPFNDGVYFASTEKSNIIRGWIFGTTLDSKTQSLLIVNNATNVVIKVCEFQFCNDPFLGVYYHKNNKSWMESEFRVYSSANNCTFEYVSQPFLMDLEGKQGNFKNLREFVFKNIDGYFNIYSKHTPINLVRDLPQGFSALEPLVDLPIGINITRFQTLLALHRSYLTPGDSSSGWTAGAAAYYVGYLQPRTFLLKYNENGTITDAVDCALDPLSETKCTLKSFTVEKGIYQTSNFRVQPTESIVRFPNITNLCPFGEVFNATRFASVYAWNRKRISNCVADYSVLYNSASFSTFKCYGVSPTKLNDLCFTNVYADSFVIRGDEVRQIAPGQTGKIADYNYKLPDDFTGCVIAWNSNNLDSKVGGNYNYLYRLFRKSNLKPFERDISTEIYQAGSTPCNGVEGFNCYFPLQSYGFQPTNGVGYQPYRVVVLSFELLHAPATVCGPKKSTNLVKNKCVNFNFNGLTGTGVLTESNKKFLPFQQFGRDIADTTDAVRDPQTLEILDITPCSFGGVSVITPGTNTSNQVAVLYQGVNCTEVPVAIHADQLTPTWRVYSTGSNVFQTRAGCLIGAEHVNNSYECDIPIGAGICASYQTQTNSPRRARSVASQSIIAYTMSLGAENSVAYSNNSIAIPTNFTISVTTEILPVSMTKTSVDCTMYICGDSTECSNLLLQYGSFCTQLNRALTGIAVEQDKNTQEVFAQVKQIYKTPPIKDFGGFNFSQILPDPSKPSKRSFIEDLLFNKVTLADAGFIKQYGDCLGDIAARDLICAQKFNGLTVLPPLLTDEMIAQYTSALLAGTITSGWTFGAGAALQIPFAMQMAYRFNGIGVTQNVLYENQKLIANQFNSAIGKIQDSLSSTASALGKLQDVVNQNAQALNTLVKQLSSNFGAISSVLNDILSRLDKVEAEVQIDRLITGRLQSLQTYVTQQLIRAAEIRASANLAATKMSECVLGQSKRVDFCGKGYHLMSFPQSAPHGVVFLHVTYVPAQEKNFTTAPAICHDGKAHFPREGVFVSNGTHWFVTQRNFYEPQIITTDNTFVSGNCDVVIGIVNNTVYDPLQPELDSFKEELDKYFKNHTSPDVDLGDISGINASVVNIQKEIDRLNEVAKNLNESLIDLQELGKYEQYIKGGSGYIPEAPRDGQAYVRKDGEWVLLSTFL

SEQ ID NO: 5656 - protein, 1241 aa, Artificial Sequence
  SARS-CoV-2/Belgium/BA-02291/2020__EPI_ISL_415159 spike protein (1-1211) Foldon construct
MFVFLVLLPLVSSQCVNLTTRTQLPPAYTNSFTRGVYYPDKVFRSSVLHSTQDLFLPFFSNVTWFHAIHVSGTNGTKRFDNPVLPFNDGVYFASTEKSNIIRGWIFGTTLDSKTQSLLIVNNATNVVIKVCEFQFCNDPFLGVYYHKNNKSWMESEFRVYSSANNCTFEYVSQPFLMDLEGKQGNFKNLREFVFKNIDGYFKIYSKHTPINLVRDLPQGFSALEPLVDLPIGINITRFQTLLALHRSYLTPGDSSSGWTAGAAAYYVGYLQPRTFLLKYNENGTITDAVDCALDPLSETKCTLKSFTVEKGIYQTSNFRVQPTESIVRFPNITNLCPFGEVFNATRFASVYAWNRKRISNCVADYSVLYNSASFSTFKCYGVSPTKLNDLCFTNVYADSFVIRGDEVRQIAPGQTGKIADYNYKLPDDFTGCVIAWNSNNLDSKVGGNYNYLYRLFRRSNLKPFERDISTEIYQAGSTPCNGVEGFNCYFPLQSYGFQPTNGVGYQPYRVVVLSFELLPAPATVCGPKKSTNLVKNKCVNFNFNGLTGTGVLTESNKKFLPFQQFGRDIADTTDAVRDPQTLEILDITPCSFGGVSVITPGTNTSNQVAVLYQGVNCTEVPVAIHADQLTPTWRVYSTGSNVFQTRAGCLIGAEHVNNSYECDIPIGAGICASYQTQTNSPRRARSVASQSIIAYTMSLGAENSVAYSNNSIAIPTNFTISVTTEILPVSMTKTSVDCTMYICGDSTECSNLLLQYGSFCTQLNRALTGIAVEQDKNTQEVFAQVKQIYKTPPIKDFGGFNFSQILPDPSKPSKRSFIEDLLFNKVTLADAGFIKQYGDCLGDIAARDLICAQKFNGLTVLPPLLTDEMIAQYTSALLAGTITSGWTFGAGAALQIPFAMQMAYRFNGIGVTQNVLYENQKLIANQFNSAIGKIQDSLSSAAPALGKLQDVVNQNAQALNTLVKQLSSNFGAISSVLNDILSRLDKVEAEVQIDRLITGRLQSLQTYVTQQLIRAAEIRASANLAATKMSECVLGQSKRVDFCGKGYHLMSFPQSAPHGVVFLHVTYVPAQEKNFTTAPAICHDGKAHFPREGVFVSNGTHWFVTQRNFYEPQIITTDNTFVSGNCDVVIGIVNNTVYDPLQPELDSFKEELDKYFKNHTSPDVDLGDISGINASVVNIQKEIDRLNEVAKNLNESLIDLQELGKYEQYIKGGSGYIPEAPRDGQAYVRKDGEWVLLSTFL

SEQ ID NO: 5657 - protein, 1241 aa, Artificial Sequence
  SARS-CoV-2/USA/WA8-UW5/2020__EPI_ISL_413486 spike protein (1-1211) Foldon construct
MFVFLVLLPLVSSQCVNLTTRTQLPPAYTNSFTRGVYYPDKVFRSSVLHSTQDLFLPFFSNVTWFHAIHVSGTNGTKRFDNPVLPFNDGVYFASTEKSNIIRGWIFGTTLDSKTQSLLIVNNATNVVIKVCEFQFCNDPFLGVYYHKNNKSWMESEFRVYSSANNCTFEYVSQPFLMDLEGKQGNFKNLREFVFKNIDGYFKIYSKHTPINLVRDLPQGFSALEPLVDLPIGINITRFQTLLALHRSYLTPGDSSSGWTAGAAAYYVGYLQPRTFLLKYNENGTITDAVDCALDPLSETKCTLKSFTVEKGIYQTSNFRVQPTESIVRFPNITNLCPFGEVFNATRFASVYAWNRKRISNCVADYSVLYNSASFSTFKCYGVSPTKLNDLCFTNVYADSFVIRGDEVRQIAPGQTGKIADYNYKLPDDFTGCVIAWNSNNLDSKVGGNYNYLYRLFRKSNLKPFERDISTEIYQAGSTPCNGVEGFNCYFPLQSYGFQPTNGVGYQPYRVVVLSFELLHAPATVCGPKKSTNLVKNKCVNFNFNGLTGTGVLTESNKKFLPFQQFGRDIADTTDAVRDPQTLEILDITPCSFGGVSVITPGTNTSNQVAVLYQDVNCTEVPVAIHADQLTPTWRVYSTGSNVFQTRAGCLIGAEYVNNSYECDIPIGAGICASYQTQTNSPRRARSVASQSIIAYTMSLGAENSVAYSNNSIAIPTNFTISVTTEILPVSMTKTSVDCTMYICGDSTECSNLLLQYGSFCTQLNRALTGIAVEQDKNTQEVFAQVKQIYKTPPIKDFGGFNFSQILPDPSKPSKRSFIEDLLFNKVTLADAGFIKQYGDCLGDIAARDLICAQKFNGLTVLPPLLTDEMIAQYTSALLAGTITSGWTFGAGAALQIPFAMQMAYRFNGIGVTQNVLYENQKLIANQFNSAIGKIQDSLSSTASALGKLQDVVNQNAQALNTLVKQLSSNFGAISSVLNDILSRLDKVEAEVQIDRLITGRLQSLQTYVTQQLIRAAEIRASANLAATKMSECVLGQSKRVDFCGKGYHLMSFPQSAPHGVVFLHVTYVPAQEKNFTTAPAICHDGKAHFPREGVFVSNGTHWFVTQRNFYEPQIITTDNTFVSGNCDVVIGIVNNTVYDPLQPELDSFKEELDKYFKNHTSPDVDLGDISGINASVVNIQKEIDRLNEVAKNLNESLIDLQELGKYEQYIKGGSGYIPEAPRDGQAYVRKDGEWVLLSTFL

SEQ ID NO: 5658 - protein, 1241 aa, Artificial Sequence
  SARS-CoV-2/England/20102000506/2020__EPI_ISL_415147 spike protein (1-1211) Foldon construct
MFVFLVLLPLVSSQCVNLTTRTQLPPAYTNSFTRGVYYPDKVFRSSVLHSTQDLFLPFFSNVTWFHAIHVSGTNGTKRFDNPVLPFNDGVYFASTEKSNIIRGWIFGTTLDSKTQSLLIVNNATNVVIKVCEFQFCNDPFLGVYYHKNNKSWMESEFRVYSSANNCTFEYVSQPFLMDLEGKQGNFKNLREFVFKNIDGYFKIYSKHTPINLVRDLPQGFSALEPLVDLPIGINITRFQTLLALHRSYLTPGDSSSGWTAGAAAYYVGYLQPRTFLLKYNENGTITDAVDCALDPLSETKCTLKSFTVEKGIYQTSNFRVQPTESIVRFPNITNLCPFGEVFNATRFASVYAWNRKRISNCVADYSVLYNSASFSTFKCYGVSPTKLNDLCFTNVYADSFVIRGDEVRQIAPGQTGKIADYNYKLPDDFTGCVIAWNSNNLDSKVGGNYNYLYRLFRKSNLKPFERDISTEIYQAGSTPCNGVEGFNCYFPLQSYGFQPTNGVGYQPYRVVVLSFELLHAPATVCGPKKSTNLVKNKCVNFNFNGLTGTGVLTESNKKFLPFQQFGRDIADTTDAVRDPQTLEILDITPCSFGGVSVITPGTNTSNQVAVLYQGVNCTEVPVAIHADQLTPTWRVYSTGSNVFQTRAGCLIGAEHVNNSYECDIPIGAGICASYQTQTNSPRRARSVASQSIIAYTMSLGAENSVAYSNNSIAIPTNFTISVTTEILPVSMTKTSVDCTMYICGDSTECSNLLLQYGSFCTQLNRALTGIAVEQDKNTQEVFAQVKQIYKTPPIKDFGGFNFSQILPDPSKPSKRSFIEDLLFNKVTLADAGFIKQYGYCLGDIAARDLICAQKFNGLTVLPPLLTDEMIAQYTSALLAGTITSGWTFGAGAALQIPFAMQMAYRFNGIGVTQNVLYENQKLIANQFNSAIGKIQDSLSSTASALGKLQDVVNQNAQALNTLVKQLSSNFGAISSVLNDILSRLDKVEAEVQIDRLITGRLQSLQTYVTQQLIRAAEIRASANLAATKMSECVLGQSKRVDFCGKGYHLMSFPQSAPHGVVFLHVTYVPAQEKNFTTAPAICHDGKAHFPREGVFVSNGTHWFVTQRNFYEPQIITTDNTFVSGNCDVVIGIVNNTVYDPLQPELDSFKEELDKYFKNHTSPDVDLGDISGINASVVNIQKEIDRLNEVAKNLNESLIDLQELGKYEQYIKGGSGYIPEAPRDGQAYVRKDGEWVLLSTFL

SEQ ID NO: 5659 - protein, 1241 aa, Artificial Sequence
  SARS-CoV-2/Belgium/VAG-03013/2020__EPI_ISL_415155 spike protein (1-1211) Foldon construct
MFVFLVLLPLVSSQCVNLTTRTQLPPAYTNSFTRGVYYPDKVFRSSVLHSTQDLFLPFFSNVTWFHAIHVSGTNGTKRFDNPVLPFNDGVYFASTEKSNIIRGWIFGTTLDSKTQSLLIVNNATNVVIKVCEFQFCNDPFLGVYYHKNNKSWMESEFRVYSSANNCTFEYVSQPFLMDLEGKQGNFKNLREFVFKNIDGYFKIYSKHTPINLVRDLPQGFSALEPLVDLPIGINITRFQTLLALHRSYLTPGDSSSGWTAGAAAYYVGYLQPRTFLLKYNENGTITDAVDCALDPLSETKCTLKSFTVEKGIYQTSNFRVQPTESIVRFPNITNLCPFGEVFNATRFASVYAWNRKRISNCVADYSVLYNSASFSTFKCYGVSPTKLNDLCFTNVYADSFVIRGDEVRQIAPGQTGKIADYNYKLPDDFTGCVIAWNSNNLDSKVGGNYNYLYRLFRKSNLKPFERDISTEIYQAGSTPCNGVEGFNCYFPLQSYGFQPTNGVGYQPYRVVVLSFELLHAPATVCGPKKSTNLVKNKCVNFNFNGLTGTGVLTESNKKFLPFQQFGRDIADTTDAVRDPQTLEILDITPCSFGGVSVITPGTNTSNQVAVLYQGVNCTEVPVAIHADQLTPTWRVYSTGSNVFQTRAGCLIGAEHVNNSYECDIPIGAGICASYQTQTNSPRRARSVASQSIIAYTMSLGAENSVAYSNNSIAIPTNFTISVTTEILPVSMTKTSVDCTMYICGDSTECSNLLLQYGSFCTQLNRALTGIAVEQDKNTQEVFAQVKQIYKTPPIKDFGGFNFSQILPDPSKPSKRSFIEDLLFNKVTLADAGFIKQYGDCLGDIAARDLICAQKFNGLTVLPPLLTDEMIAQYTSALLAGTITSGWTFGAGAALQIPFAMQMAYRFNGIGVTQNVLYENQKLIANQFNSAIGKIQDSLSSTATALGKLQDVVNQNAQALNTLVKQLSSNFGAISSVLNDILSRLDKVEAEVQIDRLITGRLQSLQTYVTQQLIRAAEIRASANLAATKMSECVLGQSKRVDFCGKGYHLMSFPQSAPHGVVFLHVTYVPAQEKNFTTAPAICHDGKAHFPREGVFVSNGTHWFVTQRNFYEPQIITTDNTFVSGNCDVVIGIVNNTVYDPLQPELDSFKEELDKYFKNHTSPDVDLGDISGINASVVNIQKEIDRLNEVAKNLNESLIDLQELGKYEQYIKGGSGYIPEAPRDGQAYVRKDGEWVLLSTFL

SEQ ID NO: 5660 - protein, 1241 aa, Artificial Sequence
  SARS-CoV-2/Belgium/BC-03016/2020__EPI_ISL_415157 spike protein (1-1211) Foldon construct
MFVFLVLLPLVSSQCVNLTTRTQLPPAYTNSFTRGVYYPDKVFRSSVLHSTQDLFLPFFSNVTWFHAIHVSGTNGTKRFDNPVLPFNDGVYFASTEKSNIIRGWIFGTTLDSKTQSLLIVNNATNVVIKVCEFQFCNDPFLGVYYHKNNKSWMESEFRVYSSANNCTFEYVSQPFLMDLEGKQGNFKNLREFVFKNIDGYFKIYSKHTPINLVRDLPQGFSALEPLVDLPIGINITRFQTLLALHRSYLTPGDSSSGWTAGAAAYYVGYLQPRTFLLKYNENGTITDAVDCALDPLSETKCTLKSFTVEKGIYQTSNFRVQPTESIVRFPNITNLCPFGEVFNATRFASVYAWNRKRISNCVADYSVLYNSASFSTFKCYGVSPTKLNDLCFTNVYADSFVIRGDEVRQIAPGQTGKIADYNYKLPDDFTGCVIAWNSNNLDSKVGGNYNYLYRLFRKSNLKPFERDISTEIYQAGSTPCNGVEGFNCYFPLQSYGFQPTNGVGYQPYRVVVLSFELLHAPATVCGPKKSTNLVKNKCVNFNFNGLTGTGVLTESNKKFLPFQQFGRDIADTTDAVRDPQTLEILDITPCSFGGVSVITPGTNTSNQVAVLYQGVNCTEVPVAIHADQLTPTWRVYSTGSNVFQTRAGCLIGAEHVNNSYECDIPIGAGICASYQTQTNSPRRARSVASQSIIAYTMSLGAENSVAYSNNSIAIPTNFTISVTTEILPVSMTKTSVDCTMYICGDSTECSNLLLQYGSFCTQLNRALTGIAVEQDKNTQEVFAQVKQIYKTPPIKDFGGFNFSQILPDPSKPSKRSFIEDLLFNKVTLADAGFIKQYGDCLGDIAARDLICAQKFNGLTVLPPLLTDEMIAQYTSALLAGTITSGWTFGAGAALQIPFAMQMAYRFNGIGVTQNVLYENQKLIANQFNSAIGKIQDSLSSTAPALGKLQDVVNQNAQALNTLVKQLSSNFGAISSVLNDILSRLDKVEAEVQIDRLITGRLQSLQTYVTQQLIRAAEIRASANLAATKMSECVLGQSKRVDFCGKGYHLMSFPQSAPHGVVFLHVTYVPAQEKNFTTAPAICHDGKAHFPREGVFVSNGTHWFVTQRNFYEPQIITTDNTFVSGNCDVVIGIVNNTVYDPLQPELDSFKEELDKYFKNHTSPDVDLGDISGINASVVNIQKEIDRLNEVAKNLNESLIDLQELGKYEQYIKGGSGYIPEAPRDGQAYVRKDGEWVLLSTFL

SEQ ID NO: 5661 - protein, 1241 aa, Artificial Sequence
  SARS-CoV-2/Germany/BavPat3/2020__EPI_ISL_414521 spike protein (1-1211) Foldon construct
MFVFLVLLPLVSSQCVNLTTRTQLPPAYTNSFTRGVYYPDKVFRSSVLHSTQDLFLPFFSNVTWFHAIHVSGTNGTKRFDNPVLPFNDGVYFASTEKSNIIRGWIFGTTLDSKTQSLLIVNNATNVVIKVCEFQFCNDPFLGVYYHKNNKSWMESEFRVYSSANNCTFEYVSQPFLMDLEGKQGNFKNLREFVFKNIDGYFKIYSKHTPINLVRDLPQGFSALEPLVDLPIGINITRFQTLLALHRSYLTPGDSSSGWTAGAAAYYVGYLQPRTFLLKYNENGTITDAVDCALDPLSETKCTLKSFTVEKGIYQTSNFRVQPTESIVRFPNITNLCPFGEVFNATRFASVYAWNRKRISNCVADYSVLYNSASFSTFKCYGVSPTKLNDLCFTNVYADSFVIRGDEVRQIAPGQTGKIADYNYKLPDDFTGCVIAWNSNNLDSKVGGNYNYLYRLFRKSNLKPFERDISTEIYQAGSTPCNGVEGFNCYFPLQSYGFQPTNGVGYQPYRVVVLSFELLHAPATVCGPKKSTNLVKNKCVNFNFNGLTGTGVLTESNKKFLPFQQFGRDIADTTDAVRDPQTLEILDITPCSFGGVSVITPGTNTSNQVAVLYQDVNCTEVPVAIHADQLTPTWRVYSTGSNVFQTRAGCLIGAEHVNNSYECDIPIGAGICASYQTQTNSPRRARSVASQSIIAYTMSLGAENSVAYSNNSIAIPTNFTISVTTEILPVSMTKTSVDCTMYICGDSTECSNLLLQYGSFCTQLNRALTGIAVEQDKNTQQVFAQVKQIYKTPPIKDFGGFNFSQILPDPSKPSKRSFIEDLLFNKVTLADAGFIKQYGDCLGDIAARDLICAQKFNGLTVLPPLLTDEMIAQYTSALLAGTITSGWTFGAGAALQIPFAMQMAYRFNGIGVTQNVLYENQKLIANQFNSAIGKIQDSLSSTASALGKLQDVVNQNAQALNTLVKQLSSNFGAISSVLNDILSRLDKVEAEVQIDRLITGRLQSLQTYVTQQLIRAAEIRASANLAATKMSECVLGQSKRVDFCGKGYHLMSFPQSAPHGVVFLHVTYVPAQEKNFTTAPAICHDGKAHFPREGVFVSNGTHWFVTQRNFYEPQIITTDNTFVSGNCDVVIGIVNNTVYDPLQPELDSFKEELDKYFKNHTSPDVDLGDISGINASVVNIQKEIDRLNEVAKNLNESLIDLQELGKYEQYIKGGSGYIPEAPRDGQAYVRKDGEWVLLSTFL

SEQ ID NO: 5662 - protein, 1241 aa, Artificial Sequence
  SARS-CoV-2/France/HF1805/2020__EPI_ISL_414628 spike protein (1-1211) Foldon construct
MFVFLVLLPLVSSQCVNLTTRTQLPPAYTNSFTRGVYYPDKVFRSSVLHSTQDLFLPFFSNVTWFHAIHVSGTNGTKRFDNPVLPFNDGVYFASTEKSNIIRGWIFGTTLDSKTQSLLIVNNATNVVIKVCEFQFCNDPFLGVYYHKNNKSWMESEFRVYSSANNCTFEYVSQPFLMDLEGKQGNFKNLREFVFKNIDGYFKIYSKHTPINLVRDLPQGFSALEPLVDLPIGINITRFQTLLALHRSYLTPGDSSSGWTAGAAAYYVGYLQPRTFLLKYNENGTITDAVDCALDPLSETKCTLKSFTVEKGIYQTSNFRVQPTESIVRFPNITNLCPFGEVFNATRFASVYAWNRKRISNCVADYSVLYNSASFSTFKCYGVSPTKLNDLCFTNVYADSFVIRGDEVRQIAPGQTGKIADYNYKLPDDFTGCVIAWNSNNLDSKVGGNYNYLYRLFRKSNLKPFERDISTEIYQAGSTPCNGVEGFNCYFPLQSYGFQPTNGVGYQPYRVVVLSFELLHAPATVCGPKKSTNLVKNKCVNFNFNGLTGTGVLTESNKKFLPFQQFGRDIADTTDAVRDPQTLEILDITPCSFGGVSVITPGTNTSNQVAVLYQGVNCTEVPVAIHADQLTPTWRVYSTGSNVFQTRAGCLIGAEHVNNSYECDIPIGAGICASYQTQTNSPRRARSVASQSIIAYTMSLGAENSVAYSNNSIAIPTNFTISVTTEILPVSMTKTSVDCTMYICGDSTECSNLLLQYGSFCTQLNRALTGIAVEQDKNTQEVFAQVKQIYKTPPIKDFGGFNFSQILPDPSKPSKRSFIEDLLFNKVTLADAGFIKQYGDCLGDIAARDLICAQKFNGLTVLPPLLTDEMIAQYTSALLAGTITSGWTFGAGAALQIPFAMQMAYRFNGIGVTQNVLYENQKLIANQFNSAIGKIQDSLSSTASALGKLQDVVNQNAQALNTLVKQLSSNFGAISSVLNDILSRLDKVEAEVQIDRLITGRLQSLQTYVTQQLIRAAEIRASANLAATKMSECVLGQSKRVDFCGKGYHLMSFPQSAPHGVVFLHVTYVPAQEKNFTTAPAICHDGKAHFPREGVFVSNGTHWFVTQRNFYEPQIITTDNTFVSGNCDVVIGVVNNTVYDPLQPELDSFKEELDKYFKNHTSPDVDLGDISGINASVVNIQKEIDRLNEVAKNLNESLIDLQELGKYEQYIKGGSGYIPEAPRDGQAYVRKDGEWVLLSTFL

SEQ ID NO: 5663 - protein, 1241 aa, Artificial Sequence
  SARS-CoV-2/Netherlands/ZuidHolland_9/2020__EPI_ISL_414445 spike protein (1-1211) Foldon construct
MFVFLVLLPLVSSQCVNLTTRTQLPPAYTNSFTRGVYYPDKVFRSSVLHSTQDLFLPFFSNVTWFHAIHVSGTNGTKRFDNPVLPFNDGVYFASTEKSNIIRGWIFGTTLDSKTQSLLIVNNATNVVIKVCEFQFCNDPFLGVYYHKNNKSWMESEFRVYSSANNCTFEYVSQPFLMDLEGKQGNFKNLREFVFKNIDGYFKIYSKHTPINLVRDLPQGFSALEPLVDLPIGINITRFQTLLALHRSYLTPGDSSSGWTAGAAAYYVGYLQPRTFLLKYNENGTITDAVDCALDPLSETKCTLKSFTVEKGIYQTSNFRVQPTESIVRFPNITNLCPFGEVFNATRFASVYAWNRKRISNCVADYSVLYNSASFSTFKCYGVSPTKLNDLCFTNVYADSFVIRGDEVRQIAPGQTGKIADYNYKLPDDFTGCVIAWNSNNLDSKVGGNYNYLYRLFRKSNLKPFERDISTEIYQAGSTPCNGVEGFNCYFPLQSYGFQPTNGVGYQPYRVVVLSFELLHAPATVCGPKKSTNLVKNKCVNFNFNGLTGTGVLTESNKKFLPFQQFGRDIADTTDAVRDPQTLEILDITPCSFGGVSVITPGTNTSNQVAVLYQGVNCTEVPVAIHADQLTPTWRVYSTGSNVFQTRAGCLIGAEHVNNSYECDIPIGAGICASYQTQTNSPRRARSVASQSIIAYTMSLGAENSVAYSNNSIAIPTNFTISVTTEILPVSMTKTSVDCTMYICGDSTECSNLLLQYGSFCTQLNRALTGIAVEQDKNTQEVFAQVKQIYKTPPIKDFGGFNFSQILPDPSKPSKRSFIEDLLFNKVTLADAGFIKQYGDCLGDIAARDLICVQKFNGLTVLPPLLTDEMIAQYTSALLAGTITSGWTFGAGAALQIPFAMQMAYRFNGIGVTQNVLYENQKLIANQFNSAIGKIQDSLSSTASALGKLQDVVNQNAQALNTLVKQLSSNFGAISSVLNDILSRLDKVEAEVQIDRLITGRLQSLQTYVTQQLIRAAEIRASANLAATKMSECVLGQSKRVDFCGKGYHLMSFPQSAPHGVVFLHVTYVPAQEKNFTTAPAICHDGKAHFPREGVFVSNGTHWFVTQRNFYEPQIITTDNTFVSGNCDVVIGIVNNTVYDPLQPELDSFKEELDKYFKNHTSPDVDLGDISGINASVVNIQKEIDRLNEVAKNLNESLIDLQELGKYEQYIKGGSGYIPEAPRDGQAYVRKDGEWVLLSTFL

SEQ ID NO: 5664 - protein, 1241 aa, Artificial Sequence
  SARS-CoV-2/Finland/FIN03032020A/2020__EPI_ISL_413602 spike protein (1-1211) Foldon construct
MFVFLVLLPLVSSQCVNLTTRTQLPPAYTNSFTRGVYYPDKVFRSSVLHSTQDLFLPFFSNVTWFHAIHVSGTNGTKRFDNPVLPFNDGVYFASTEKSNIIRGWIFGTTLDSKTQSLLIVNNATNVVIKVCEFQFCNDPFLGVYYHKNNKSWMESEFRVYSSANNCTFEYVSQPFLMDLEGKQGNFKNLREFVFKNIDGYFKIYSKHTPINLVRDLPQGFSALEPLVDLPIGINITRFQTLLALHRSYLTPGDSSSGWTAGAAAYYVGYLQPRTFLLKYNENGTITDAVDCALDPLSETKCTLKSFTVEKGIYQTSNFRVQPTESIVRFPNITNLCPFGEVFNATRFASVYAWNRKRISNCVADYSVLYNSASFSTFKCYGVSPTKLNDLCFTNVYADSFVIRGDEVRQIAPGQTGKIADYNYKLPDDFTGCVISWNSNNLDSKVGGNYNYLYRLFRKSNLKPFERDISTEIYQAGSTPCNGVEGFNCYFPLQSYGFQPTNGVGYQPYRVVVLSFELLHAPATVCGPKKSTNLVKNKCVNFNFNGLTGTGVLTESNKKFLPFQQFGRDIADTTDAVRDPQTLEILDITPCSFGGVSVITPGTNTSNQVAVLYQGVNCTEVPVAIHADQLTPTWRVYSTGSNVFQTRAGCLIGAEHVNNSYECDIPIGAGICASYQTQTNSPRRARSVASQSIIAYTMSLGAENSVAYSNNSIAIPTNFTISVTTEILPVSMTKTSVDCTMYICGDSTECSNLLLQYGSFCTQLNRALTGIAVEQDKNTQEVFAQVKQIYKTPPIKDFGGFNFSQILPDPSKPSKRSFIEDLLFNKVTLADAGFIKQYGDCLGDIAARDLICAQKFNGLTVLPPLLTDEMIAQYTSALLAGTITSGWTFGAGAALQIPFAMQMAYRFNGIGVTQNVLYENQKLIANQFNSAIGKIQDSLSSTASALGKLQDVVNQNAQALNTLVKQLSSNFGAISSVLNDILSRLDKVEAEVQIDRLITGRLQSLQTYVTQQLIRAAEIRASANLAATKMSECVLGQSKRVDFCGKGYHLMSFPQSAPHGVVFLHVTYVPAQEKNFTTAPAICHDGKAHFPREGVFVSNGTHWFVTQRNFYEPQIITTDNTFVSGNCDVVIGIVNNTVYDPLQPELDSFKEELDKYFKNHTSPDVDLGDISGINASVVNIQKEIDRLNEVAKNLNESLIDLQELGKYEQYIKGGSGYIPEAPRDGQAYVRKDGEWVLLSTFL

SEQ ID NO: 5665 - protein, 1241 aa, Artificial Sequence
  SARS-CoV-2/France/GE1977/2020__EPI_ISL_414632 spike protein (1-1211) Foldon construct
MFVFLVLLPLVSSQCVNLTTRTQLPPAYTNSFTRGVYYPDKVFRSSVLHSTQDLFLPFFSNVTWFHAIHVSGTNGTKRFDNPVLPFNDGVYFASTEKSNIIRGWIFGTTLDSKTQSLLIVNNATNVVIKVCEFQFCNDPFLGVYYHKNNKSWMESEFRVYSSANNCTFEYVSQPFLMDLEGKQGNFKNLREFVFKNIDGYFKIYSKHTPINLVRDLPQGFSALEPLVDLPIGINITRFQTLLALHRSYLTPGDSSSGWTAGAAAYYVGYLQPRTFLLKYNENGTITDAVDCALDPLSETKCTLKSFTVEKGIYQTSNFRVQPTESIVRFPNITNLCPFGEVFNATRFASVYAWNRKRISNCVADYSVLYNSASFSTFKCYGVSPTKLNDLCFTNVYADSFVIRGDEVRQIAPGQTGKIADYNYKLPDDFTGCVIAWNSNNLDSKVGGNYNYLYRLFRKSNLKPFERDISTEIYQAGSTPCNGVEGFNCYFPLQSYGFQPTNGVGYQPYRVVVLSFELLHAPATVCGPKKSTNLVKNKCVNFNFNGLTGTGVLTESNKKFLPFQQFGRDIADTTDAVRDPQTLEILDITPCSFGGVSVITPGTNTSNQVAVLYQGVNCTEVPVAIHADQLTPTWRVYSTGSNVFQTRAGCLIGAEHVNNSYECDIPIGAGICASYQTQTNSPRRARSVASQSIIAYTMSLGAENSVAYSNNSIAIPTNFTISVTTEILPVSMTKTSVDCTMYICGDSTECSNLLLQYGSFCTQLNRALTGIAVEQDKNTQEVFAQVKQIYKTPPIKDFGGFNFSQILPDPSKPSKRSFIEDLLFNKVTLADAGFIKQYGDCLGDIAARDLICAQKFNGLTVLPPLLTDEMIAQYTSALLAGTITSGWTFGAGAALQIPFAMQMAYRFNGIGVTQNVLYENQKLIANQFNSAIGKIQDSLFSTASALGKLQDVVNQNAQALNTLVKQLSSNFGAISSVLNDILSRLDKVEAEVQIDRLITGRLQSLQTYVTQQLIRAAEIRASANLAATKMSECVLGQSKRVDFCGKGYHLMSFPQSAPHGVVFLHVTYVPAQEKNFTTAPAICHDGKAHFPREGVFVSNGTHWFVTQRNFYEPQIITTDNTFVSGNCDVVIGIVNNTVYDPLQPELDSFKEELDKYFKNHTSPDVDLGDISGINASVVNIQKEIDRLNEVAKNLNESLIDLQELGKYEQYIKGGSGYIPEAPRDGQAYVRKDGEWVLLSTFL

SEQ ID NO: 5666 - protein, 1241 aa, Artificial Sequence
  SARS-CoV-2/Finland/FIN-313/2020__EPI_ISL_414641 spike protein (1-1211) Foldon construct
MFVFLVLLPLVSSQCVNLTTRTQLPPAYTNSFTRGVYYPDKVFRSSVLHSTQDLFLPFFSNVTWFHAIHVSGTNGTKRFDNPVLPFNDGVYFASTEKSNIIRGWIFGTTLDSKTQSLLIVNNATNVVIKVCEFQFCNDPFLGVYYHKNNKSWMESEFRVYSSANNCTFEYVSQPFLMDLEGKQGNFKNLREFVFKNIDGYFKIYSKHTPINLVRDLPQGFSALEPLVDLPIGINITRFKTLLALHRSYLTPGDSSSGWTAGAAAYYVGYLQPRTFLLKYNENGTITDAVDCALDPLSETKCTLKSFTVEKGIYQTSNFRVQPTESIVRFPNITNLCPFGEVFNATRFASVYAWNRKRISNCVADYSVLYNSASFSTFKCYGVSPTKLNDLCFTNVYADSFVIRGDEVRQIAPGQTGKIADYNYKLPDDFTGCVIAWNSNNLDSKVGGNYNYLYRLFRKSNLKPFERDISTEIYQAGSTPCNGVEGFNCYFPLQSYGFQPTNGVGYQPYRVVVLSFELLHAPATVCGPKKSTNLVKNKCVNFNFNGLTGTGVLTESNKKFLPFQQFGRDIADTTDAVRDPQTLEILDITPCSFGGVSVITPGTNTSNQVAVLYQGVNCTEVPVAIHADQLTPTWRVYSTGSNVFQTRAGCLIGAEHVNNSYECDIPIGAGICASYQTQTNSPRRARSVASQSIIAYTMSLGAENSVAYSNNSIAIPTNFTISVTTEILPVSMTKTSVDCTMYICGDSTECSNLLLQYGSFCTQLNRALTGIAVEQDKNTQEVFAQVKQIYKTPPIKDFGGFNFSQILPDPSKPSKRSFIEDLLFNKVTLADAGFIKQYGDCLGDIAARDLICAQKFNGLTVLPPLLTDEMIAQYTSALLAGTITSGWTFGAGAALQIPFAMQMAYRFNGIGVTQNVLYENQKLIANQFNSAIGKIQDSLSSTASALGKLQDVVNQNAQALNTLVKQLSSNFGAISSVLNDILSRLDKVEAEVQIDRLITGRLQSLQTYVTQQLIRAAEIRASANLAATKMSECVLGQSKRVDFCGKGYHLMSFPQSAPHGVVFLHVTYVPAQEKNFTTAPAICHDGKAHFPREGVFVSNGTHWFVTQRNFYEPQIITTDNTFVSGNCDVVIGIVNNTVYDPLQPELDSFKEELDKYFKNHTSPDVDLGDISGINASVVNIQKEIDRLNEVAKNLNESLIDLQELGKYEQYIKGGSGYIPEAPRDGQAYVRKDGEWVLLSTFL

SEQ ID NO: 5667 - protein, 1241 aa, Artificial Sequence
  SARS-CoV-2/Netherlands/ZuidHolland_2/2020__EPI_ISL_414556 spike protein (1-1211) Foldon construct
MFVFLVLLPLVSSQCVNLTTRTQLPPAYTNSFTRGVYYPDKVFRSSVLHSTQDLFLPFFSNVTWFHAIHVSGTNGTKRFDNPVLPFNDGVYFASTEKSNIIRGWIFGTTLDSKTQSLLIVNNATNVVIKVCEFQFCNDPFLGVYYHKNNKSWMESEFRVYSSANNCTFEYVSQPFLMDLEGKQGNFKNLREFVFKNIDGYFKIYSKHTPINLVRDLPQGFSALEPLVDLPIGINITRFQTLLALHRSYLTPGDSSSGWTAGAAAYYVGYLQPRTFLLKYNENGTITDAVDCALDPLSETKCTLKSFTVEKGIYQTSNFRVQPTESIVRFPNITNLCPFGEVFNATRFASVYAWNRKRISNCVADYSVLYNSASFSTFKCYGVSPTKLNDLCFTNVYADSFVIRGDEVRQIAPGQTGKIADYNYKLPDDFTGCVIAWNSNNLDSKVGGNYNYLYRLFRKSNLKPFERDISTEIYQAGSTPCNGVEGFNCYFPLQSYGFQPTNGVGYQPYRVVVLSFELLHAPATVCGPKKSTNLVKNKCVNFNFNGLTGTGVLTESNKKFLPFQQFGRDIADTTDAVRDPQTLEILDITPCSFGGVSVITPGTNTSNQVAVLYQGVNCTEVPVAIHADQLTPTWRVYSTGSNVFQTRAGCLIGAEHVNNSYECDIPIGAGICASYQTQTNSPRRARSVASQSIIAYTMSLGAENSVAYSNNSIAIPTNFTISVTTEILPVSMTKTSVDCTMYICGDSTECSNLLLQYGSFCTQLNRALTGIALEQDKNTQEVFAQVKQIYKTPPIKDFGGFNFSQILPDPSKPSKRSFIEDLLFNKVTLADAGFIKQYGDCLGDIAARDLICAQKFNGLTVLPPLLTDEMIAQYTSALLAGTITSGWTFGAGAALQIPFAMQMAYRFNGIGVTQNVLYENQKLIANQFNSAIGKIQDSLSSTASALGKLQDVVNQNAQALNTLVKQLSSNFGAISSVLNDILSRLDKVEAEVQIDRLITGRLQSLQTYVTQQLIRAAEIRASANLAATKMSECVLGQSKRVDFCGKGYHLMSFPQSAPHGVVFLHVTYVPAQEKNFTTAPAICHDGKAHFPREGVFVSNGTHWFVTQRNFYEPQIITTDNTFVSGNCDVVIGIVNNTVYDPLQPELDSFKEELDKYFKNHTSPDVDLGDISGINASVVNIQKEIDRLNEVAKNLNESLIDLQELGKYEQYIKGGSGYIPEAPRDGQAYVRKDGEWVLLSTFL

SEQ ID NO: 5668 - protein, 1241 aa, Artificial Sequence
  SARS-CoV-2/USA/WA-UW31/2020__EPI_ISL_414618 spike protein (1-1211) Foldon construct
MFVFLVLLPLVSSQCVNLTTRTQLPPAYTNSFTRGVYYPDKVFRSSVLHSTQDLFLPFFSNVTWFHAIHVSGTNGTKRFDNPVLPFNDGVYFASTEKSNIIRGWIFGTTLDSKTQSLLIVNNATNVVIKVCEFQFCNDPFLGVYYHKNNKSWMESEFRVYSSANNCTFEYVSQPFLMDLEGKQGNFKNLREFVFKNIDGYFKIYSKHTPINLVRDLPQGFSALEPLVDLPIGINITRFQTLLALHRSYLTPGDSSSGWTAGAAAYYVGYLQPRTFLLKYNENGTITDAVDCALDPLSETKCTLKSFTVEKGIYQTSNFRVQPTESIVRFPNITNLCPFGEVFNATRFASVYAWNRKRISNCVADYSVLYNSASFSTFKCYGVSPTKLNDLCFTNVYADSFVIRGDEVRQIAPGQTGKIADYNYKLPDDFTGCVIAWNSNNLDSKVGGNYNYLYRLFRKSNLKPFERDISTEIYQAGSTPCNGAEGFNCYFPLQSYGFQPTNGVGYQPYRVVVLSFELLHAPATVCGPKKSTNLVKNKCVNFNFNGLTGTGVLTESNKKFLPFQQFGRDIADTTDAVRDPQTLEILDITPCSFGGVSVITPGTNTSNQVAVLYQDVNCTEVPVAIHADQLTPTWRVYSTGSNVFQTRAGCLIGAEHVNNSYECDIPIGAGICASYQTQTNSPRRARSVASQSIIAYTMSLGAENSVAYSNNSIAIPTNFTISVTTEILPVSMTKTSVDCTMYICGDSTECSNLLLQYGSFCTQLNRALTGIAVEQDKNTQEVFAQVKQIYKTPPIKDFGGFNFSQILPDPSKPSKRSFIEDLLFNKVTLADAGFIKQYGDCLGDIAARDLICAQKFNGLTVLPPLLTDEMIAQYTSALLAGTITSGWTFGAGAALQIPFAMQMAYRFNGIGVTQNVLYENQKLIANQFNSAIGKIQDSLSSTASALGKLQDVVNQNAQALNTLVKQLSSNFGAISSVLNDILSRLDKVEAEVQIDRLITGRLQSLQTYVTQQLIRAAEIRASANLAATKMSECVLGQSKRVDFCGKGYHLMSFPQSAPHGVVFLHVTYVPAQEKNFTTAPAICHDGKAHFPREGVFVSNGTHWFVTQRNFYEPQIITTDNTFVSGNCDVVIGIVNNTVYDPLQPELDSFKEELDKYFKNHTSPDVDLGDISGINASVVNIQKEIDRLNEVAKNLNESLIDLQELGKYEQYIKGGSGYIPEAPRDGQAYVRKDGEWVLLSTFL

SEQ ID NO: 5669 - protein, 1241 aa, Artificial Sequence
  SARS-CoV-2/South Korea/SNU01/2020__EPI_ISL_411929 spike protein (1-1211) Foldon construct
MFVFLVLLPLVSSQCVNLTTRTQLPPAYTNSFTRGVYYPDKVFRSSVLHSTQDLFLPFFSNVTWFHAIHVSGTNGTKRFDNPVLPFNDGVYFASTEKSNIIRGWIFGTTLDSKTQSLLIVNNATNVVIKVCEFQFCNDPFLGVYYHKNNKSWMESEFRVYSSANNCTFEYVSQPFLMDLEGKQGNFKNLREFVFKNIDGYFKIYSKHTPINLVRDLPQGFWALEPLVDLPIGINITRFQTLLALHRSYLTPGDSSSGWTAGAAAYYVGYLQPRTFLLKYNENGTITDAVDCALDPLSETKCTLKSFTVEKGIYQTSNFRVQPTESIVRFPNITNLCPFGEVFNATRFASVYAWNRKRISNCVADYSVLYNSASFSTFKCYGVSPTKLNDLCFTNVYADSFVIRGDEVRQIAPGQTGKIADYNYKLPDDFTGCVIAWNSNNLDSKVGGNYNYLYRLFRKSNLKPFERDISTEIYQAGSTPCNGVEGFNCYFPLQSYGFQPTNGVGYQPYRVVVLSFELLHAPATVCGPKKSTNLVKNKCVNFNFNGLTGTGVLTESNKKFLPFQQFGRDIADTTDAVRDPQTLEILDITPCSFGGVSVITPGTNTSNQVAVLYQDVNCTEVPVAIHADQLTPTWRVYSTGSNVFQTRAGCLIGAEHVNNSYECDIPIGAGICASYQTQTNSPRRARSVASQSIIAYTMSLGAENSVAYSNNSIAIPTNFTISVTTEILPVSMTKTSVDCTMYICGDSTECSNLLLQYGSFCTQLNRALTGIAVEQDKNTQEVFAQVKQIYKTPPIKDFGGFNFSQILPDPSKPSKRSFIEDLLFNKVTLADAGFIKQYGDCLGDIAARDLICAQKFNGLTVLPPLLTDEMIAQYTSALLAGTITSGWTFGAGAALQIPFAMQMAYRFNGIGVTQNVLYENQKLIANQFNSAIGKIQDSLSSTASALGKLQDVVNQNAQALNTLVKQLSSNFGAISSVLNDILSRLDKVEAEVQIDRLITGRLQSLQTYVTQQLIRAAEIRASANLAATKMSECVLGQSKRVDFCGKGYHLMSFPQSAPHGVVFLHVTYVPAQEKNFTTAPAICHDGKAHFPREGVFVSNGTHWFVTQRNFYEPQIITTDNTFVSGNCDVVIGIVNNTVYDPLQPELDSFKEELDKYFKNHTSPDVDLGDISGINASVVNIQKEIDRLNEVAKNLNESLIDLQELGKYEQYIKGGSGYIPEAPRDGQAYVRKDGEWVLLSTFL

SEQ ID NO: 5670 - protein, 1241 aa, Artificial Sequence
  SARS-CoV-2/China/WF0004/2020__EPI_ISL_413694 spike protein (1-1211) Foldon construct
MFVFLVLLPLVSSQCVNLTTRTQLPPAYTNSFTRGVYYPDKVFRSSVLHSTQDLFLPFFSNVTWFHAIHVSGTNGTKRFDNPVLPFNDGVYFASTEKSNIIRGWIFGTTLDSKTQSLLIVNNATNVVIKVCEFQFCNDPFLGVYYHKNNKSWTESEFRVYSSANNCTFEYVSQPFLMDLEGKQGNFKNLREFVFKNIDGYFKIYSKHTPINLVRDLPQGFSALEPLVDLPIGINITRFQTLLALHRSYLTPGDSSSGWTAGAAAYYVGYLQPRTFLLKYNENGTITDAVDCALDPLSETKCTLKSFTVEKGIYQTSNFRVQPTESIVRFPNITNLCPFGEVFNATRFASVYAWNRKRISNCVADYSVLYNSASFSTFKCYGVSPTKLNDLCFTNVYADSFVIRGDEVRQIAPGQTGKIADYNYKLPDDFTGCVIAWNSNNLDSKVGGNYNYLYRLFRKSNLKPFERDISTEIYQAGSTPCNGVEGFNCYFPLQSYGFQPTNGVGYQPYRVVVLSFELLHAPATVCGPKKSTNLVKNKCVNFNFNGLTGTGVLTESNKKFLPFQQFGRDIADTTDAVRDPQTLEILDITPCSFGGVSVITPGTNTSNQVAVLYQDVNCTEVPVAIHADQLTPTWRVYSTGSNVFQTRAGCLIGAEHVNNSYECDIPIGAGICASYQTQTNSPRRARSVASQSIIAYTMSLGAENSVAYSNNSIAIPTNFTISVTTEILPVSMTKTSVDCTMYICGDSTECSNLLLQYGSFCTQLNRALTGIAVEQDKNTQEVFAQVKQIYKTPPIKDFGGFNFSQILPDPSKPSKRSFIEDLLFNKVTLADAGFIKQYGDCLGDIAARDLICAQKFNGLTVLPPLLTDEMIAQYTSALLAGTITSGWTFGAGAALQIPFAMQMAYRFNGIGVTQNVLYENQKLIANQFNSAIGKIQDSLSSTASALGKLQDVVNQNAQALNTLVKQLSSNFGAISSVLNDILSRLDKVEAEVQIDRLITGRLQSLQTYVTQQLIRAAEIRASANLAATKMSECVLGQSKRFDFCGKGYHLMSFPQSAPHGVVFLHVTYVPAQEKNFTTAPAICHDGKAHFPREGVFVSNGTHWFVTQRNFYEPQIITTDNTFVSGNCDVVIGIVNNTVYDPLQPELDSFKEELDKYFKNHTSPDVDLGDISGINASVVNIQKEIDRLNEVAKNLNESLIDLQELGKYEQYIKGGSGYIPEAPRDGQAYVRKDGEWVLLSTFL

SEQ ID NO: 5671 - protein, 1241 aa, Artificial Sequence
  SARS-CoV-2/China/WF0028/2020__EPI_ISL_413791 spike protein (1-1211) Foldon construct
MFVFLVLLPLVSSQCVNLTTRTQLPPAYTNSFTRGVYYPDKVFRSSVLHSTQDLFLPFFSNVTWFHAIHVSGTNGTKRFDNPVLPFNDGVYFASTEKSNIIRGWIFGTTLDSKTQSLLIVNNATNVVIKVCEFQFCNDPFLGVYYHKNNKSWMESEFRVYSSANNCTFEYVSQPFLMDLEGKQGNFKNLREFVFKNIDGYFKIYSKHTPINLVRDLPQGFSALEPLVDLPIGINITRFQTLLALHRSYLTPGDSSSGWTAGAAAYYVGYLQPRTFLLKYNENGTITDAVDCALDPLSETKCTLKSFTVEKGIYQTSNFRVQPTESIVRFPNITNLCPFGEVFNATRFASVYAWNRKRISNCVADYSVLYNSASFSTFKCYGVSPTKLNDLCFTNVYADSFVIRGDEVRQIAPGQTGKIADYNYKLPDDFTGCVIAWNSNNLDSKVGGNYNYLYRLFRKSNLKPFERDISTEIYQAGSTPCNGVEGFNCYFPLQSYGFQPTNGVGYQPYRVVVLSFELLHAPATVCGPKKSTNLVKNKCVNFNFNGLTGTGVLTESNKKFLPFQQFGRDIADTTDAVRDPQTLEILDITPCSFGGVSVITPGTNTSNQVAVLYQDVNCTEVPVAIHADQLTPTWRVYSTGSNVFQTRAGCLIGAEHVNNSYECDIPIGAGICASYQTQTNSPRRARSVASQSIIAYTMSLGAENSVAYSNNSIAIPTNFTISVTTEILPVSMTKTSVDCTMYICGDSTECSNLLLQYGSFCTQLNRALTGIAVEQDKNTQEVFAQVKQIYKTPPIKDFGGFNFSQILPDPSKPSKRSFIEDLLFNKVTLADAGFIKQYGDCLGDIAARDLICAQKFNGLTVLPPLLTDEMIAQYTSALLAGTITSGWTFGAGAALQIPFAMQMAYRFNGIGVTQNVLYENQKLIANQFNSAIGKIQDSLSSTASALGKLQDVVNQNAQALNTLVKQLSSNFGAISSVLNDILSRLDKVEAEVQIDRLITGRLQSLQTYVTQQLIRAAEIRASANLAATKMSECVLGQSKRVDFCGKGYHLMSFPQSAPHGVVFLHVTYVPAQEKNFTTAPAICHDGKAHFPREGVFVSNGTHWFVTQRNFYEPQIITTDNTFVSGNCDVVIGIVNNTVYDPLQPELESFKEELDKYFKNHTSPDVDLGDISGINASVVNIQKEIDRLNEVAKNLNESLIDLQELGKYEQYIKGGSGYIPEAPRDGQAYVRKDGEWVLLSTFL

SEQ ID NO: 5672 - protein, 1241 aa, Artificial Sequence
  SARS-CoV-2/2019-nCoV/USA-CruiseA-18/2020__MT159716.1 spike protein (1-1211) Foldon construct
MFVFLVLLPLVSSQCVNLTTRTQLPPAYTNSFTRGVYYPDKVFRSSVLHSTQDLFLPFFSNVTWFHAIHVSGTNGTKRFDNPVLPFNDGVYFASTEKSNIIRGWIFGTTLDSKTQSLLIVNNATNVVIKVCEFQFCNDPFLGVYYHKNNKSWMESELRVYSSANNCTFEYVSQPFLMDLEGKQGNFKNLREFVFKNIDGYFKIYSKHTPINLVRDLPQGFSALEPLVDLPIGINITRFQTLLALHRSYLTPGDSSSGWTAGAAAYYVGYLQPRTFLLKYNENGTITDAVDCALDPLSETKCTLKSFTVEKGIYQTSNFRVQPTESIVRFPNITNLCPFGEVFNATRFASVYAWNRKRISNCVADYSVLYNSASFSTFKCYGVSPTKLNDLCFTNVYADSFVIRGDEVRQIAPGQTGKIADYNYKLPDDFTGCVIAWNSNNLDSKVGGNYNYLYRLFRKSNLKPFERDISTEIYQAGSTPCNGVEGFNCYFPLQSYGFQPTNGVGYQPYRVVVLSFELLHAPATVCGPKKSTNLVKNKCVNFNFNGLTGTGVLTESNKKFLPFQQFGRDIADTTDAVRDPQTLEILDITPCSFGGVSVITPGTNTSNQVAVLYQDVNCTEVPVAIHADQLTPTWRVYSTGSNVFQTRAGCLIGAEHVNNSYECDIPIGAGICASYQTQTNSPRRARSVASQSIIAYTMSLGAENSVAYSNNSIAIPTNFTISVTTEILPVSMTKTSVDCTMYICGDSTECSNLLLQYGSFCTQLNRALTGIAVEQDKNTQEVFAQVKQIYKTPPIKDFGGFNFSQILPDPSKPSKRSFIEDLLFNKVTLADAGFIKQYGDCLGDIAARDLICAQKFNGLTVLPPLLTDEMIAQYTSALLAGTITSGWTFGAGAALQIPFAMQMAYRFNGIGVTQNVLYENQKLIANQFNSAIGKIQDSLSSTASALGKLQDVVNQNAQALNTLVKQLSSNFGAISSVLNDILSRLDKVEAEVQIDRLITGRLQSLQTYVTQQLIRAAEIRASANLAATKMSECVLGQSKRVDFCGKGYHLMSFPQSAPHGVVFLHVTYVPAQEKNFTTAPAICHDGKAHFPREGVFVSNGTHWFVTQRNFYEPQIITTDNTFVSGNCDVVIGIVNNTVYDPLQPELDSFKEELDKYFKNHTSPDVDLGDISGINASVVNIQKEIDRLNEVAKNLNESLIDLQELGKYEQYIKGGSGYIPEAPRDGQAYVRKDGEWVLLSTFL

SEQ ID NO: 5673 - protein, 1241 aa, Artificial Sequence
  SARS-CoV-2/SARS-CoV-2/Yunnan-01/human/2020/CHN__MT049951.1 spike protein (1-1211) Foldon construct
MFVFLVLLPLVSSQCVNLTTRTQLPPANTNSFTRGVYYPDKVFRSSVLHSTQDLFLPFFSNVTWFHAIHVSGTNGTKRFDNPVLPFNDGVYFASTEKSNIIRGWIFGTTLDSKTQSLLIVNNATNVVIKVCEFQFCNDPFLGVYYHKNNKSWMESEFRVYSSANNCTFEYVSQPFLMDLEGKQGNFKNLREFVFKNIDGYFKIYSKHTPINLVRDLPQGFSALEPLVDLPIGINITRFQTLLALHRSYLTPGDSSSGWTAGAAAYYVGYLQPRTFLLKYNENGTITDAVDCALDPLSETKCTLKSFTVEKGIYQTSNFRVQPTESIVRFPNITNLCPFGEVFNATRFASVYAWNRKRISNCVADYSVLYNSASFSTFKCYGVSPTKLNDLCFTNVYADSFVIRGDEVRQIAPGQTGKIADYNYKLPDDFTGCVIAWNSNNLDSKVGGNYNYLYRLFRKSNLKPFERDISTEIYQAGSTPCNGVEGFNCYFPLQSYGFQPTNGVGYQPYRVVVLSFELLHAPATVCGPKKSTNLVKNKCVNFNFNGLTGTGVLTESNKKFLPFQQFGRDIADTTDAVRDPQTLEILDITPCSFGGVSVITPGTNTSNQVAVLYQDVNCTEVPVAIHADQLTPTWRVYSTGSNVFQTRAGCLIGAEHVNNSYECDIPIGAGICASYQTQTNSPRRARSVASQSIIAYTMSLGAENSVAYSNNSIAIPTNFTISVTTEILPVSMTKTSVDCTMYICGDSTECSNLLLQYGSFCTQLNRALTGIAVEQDKNTQEVFAQVKQIYKTPPIKDFGGFNFSQILPDPSKPSKRSFIEDLLFNKVTLADAGFIKQYGDCLGDIAARDLICAQKFNGLTVLPPLLTDEMIAQYTSALLAGTITSGWTFGAGAALQIPFAMQMAYRFNGIGVTQNVLYENQKLIANQFNSAIGKIQDSLSSTASALGKLQDVVNQNAQALNTLVKQLSSNFGAISSVLNDILSRLDKVEAEVQIDRLITGRLQSLQTYVTQQLIRAAEIRASANLAATKMSECVLGQSKRVDFCGKGYHLMSFPQSAPHGVVFLHVTYVPAQEKNFTTAPAICHDGKAHFPREGVFVSNGTHWFVTQRNFYEPQIITTDNTFVSGNCDVVIGIVNNTVYDPLQPELDSFKEELDKYFKNHTSPDVDLGDISGINASVVNIQKEIDRLNEVAKNLNESLIDLQELGKYEQYIKGGSGYIPEAPRDGQAYVRKDGEWVLLSTFL

SEQ ID NO: 5674 - protein, 1241 aa, Artificial Sequence
  SARS-CoV-2/USA/WA-UW292/2020__EPI_ISL_418077 spike protein (1-1211) Foldon construct
MFVFLVLLPLVSSQCVNLTTRTQLPPAYTNSFTRGVYYPDKVFRSSVLHSTQDLFLPFFSNVTWFHAIHVSGTNGTKRFDNPVLPFNDGVYFASTEKSNIIRGWIFGTTLDSKTQSLLIVNNATNVVIKVCEFQFCNDPFLGVYYHKNNKSWMESEFRVYSSANNCTFEYVSQPFLMDLEGKQGNFKNLREFVFKNIDGYFKIYSKHTPINLVRDLPQGFSALEPLVDLPIGINITRFQTLLALHRSYLTPGDSSSGWTAGAAAYYVGYLQPRTFLLKYNENGTITDAVDCALDPLSETKCTLKSFTVEKGIYQTSNFRVQPTESIVRFPNITNLCPFGEVFNATRFASVYAWNRKRISNCVADYSVLYNSASFSTFKCYGVSPTKLNDLCFTNVYADSFVIRGDEVRQIAPGQTGKIADYNYKLPDDFTGCVIAWNSNNLDSKVGGNYNYLYRLFRKSNLKPFERDISTEIYQASSTPCNGVEGFNCYFPLQSYGFQPTNGVGYQPYRVVVLSFELLHAPATVCGPKKSTNLVKNKCVNFNFNGLTGTGVLTESNKKFLPFQQFGRDIADTTDAVRDPQTLEILDITPCSFGGVSVITPGTNTSNQVAVLYQDVNCTEVPVAIHADQLTPTWRVYSTGSNVFQTRAGCLIGAEHVNNSYECDIPIGAGICASYQTQTNSPRRARSVASQSIIAYTMSLGAENSVAYSNNSIAIPTNFTISVTTEILPVSMTKTSVDCTMYICGDSTECSNLLLQYGSFCTQLNRALTGIAVEQDKNTQEVFAQVKQIYKTPPIKDFGGFNFSQILPDPSKPSKRSFIEDLLFNKVTLADAGFIKQYGDCLGDIAARDLICAQKFNGLTVLPPLLTDEMIAQYTSALLAGTITSGWTFGAGAALQIPFAMQMAYRFNGIGVTQNVLYENQKLIANQFNSAIGKIQDSLSSTASALGKLQDVVNQNAQALNTLVKQLSSNFGAISSVLNDILSRLDKVEAEVQIDRLITGRLQSLQTYVTQQLIRAAEIRASANLAATKMSECVLGQSKRVDFCGKGYHLMSFPQSAPHGVVFLHVTYVPAQEKNFTTAPAICHDGKAHFPREGVFVSNGTHWFVTQRNFYEPQIITTDNTFVSGNCDVVIGIVNNTVYDPLQPELDSFKEELDKYFKNHTSPDVDLGDISGINASVVNIQKEIDRLNEVAKNLNESLIDLQELGKYEQYIKGGSGYIPEAPRDGQAYVRKDGEWVLLSTFL

SEQ ID NO: 5675 - protein, 1241 aa, Artificial Sequence
  SARS-CoV-2/Iceland/192/2020__EPI_ISL_417819 spike protein (1-1211) Foldon construct
MFVFFVLLPLVSSQCVNLTTRTQLPPAYTNSFTRGVYYPDKVFRSSVLHSTQDLFLPFFSNVTWFHAIHVSGTNGTKRFDNPVLPFNDGVYFASTEKSNIIRGWIFGTTLDSKTQSLLIVNNATNVVIKVCEFQFCNDPFLGVYYHKNNKSWMESEFRVYSSANNCTFEYVSQPFLMDLEGKQGNFKNLREFVFKNIDGYFKIYSKHTPINLVRDLPQGFSALEPLVDLPIGINITRFQTLLALHRSYLTPGDSSSGWTAGAAAYYVGYLQPRTFLLKYNENGTITDAVDCALDPLSETKCTLKSFTVEKGIYQTSNFRVQPTESIVRFPNITNLCPFGEVFNATRFASVYAWNRKRISNCVADYSVLYNSASFSTFKCYGVSPTKLNDLCFTNVYADSFVIRGDEVRQIAPGQTGKIADYNYKLPDDFTGCVIAWNSNNLDSKVGGNYNYLYRLFRKSNLKPFERDISTEIYQAGSTPCNGVEGFNCYFPLQSYGFQPTNGVGYQPYRVVVLSFELLHAPATVCGPKKSTNLVKNKCVNFNFNGLTGTGVLTESNKKFLPFQQFGRDIADTTDAVRDPQTLEILDITPCSFGGVSVITPGTNTSNQVAVLYQGVNCTEVPVAIHADQLTPTWRVYSTGSNVFQTRAGCLIGAEHVNNSYECDIPIGAGICASYQTQTNSPRRARSVASQSIIAYTMSLGAENSVAYSNNSIAIPTNFTISVTTEILPVSMTKTSVDCTMYICGDSTECSNLLLQYGSFCTQLNRALTGIAVEQDKNTQEVFAQVKQIYKTPPIKDFGGFNFSQILPDPSKPSKRSFIEDLLFNKVTLADAGFIKQYGDCLGDIAARDLICAQKFNGLTVLPPLLTDEMIAQYTSALLAGTITSGWTFGAGAALQIPFAMQMAYRFNGIGVTQNVLYENQKLIANQFNSAIGKIQDSLSSTASALGKLQDVVNQNAQALNTLVKQLSSNFGAISSVLNDILSRLDKVEAEVQIDRLITGRLQSLQTYVTQQLIRAAEIRASANLAATKMSECVLGQSKRVDFCGKGYHLMSFPQSAPHGVVFLHVTYVPAQEKNFTTAPAICHDGKAHFPREGVFVSNGTHWFVTQRNFYEPQIITTDNTFVSGNCDVVIGIVNNTVYDPLQPELDSFKEELDKYFKNHTSPDVDLGDISGINASVVNIQKEIDRLNEVAKNLNESLIDLQELGKYEQYIKGGSGYIPEAPRDGQAYVRKDGEWVLLSTFL

SEQ ID NO: 5676 - protein, 1241 aa, Artificial Sequence
  SARS-CoV-2/Belgium/ULG-6939/2020__EPI_ISL_417020 spike protein (1-1211) Foldon construct
MFVFLVLLPLVSSQCVNLTTRTQLPPAYTNSFTRGVYYPDKVFRSSVLHSTQDLFLPFFSNVTWFHAIHVSGTNGTKRFDNPVLPFNDGVYFASTEKSNIIRGWIFGTTLDSKTQSLLIVNNATNVVIKVCEFQFCNDPFLGVYYHKNNKSWMESEFRVYSSANNCTFEYVSQPFLMDLEGKQGNFKNLREFVFKNIDGYFKIYSKHTPINLVRDLPQGFSALEPLVDLPIGINITRFQTLLALHRSYLTPGDSSSGWTAGAAAYYVGYLQPRTFLLKYNENGTITDAVDCALDPLSETKCTLKSFTVEKGIYQTSNFRVQPTESIVRFPNITNLCPFGEVFNATRFASVYAWNRKRISNCVADYSVLYNSASFSTFKCYGVSPTKLNDLCFTNVYADSFVIRGDEVRQIAPGQTGKIADYNYKLPDDFTGCVIAWNSNNLDSKVGGNYNYLYRLFRKSNLKPFERDISTEIYQAGSTPCNGVEGFNCYFPLQSYGFQPTNGVGYQPYRVVVLSFELLHAPATVCGPKKSTNLVKNKCVNFNFNGLTGTGVLTESNKKFLPFQQFGRDIADTTDAVRDPQTLEILDITPCSFGGVSVITPGTNTSNQVAVLYQGVNCTEVPVAIHADQLTPTWRVYSTGSNVFQTRAGCLIGAEHVNNSYECDIPIGAGICASYQTQTNSPRRARSVASQSIIAYTMSLGAENSVVYSNNSIAIPTNFTISVTTEILPVSMTKTSVDCTMYICGDSTECSNLLLQYGSFCTQLNRALTGIAVEQDKNTQEVFAQVKQIYKTPPIKDFGGFNFSQILPDPSKPSKRSFIEDLLFNKVTLADAGFIKQYGDCLGDIAARDLICAQKFNGLTVLPPLLTDEMIAQYTSALLAGTITSGWTFGAGAALQIPFAMQMAYRFNGIGVTQNVLYENQKLIANQFNSAIGKIQDSLSSTASALGKLQDVVNQNAQALNTLVKQLSSNFGAISSVLNDILSRLDKVEAEVQIDRLITGRLQSLQTYVTQQLIRAAEIRASANLAATKMSECVLGQSKRVDFCGKGYHLMSFPQSAPHGVVFLHVTYVPAQEKNFTTAPAICHDGKAHFPREGVFVSNGTHWFVTQRNFYEPQIITTDNTFVSGNCDVVIGIVNNTVYDPLQPELDSFKEELDKYFKNHTSPDVDLGDISGINASVVNIQKEIDRLNEVAKNLNESLIDLQELGKYEQYIKGGSGYIPEAPRDGQAYVRKDGEWVLLSTFL

SEQ ID NO: 5677 - protein, 1241 aa, Artificial Sequence
  SARS-CoV-2/France/HF2496/2020__EPI_ISL_418231 spike protein (1-1211) Foldon construct
MFVFLVLLPLVSSQCVNLTTRTQLPPAYTNSFTRGVYYPDKVFRSSVLHSTQDLFLPFFSNVTWFHAIHVSGTNGTKRFDNPVLPFNDGVYFASTEKSNIIRGWIFGTTLDSKTQSLLIVNNATNVVIKVCEFQFCNDPFLGVYYHKNNKSWMESEFRVYSSANNCTFEYVSQPFLMDLEGKQGNFKNLREFVFKNIDGYFKIYSKHTPINLVRDLPQGFSALEPLVDLPIGINITRFQTLLALHRSYLTPGDSSSGWTAGAAAYYVGYLQPRTFLLKYNENGTITDAVDCALDPLSETKCTLKSFTVEKGIYQTSNFRVQPTESIVRFPNITNLCPFGEVFNATRFASVYAWNRKRISNCVADYSVLYNSASFSTFKCYGVSPTKLNDLCFTNVYADSFVIRGDEVRQIAPGQTGKIADYNYKLPDDFTGCVIAWNSNNLDSKVGGNYNYLYRLFRKSNLKPFERDISTEIYQAGSTPCNGVEGFNCYFPLQSYGFQPTNGVGYQPYRVVVLSFELLHAPATVCGPKKSTNLVKNKCVNFNFNGLTGTGVLTESNKKFLPFQQFGRDIADTTDAVRDPQTLEILDITPCSFGGVSVITPGTNTSNQVAVLYQGVNCTEVPVAIHADQLTPTWRVYSTGSNVFQTRAGCLIGAEHVNNSYECDIPIGAGICASYQTQTNSPRRARSVASQSIIAYTMSLGAENSVAYSNNSIAIPTNFTISVTTEILPVSMTKTSVDCTMYICGDSTECSNLLLQYGSFCTQLNRALTGIAVEQDKNTQEVFAQVKQIYKTPPIKDFGGFNFSQILPDPSKPSKRSFIEDLLFNKVTLADAGFIKQYGDCLGDIVARDLICAQKFNGLTVLPPLLTDEMIAQYTSALLAGTITSGWTFGAGAALQIPFAMQMAYRFNGIGVTQNVLYENQKLIANQFNSAIGKIQDSLSSTASALGKLQDVVNQNAQALNTLVKQLSSNFGAISSVLNDILSRLDKVEAEVQIDRLITGRLQSLQTYVTQQLIRAAEIRASANLAATKMSECVLGQSKRVDFCGKGYHLMSFPQSAPHGVVFLHVTYVPAQEKNFTTAPAICHDGKAHFPREGVFVSNGTHWFVTQRNFYEPQIITTDNTFVSGNCDVVIGIVNNTVYDPLQPELDSFKEELDKYFKNHTSPDVDLGDISGINASVVNIQKEIDRLNEVAKNLNESLIDLQELGKYEQYIKGGSGYIPEAPRDGQAYVRKDGEWVLLSTFL

SEQ ID NO: 5678 - protein, 1241 aa, Artificial Sequence
  SARS-CoV-2/USA/WA-UW291/2020__EPI_ISL_418076 spike protein (1-1211) Foldon construct
MFVFLVLLPLVSSQCVNLTTRTQLPPAYTNSFTRGVYYPDKVFRSSVLHSTQDLFLPFFSNVTWFHAIHVSGTNGTKRFDNPVLPFNDGVYFASTEKSNIIRGWIFGTTLDSKTQSLLIVNNATNVVIKVCEFQFCNDPFLGVYYHKNNKSWMESEFRVYSSANNCTFEYVSQPFLMDLEGKQGNFKNLREFVFKNIDGYFKIYSKHTPINLVRDLPQGFSALEPLVDLPIGINITRFQTLLALHRSYLTPGDSSSGWTAGAAAYYVGYLQPRTFLLKYNENGTITDAVDCALDPLSETKCTLKSFTVEKGIYQTSNFRVQPTESIVRFPNITNLCPFGEVFNATRFASVYAWNRKRISNCVADYSVLYNSASFSTFKCYGVSPTKLNDLCFTNVYADSFVIRGDEVRQIAPGQTGKIADYNYKLPDDFTGCVIAWNSNNLDSKVGGNYNYLYRLFRKSNLKPFERDISTEIYQAGSTPCNGVEGFNCYFPLQSYGFQPTNGVGYQPYRVVVLSFELLHAPATVCGPKKSTNLVKNKCVNFNFNGLTGTGVLTESNKKFLPFQQFGRDIADTTDAVRDPQTLEILDITPCSFGGVSVITPGTNTSNQVAVLYQGVNCTEVPVAIHADQLTPTWRVYSTGSNVFQTRAGCLIGAEHVNNSYECDIPIGAGICASYQTQTNSPRRARSVASQSIIAYTMSLGAENSVAYSNNSIAIPTNFTISVTTEILPVSMTKTSVDCTMYICGDSTECSNLLLQYGSFCTQLNRALTGIAVEQDKNTQEVFAQVKQIYKTPPIKDFGGFNFSQILPDPSKPSKRSFIEDLLFNKVTLADAGFIKQYGDCLGDIAARDLICAQKFNGLTVLPPLLTDEMIAQYTSALLAGTITSGWTFGAGAALQIPFAMQMAYRFNGIGVTQNVLYENQKLIANQFNSAIGKIQYSLSSTASALGKLQDVVNQNAQALNTLVKQLSSNFGAISSVLNDILSRLDKVEAEVQIDRLITGRLQSLQTYVTQQLIRAAEIRASANLAATKMSECVLGQSKRVDFCGKGYHLMSFPQSAPHGVVFLHVTYVPAQEKNFTTAPAICHDGKAHFPREGVFVSNGTHWFVTQRNFYEPQIITTDNTFVSGNCDVVIGIVNNTVYDPLQPELDSFKEELDKYFKNHTSPDVDLGDISGINASVVNIQKEIDRLNEVAKNLNESLIDLQELGKYEQYIKGGSGYIPEAPRDGQAYVRKDGEWVLLSTFL

SEQ ID NO: 5679 - protein, 1241 aa, Artificial Sequence; identical to SEQ ID NO: 84
  SARS-CoV-2/Portugal/PT0034/2020__EPI_ISL_418019 spike protein (1-1211) Foldon construct

SEQ ID NO: 5680 - protein, 1241 aa, Artificial Sequence
  SARS-CoV-2/Iceland/202/2020__EPI_ISL_417750 spike protein (1-1211) Foldon construct
MFVFLVLLPLVSSQCVNLTTRTQLPPAYTNSFTRGVYYPDKVFRSSVLHSTQDLFLPFFSNVTWFHAIHVSGTNGTKRFDNPVLPFNDGVYFASTEKSNIIRGWIFGTTLDSKTQSLLIVNNATNVVIKVCEFQFCNDPFLGVYYHKNNKSWMESEFRVYSSANNCTFEYVSQPFLMDLEGKQGNFKNLREFVFKNIDGYFKIYSKHTPINLVRDLPQGFSALEPLVDLPIGINITRFQTLLALHRSYLTPGDSSSGWTAGAAAYYVGYLQPRTFLLKYNENGTITDAVDCALDPLSETKCTLKSFTVEKGIYQTSNFRVQPTESIVRFPNITNLCPFGEVFNATRFASVYAWNRKRISNCVADYSVLYNSASFSTFKCYGVSPTKLNDLCFTNVYADSFVIRGDEVRQIAPGQTGKIADYNYKLPDDFTGCVIAWNSNNLDSKVGGNYNYLYRLFRKSNLKPFERDISTEIYQAGSTPCNGVEGFNCYFPLQSYGFQPTNGVGYQPYRVVVLSFELLHAPATVCGPKKSTNLVKNKCVNFNFNGLTGTGVLTESNKKFLPFQQFGRDIADTTDAVRDPQTLEILDITPCSFGGVSVITPGTNTSNQVAVLYQDVNCTEVPVAIHADQLTPTWRVYSTGSNVFQTRAGCLIGAEHVNNSYECDIPIGAGICASYQTQTNSPRRARSVASQSIIAYTMSLGAENSVAYSNNSIAIPTNFTISVTTEILPVSMTKTSVDCTMYICGDSTECSNLLLQYGSFCTQLNRALTGIAVEQDKNTQEVFAQVKQIYKTPPIKDFGGFNFSQILPDPSKPSKRSFIEDLLFNKVTLADAGFIKQYGDCLGDIAARDLICAQKFNGLTVLPPLLTDEMIAQYTSALLAGTITSGWTFGAGAALQIPFAMQMAYRFNGIGVTQNVLYENQKLIANQFNSAIGKIQDSLSSTASALGKLQDVVNQNAQALNTLVKQLSSNFGAISSVLNDILSRLDKVEAEVQIDRLITGRLQSLQTYVTQQLIRAAEIRASANLAATKMSECVLGQSKRVDFCGKGYHLMSFPQSAPHGVVFLHVTYVPAQEKNFTTAPAICHDGKAHFPREGVFVSNGTHWFVTQRNFYEPQIITTDNTFVSGNCDVVIGIVNNTVYDPLQPELDSFKEELDKYFKNHTSPDVDLGDIPGINASVVNIQKEIDRLNEVAKNLNESLIDLQELGKYEQYIKGGSGYIPEAPRDGQAYVRKDGEWVLLSTFL

SEQ ID NO: 5681 - protein, 1241 aa, Artificial Sequence
  SARS-CoV-2/USA/WA-UW261/2020__EPI_ISL_418046 spike protein (1-1211) Foldon construct
MFVFLVLLPLVSSQCVNLTTRTQLPPAYTNSFTRGVYYPDKVFRSSVLHSTQDLFLPFFSNVTWFHAIHVSGTNGTKRFDNPVLPFNDGVYFASTEKSNIIRGWIFGTTLDSKTQSLLIVNNATNVVIKVCEFQFCNDPFLGVYYHKNNKSWMESEFRVYSSANNCTFEYVSQPFLMDLEGKQGNFKNLREFVFKNIDGYFKIYSKHTPINLVRDLPQGFSALEPLVDLPIGINITRFQTLLALHRSYLTPGDSSSGWTAGAAAYYVGYLQPRTFLLKYNENGTITDAVDCALDPLSETKCTLKSFTVEKGIYQTSNFRVQPTESIVRFPNITNLCPFGEVFNATRFTSVYAWNRKRISNCVADYSVLYNSASFSTFKCYGVSPTKLNDLCFTNVYADSFVIRGDEVRQIAPGQTGKIADYNYKLPDDFTGCVIAWNSNNLDSKVGGNYNYLYRLFRKSNLKPFERDISTEIYQAGSTPCNGVEGFNCYFPLQSYGFQPTNGVGYQPYRVVVLSFELLHAPATVCGPKKSTNLVKNKCVNFNFNGLTGTGVLTESNKKFLPFQQFGRDIADTTDAVRDPQTLEILDITPCSFGGVSVITPGTNTSNQVAVLYQDVNCTEVPVAIHADQLTPTWRVYSTGSNVFQTRAGCLIGAEHVNNSYECDIPIGAGICASYQTQTNSPRRARSVASQSIIAYTMSLGAENSVAYSNNSIAIPTNFTISVTTEILPVSMTKTSVDCTMYICGDSTECSNLLLQYGSFCTQLNRALTGIAVEQDKNTQEVFAQVKQIYKTPPIKDFGGFNFSQILPDPSKPSKRSFIEDLLFNKVTLADAGFIKQYGDCLGDIAARDLICAQKFNGLTVLPPLLTDEMIAQYTSALLAGTITSGWTFGAGAALQIPFAMQMAYRFNGIGVTQNVLYENQKLIANQFNSAIGKIQDSLSSTASALGKLQDVVNQNAQALNTLVKQLSSNFGAISSVLNDILSRLDKVEAEVQIDRLITGRLQSLQTYVTQQLIRAAEIRASANLAATKMSECVLGQSKRVDFCGKGYHLMSFPQSAPHGVVFLHVTYVPAQEKNFTTAPAICHDGKAHFPREGVFVSNGTHWFVTQRNFYEPQIITTDNTFVSGNCDVVIGIVNNTVYDPLQPELDSFKEELDKYFKNHTSPDVDLGDISGINASVVNIQKEIDRLNEVAKNLNESLIDLQELGKYEQYIKGGSGYIPEAPRDGQAYVRKDGEWVLLSTFL

SEQ ID NO: 5682 - protein, 1241 aa, Artificial Sequence
  SARS-CoV-2/Portugal/PT0035/2020__EPI_ISL_418020 spike protein (1-1211) Foldon construct
MFVFLVLLPLVSSQCVNLTTRTQLPPAYTNSFTRGVYYPDKVFRSSVLHSTQDLFLPFFSNVTWFHAIHVSGTNGTKRFDNPVLPFNDGVYFASTEKSNIIRGWIFGTTLDSKTQSLLIVNNATNVVIKVCEFQFCNDPFLGVYYHKNNKSWMESEFRVYSSANNCTFEYVSQPFLMDLEGKQGNFKNLREFVFKNIDGYFKIYSKHTPINLVRDLPQGFSALEPLVDLPIGINITRFQTLLALHRSYLTPGDSSSGWTAGAAAYYVGYLQPRTFLLKYNENGTITDAVDCALDPLSETKCTLKSFTVEKGIYQTSNFRVQPTESIVRFPNITNLCPFGEVFNATRFASVYAWNRKRISNCVADYSVLYNSASFSTFKCYGVSPTKLNDLCFTNVYADSFVIRGDEVRQIAPGQTGKIADYNYKLPDDFTGCVIAWNSNNLDSKVGGNYNYLYRLFRKSNLKPFERDISTEIYQAGSTPCNGVEGFNCYFPLQSYGFQPTNGVGYQPYRVVVLSFELLHAPATVCGPKKSTNLVKNKCVNFNFNGLTGTGVLTESNKKFLPFQQFGRDIADTTDAVRDPQTLEILDITPCSFGGVSVITPGTNTSNQVAVLYQDVNCTEVPVAIHADQLTPTWRVYSTGSNVFQTRAGCLIGAEHVNNSYECDIPIGAGICASYQTQTNSPRRARSVASQSIIAYTMSLGAENSVAYSNNSIAIPTNFTISVTTEILPVSMTKTSVDCTMYICGDSTECSNLLLQYGSFCTQLNRALTGIAVEQDKNTQEVFAQVKQIYKTPPIKDFGGFNFSQILPDPSKPSKRSFIEDLLFNKVTLADAGFIKQYGDCLGDISARDLICAQKFNGLTVLPPLLTDEMIAQYTSALLAGTITSGWTFGAGAALQIPFAMQMAYRFNGIGVTQNVLYENQKLIANQFNSAIGKIQDSLSSTASALGKLQDVVNQNAQALNTLVKQLSSNFGAISSVLNDILSRLDKVEAEVQIDRLITGRLQSLQTYVTQQLIRAAEIRASANLAATKMSECVLGQSKRVDFCGKGYHLMSFPQSAPHGVVFLHVTYVPAQEKNFTTAPAICHDGKAHFPREGVFVSNGTHWFVTQRNFYEPQIITTDNTFVSGNCDVVIGIVNNTVYDPLQPELDSFKEELDKYFKNHTSPDVDLGDISGINASVVNIQKEIDRLNEVAKNLNESLIDLQELGKYEQYIKGGSGYIPEAPRDGQAYVRKDGEWVLLSTFL

SEQ ID NO: 5683 - protein, 1241 aa, Artificial Sequence
  SARS-CoV-2/USA/NY-NYUMC7/2020__EPI_ISL_418192 spike protein (1-1211) Foldon construct
MFVFLVLLPLVSSQCVNLTTRTQLPPAYTNSFTRGVYYPDKVFRSSVLHSTQDLFLPFFSNVTWFHAIHVSGTNGTKRFDNPVLPFNDGVYFASTEKSNIIRGWIFGTTLDSKTQSLLIVNNATNVVIKVCEFQFCNDPFLGVYHHKNNKSWMESEFRVYSSANNCTFEYVSQPFLMDLEGKQGNFKNLREFVFKNIDGYFKIYSKHTPINLVRDLPQGFSALEPLVDLPIGINITRFQTLLALHRSYLTPGDSSSGWTAGAAAYYVGYLQPRTFLLKYNENGTITDAVDCALDPLSETKCTLKSFTVEKGIYQTSNFRVQPTESIVRFPNITNLCPFGEVFNATRFASVYAWNRKRISNCVADYSVLYNSASFSTFKCYGVSPTKLNDLCFTNVYADSFVIRGDEVRQIAPGQTGKIADYNYKLPDDFTGCVIAWNSNNLDSKVGGNYNYLYRLFRKSNLKPFERDISTEIYQAGSTPCNGVEGFNCYFPLQSYGFQPTNGVGYQPYRVVVLSFELLHAPATVCGPKKSTNLVKNKCVNFNFNGLTGTGVLTESNKKFLPFQQFGRDIADTTDAVRDPQTLEILDITPCSFGGVSVITPGTNTSNQVAVLYQGVNCTEVPVAIHADQLTPTWRVYSTGSNVFQTRAGCLIGAEHVNNSYECDIPIGAGICASYQTQTNSPRRARSVASQSIIAYTMSLGAENSVAYSNNSIAIPTNFTISVTTEILPVSMTKTSVDCTMYICGDSTECSNLLLQYGSFCTQLNRALTGIAVEQDKNTQEVFAQVKQIYKTPPIKDFGGFNFSQILPDPSKPSKRSFIEDLLFNKVTLADAGFIKQYGDCLGDIAARDLICAQKFNGLTVLPPLLTDEMIAQYTSALLAGTITSGWTFGAGAALQIPFAMQMAYRFNGIGVTQNVLYENQKLIANQFNSAIGKIQDSLSSTASALGKLQDVVNQNAQALNTLVKQLSSNFGAISSVLNDILSRLDKVEAEVQIDRLITGRLQSLQTYVTQQLIRAAEIRASANLAATKMSECVLGQSKRVDFCGKGYHLMSFPQSAPHGVVFLHVTYVPAQEKNFTTAPAICHDGKAHFPREGVFVSNGTHWFVTQRNFYEPQIITTDNTFVSGNCDVVIGIVNNTVYDPLQPELDSFKEELDKYFKNHTSPDVDLGDISGINASVVNIQKEIDRLNEVAKNLNESLIDLQELGKYEQYIKGGSGYIPEAPRDGQAYVRKDGEWVLLSTFL

SEQ ID NO: 5684 - protein, 1241 aa, Artificial Sequence
  SARS-CoV-2/Iceland/189/2020__EPI_ISL_417709 spike protein (1-1211) Foldon construct
MFVFLVLLPLVSSQCVNLTTRTQLPPAYTNSFTRGVYYPDKVFRSSVLHSTQDLFLPFFSNVTWFHAIHVSGTNGTKRFDNPVLPFNDGVYFASTEKSNIIRGWIFGTTLDSKTQSLLIVNNATNVVIKVCEFQFCNDPFLGVYYHKNNKSWMESEFRVYSSANNCTFEYVSQPFLMDLEGKQGNFKNLREFVFKNIDGYFKIYSKHTPINLVRDLPQGFSALEPLVDLPIGINITRFQTLLALHRSYLTPGDSSSGWTAGAAAYYVGYLQPRTFLLKYNENGTITDAVDCALDPLSETKCTLKSFTVEKGIYQTSNFRVQPTESIVRFPNITNLCPFGEVFNATRFASVYAWNRKRISNCVADYSVLYNSASFSTFKCYGVSPTKLNDLCFTNVYADSFVIRGDEVRQIAPGQTGKIADYNYKLPDDFTGCVIAWNSNNLDSKVGGNYNYLYRLFRKSNLKPFERDISTEIYQAGSTPCNGVEGFNCYFPLQSYGFQPTNGVGYQPYRVVVLSFELLHAPATVCGPKKSTNLVKNKCVNFNFNGLTGTGVLTESNKKFLPFQQFGRDIADTTDAVRDPQTLEILDITPCSFGGVSVITPGTNTSNQVAVLYQGVNCTEVPVAIHADQLTPTWRVYSTGSNVFQTRAGCLIGAEHVNNSYECDIPIGAGICASYQTQTNSPRRARSVASQSIIAYTMSLGAENSVAYSNNSIAIPTNFTISVTTEILPVSMTKTSVDCTMYICGDSTECSNLLLQYGSFCTQLNRALTGIAVEQDKNTQEVFAQVKQIYKTPPIKDFGGFNFSQILPDPSKPSKRSFIEDLLFNKVTLADAGFTKQYGDCLGDIAARDLICAQKFNGLTVLPPLLTDEMIAQYTSALLAGTITSGWTFGAGAALQIPFAMQMAYRFNGIGVTQNVLYENQKLIANQFNSAIGKIQDSLSSTASALGKLQDVVNQNAQALNTLVKQLSSNFGAISSVLNDILSRLDKVEAEVQIDRLITGRLQSLQTYVTQQLIRAAEIRASANLAATKMSECVLGQSKRVDFCGKGYHLMSFPQSAPHGVVFLHVTYVPAQEKNFTTAPAICHDGKAHFPREGVFVSNGTHWFVTQRNFYEPQIITTDNTFVSGNCDVVIGIVNNTVYDPLQPELDSFKEELDKYFKNHTSPDVDLGDISGINASVVNIQKEIDRLNEVAKNLNESLIDLQELGKYEQYIKGGSGYIPEAPRDGQAYVRKDGEWVLLSTFL

SEQ ID NO: 5685 - protein, 1241 aa, Artificial Sequence
  SARS-CoV-2/Australia/NSW56/2020__EPI_ISL_417408 spike protein (1-1211) Foldon construct
MFVFLVLLPLVSSQCVNLTTRTQLPPAYTNSFTRGVYYPDKVFRSSVLHSTQDLFLPFFSNVTWFHAIHVSGTNGTKRFDNPVLPFNDGVYFASTEKSNIIRGWIFGTTLDSKTQSLLIVNNATNVVIKVCEFQFCNDPFLGVYYHKNNKSWMESEFRVYSSANNCTFEYVSQPFLMDLEGKQGNFKNLREFVFKNIDGYFKIYSKHTPINLVRDLPQGFSALEPLVDLPIGINITRFQTLLALHRSYLTPGDSSSGWTAGAAAYYVGYLQPRTFLLKYNENGTITDAVDCALDPLSETKCTLKSFTVEKGIYQTSNFRVQPTESIVRFPNITNLCPFGEVFNATRFASVYAWNRKRISNCVADYSVLYNSASFSTFKCYGVSPTKLNDLCFTNVYADSFVIRGDEVRQIAPGQTGKIADYNYKLPDDFTGCVIAWNSNNLDSKVGGNYNYLYRLFRKSNLKPFERDISTEIYQAGSTPCNGVEGFNCYFPLQSYGFQPTNGVGYQPYRVVVLSFELLHAPATVCGPKKSTNLVKNKCVNFNFNGLTGTGVLTESNKKFLPFQQFGRDIADTTDAVRDPQTLEILDITPCSFGGVSVITPGTNTSNQVAVLYQDVNCTEVPVAIHADQLTPTWRVYSTGSNVFQTRAGCLIGAEHVNNSYECDIPIGAGICASYQTQTNSPRRARSVASQSIIAYTMSLGAENSVAYSNNSIAIPTNFTISVTTEILPVSMTKTSVDCTMYICGDSTECSNLLLQYGSFCTQLNRALTGIAVEQDKNTQEVFAQVKQIYKTPPIKDFGGFNFSQILPDSSKPSKRSFIEDLLFNKVTLADAGFIKQYGDCLGDIAARDLICAQKFNGLTVLPPLLTDEMIAQYTSALLAGTITSGWTFGAGAALQIPFAMQMAYRFNGIGVTQNVLYENQKLIANQFNSAIGKIQDSLSSTASALGKLQDVVNQNAQALNTLVKQLSSNFGAISSVLNDILSRLDKVEAEVQIDRLITGRLQSLQTYVTQQLIRAAEIRASANLAATKMSECVLGQSKRVDFCGKGYHLMSFPQSAPHGVVFLHVTYVPAQEKNFTTAPAICHDGKAHFPREGVFVSNGTHWFVTQRNFYEPQIITTDNTFVSGNCDVVIGIVNNTVYDPLQPELDSFKEELDKYFKNHTSPDVDLGDISGINASVVNIQKEIDRLNEVAKNLNESLIDLQELGKYEQYIKGGSGYIPEAPRDGQAYVRKDGEWVLLSTFL

SEQ ID NO: 5686 - protein, 1241 aa, Artificial Sequence
  SARS-CoV-2/Iceland/280/2020__EPI_ISL_417608 spike protein (1-1211) Foldon construct
MFVFLVLLPLVSSQCVNLTTRTQLPPAYTNSFTRGVYYPDKVFRSSVLHSTQDLFLPFFSNVTWFHAIHVSGTNGTKRFDNPVLPFNDGVYFASTEKSNIIRGWIFGTTLDSKTQSLLIVNNATNVVIKVCEFQFCNDPFLGVYYHKNNKSWMESEFRVYSSANNCTFEYVSQPFLMDLEGKQGNFKNLREFVFKNIDGYFKIYSKHTPINLVRDLPQGFSALEPLVDLPIGINITRFQTLLALHRSYLTPGDSSSGWTAGAAAYYVGYLQPRTFLLKYNENGTITDAVDCALDPLSETKCTLKSFTVEKGIYQTSNFRVQPTESIVRFPNITNLCPFGEVFNATRFASVYAWNRKRISNCVADYSVLYNSASFSTFKCYGVSPTKLNDLCFTNVYADSFVIRGDEVRQIAPGQTGKIADYNYKLPDDFTGCVIAWNSNNLDSKVGGNYNYLYRLFRKSNLKPFERDISTEIYQAGSTPCNGVEGFNCYFPLQSYGFQPTNGVGYQPYRVVVLSFELLHAPATVCGPKKSTNLVKNKCVNFNFNGLTGTGVLTESNKKFLPFQQFGRDIADTTDAVRDPQTLEILDITPCSFGGVSVITPGTNTSNQVAVLYQGVNCTEVPVAIHADQLTPTWRVYSTGSNVFQTRAGCLIGAEHVNNSYECDIPIGAGICASYHTQTNSPRRARSVASQSIIAYTMSLGAENSVAYSNNSIAIPTNFTISVTTEILPVSMTKTSVDCTMYICGDSTECSNLLLQYGSFCTQLNRALTGIAVEQDKNTQEVFAQVKQIYKTPPIKDFGGFNFSQILPDPSKPSKRSFIEDLLFNKVTLADAGFIKQYGDCLGDIAARDLICAQKFNGLTVLPPLLTDEMIAQYTSALLAGTITSGWTFGAGAALQIPFAMQMAYRFNGIGVTQNVLYENQKLIANQFNSAIGKIQDSLSSTASALGKLQDVVNQNAQALNTLVKQLSSNFGAISSVLNDILSRLDKVEAEVQIDRLITGRLQSLQTYVTQQLIRAAEIRASANLAATKMSECVLGQSKRVDFCGKGYHLMSFPQSAPHGVVFLHVTYVPAQEKNFTTAPAICHDGKAHFPREGVFVSNGTHWFVTQRNFYEPQIITTDNTFVSGNCDVVIGIVNNTVYDPLQPELDSFKEELDKYFKNHTSPDVDLGDISGINASVVNIQKEIDRLNEVAKNLNESLIDLQELGKYEQYIKGGSGYIPEAPRDGQAYVRKDGEWVLLSTFL

SEQ ID NO: 5687 - protein, 1241 aa, Artificial Sequence; identical to SEQ ID NO: 84
  SARS-CoV-2/Iceland/247/2020__EPI_ISL_417575 spike protein (1-1211) Foldon construct

SEQ ID NO: 5688 - protein, 1241 aa, Artificial Sequence
  SARS-CoV-2/Iceland/238/2020__EPI_ISL_417566 spike protein (1-1211) Foldon construct
MFVFLVLLPLVSSQCVNLTTRTQLPPAYTNSFTRGVYYPDKVFRSSVLHSTQDLFLPFFSNVTWFHAIHVSGTNGTKRFDNPVLPFNDGVYFASTEKSNIIRGWIFGTTLDSKTQSLLIVNNATNVVIKVCEFQFCNDPFLGVYYHKNNKSWMESEFRVYSSANNCTFEYVSQPFLMDLEGKQGNFKNLREFVFKNIDGYFKIYSKHTPINLVRDLPQGFSALEPLVDLPIGINITRFQTLLALHRSYLTPGDSSSGWTAGAAAYYVGYLQPRTFLLKYNENGTITDAVDCALDPLSETKCTLKSFTVEKGIYQTSNFRVQPTESIVRFPNITNLCPFGEVFNATRFASVYAWNRKRISNCVADYSVLYNSASFSTFKCYGVSPTKLNDLCFTNVYADSFVIRGDEVRQIAPGQTGKIADYNYKLPDDFTGCVIAWNSNNLDSKVGGNYNYLYRLFRKSNLKPFERDISTEIYQAGSTPCNGVEGFNCYFPLQSYGFQPTNGVGYQPYRVVVLSFELLHAPATVCGPKKSTNLVKNKCVNFNFNGLTGTGVLTESNKKFLPFQQFGRDIADTTDAVRDPQTLEILDITPCSFGGVSVITPGTNTSNQVAVLYQGVNCTEVPVAIHADQLTPTWRVYSTGSNVFQTRAGCLIGAEHVNNSYECDIPIGAGICASYQTQTNSPRRARSVASQSIIAYTMSLGAENSVAYSNNSIAIPTNFTISVTTEILPVSMTKTSVDCTMYICGDSTECSNLLLQYGSFCTQLNRALTGIAVEQDKNTQEVFAQVKQIYKTPPIKDFGGFNFSQILPDPSKPSKRSFIEDLLFNKVTLADVGFIKQYGDCLGDIAARDLICAQKFNGLTVLPPLLTDEMIAQYTSALLAGTITSGWTFGAGAALQIPFAMQMAYRFNGIGVTQNVLYENQKLIANQFNSAIGKIQDSLSSTASALGKLQDVVNQNAQALNTLVKQLSSNFGAISSVLNDILSRLDKVEAEVQIDRLITGRLQSLQTYVTQQLIRAAEIRASANLAATKMSECVLGQSKRVDFCGKGYHLMSFPQSAPHGVVFLHVTYVPAQEKNFTTAPAICHDGKAHFPREGVFVSNGTHWFVTQRNFYEPQIITTDNTFVSGNCDVVIGIVNNTVYDPLQPELDSFKEELDKYFKNHTSPDVDLGDISGINASVVNIQKEIDRLNEVAKNLNESLIDLQELGKYEQYIKGGSGYIPEAPRDGQAYVRKDGEWVLLSTFL

SEQ ID NO: 5689 - protein, 1241 aa, Artificial Sequence
  SARS-CoV-2/Greece/16/2020__EPI_ISL_418265 spike protein (1-1211) Foldon construct
MFVFLVLLPLVSSQCVNLTTRTQLPPAYTNSFTRGVYYPDKVFRSSVLHSTQDLFLPFFSNVTWFHAIHVSGTNGTKRFDNPVLPFNDGVYFASTEKSNIIRGWIFGTTLDSKTQSLLIVNNATNVVIKVCEFQFCNDPFLGVYYHKNNKSWMESEFRVYSSANNCTFEYVSQPFLMDLEGKQGNFKNLREFVFKNVDGYFKIYSKHTPINLVRDLPQGFSALEPLVDLPIGINITRFQTLLALHRSYLTPGDSSSGWTAGAAAYYVGYLQPRTFLLKYNENGTITDAVDCALDPLSETKCTLKSFTVEKGIYQTSNFRVQPTESIVRFPNITNLCPFGEVFNATRFASVYAWNRKRISNCVADYSVLYNSASFSTFKCYGVSPTKLNDLCFTNVYADSFVIRGDEVRQIAPGQTGKIADYNYKLPDDFTGCVIAWNSNNLDSKVGGNYNYLYRLFRKSNLKPFERDISTEIYQAGSTPCNGVEGFNCYFPLQSYGFQPTNGVGYQPYRVVVLSFELLHAPATVCGPKKSTNLVKNKCVNFNFNGLTGTGVLTESNKKFLPFQQFGRDIADTTDAVRDPQTLEILDITPCSFGGVSVITPGTNTSNQVAVLYQDVNCTEVPVAIHADQLTPTWRVYSTGSNVFQTRAGCLIGAEHVNNSYECDIPIGAGICASYQTQTNSPRRARSVASQSIIAYTMSLGAENSVAYSNNSIAIPTNFTISVTTEILPVSMTKTSVDCTMYICGDSTECSNLLLQYGSFCTQLNRALTGIAVEQDKNTQEVFAQVKQIYKTPPIKDFGGFNFSQILPDPSKPSKRSFIEDLLFNKVTLADAGFIKQYGDCLGDIAARDLICAQKFNGLTVLPPLLTDEMIAQYTSALLAGTITSGWTFGAGAALQIPFAMQMAYRFNGIGVTQNVLYENQKLIANQFNSAIGKIQDSLSSTASALGKLQDVVNQNAQALNTLVKQLSSNFGAISSVLNDILSRLDKVEAEVQIDRLITGRLQSLQTYVTQQLIRAAEIRASANLAATKMSECVLGQSKRVDFCGKGYHLMSFPQSAPHGVVFLHVTYVPAQEKNFTTAPAICHDGKAHFPREGVFVSNGTHWFVTQRNFYEPQIITTDNTFVSGNCDVVIGIVNNTVYDPLQPELDSFKEELDKYFKNHTSPDVDLGDISGINASVVNIQKEIDRLNEVAKNLNESLIDLQELGKYEQYIKGGSGYIPEAPRDGQAYVRKDGEWVLLSTFL

SEQ ID NO: 5690 - protein, 1241 aa, Artificial Sequence
  SARS-CoV-2/Iceland/319/2020__EPI_ISL_417648 spike protein (1-1211) Foldon construct
MFVFLVLLPLVSSQCVNLTTRTQLPPAYTNSFTRGVYYPDKVFRSSVLHSTQDLFLPFFSNVTWFHAIHVSGTNGTKRFDNPVLPFNDGVYFASTEKSNIIRGWIFGTTLDSKTQSLLIVNNATNVVIKVCEFQFCNDPFLGVYYHKNNKSWMESEFRVYSSANNCTFEYVSQPFLIDLEGKQGNFKNLREFVFKNIDGYFKIYSKHTPINLVRDLPQGFSALEPLVDLPIGINITRFQTLLALHRSYLTPGDSSSGWTAGAAAYYVGYLQPRTFLLKYNENGTITDAVDCALDPLSETKCTLKSFTVEKGIYQTSNFRVQPTESIVRFPNITNLCPFGEVFNATRFASVYAWNRKRISNCVADYSVLYNSASFSTFKCYGVSPTKLNDLCFTNVYADSFVIRGDEVRQIAPGQTGKIADYNYKLPDDFTGCVIAWNSNNLDSKVGGNYNYLYRLFRKSNLKPFERDISTEIYQAGSTPCNGVEGFNCYFPLQSYGFQPTNGVGYQPYRVVVLSFELLHAPATVCGPKKSTNLVKNKCVNFNFNGLTGTGVLTESNKKFLPFQQFGRDIADTTDAVRDPQTLEILDITPCSFGGVSVITPGTNTSNQVAVLYQGVNCTEVPVAIHADQLTPTWRVYSTGSNVFQTRAGCLIGAEHVNNSYECDIPIGAGICASYQTQTNSPRRARSVASQSIIAYTMSLGAENSVAYSNNSIAIPTNFTISVTTEILPVSMTKTSVDCTMYICGDSTECSNLLLQYGSFCTQLNRALTGIAVEQDKNTQEVFAQVKQIYKTPPIKDFGGFNFSQILPDPSKPSKRSFIEDLLFNKVTLADAGFIKQYGDCLGDIAARDLICAQKFNGLTVLPPLLTDEMIAQYTSALLAGTITSGWTFGAGAALQIPFAMQMAYRFNGIGVTQNVLYENQKLIANQFNSAIGKIQDSLSSTASALGKLQDVVNQNAQALNTLVKQLSSNFGAISSVLNDILSRLDKVEAEVQIDRLITGRLQSLQTYVTQQLIRAAEIRASANLAATKMSECVLGQSKRVDFCGKGYHLMSFPQSAPHGVVFLHVTYVPAQEKNFTTAPAICHDGKAHFPREGVFVSNGTHWFVTQRNFYEPQIITTDNTFVSGNCDVVIGIVNNTVYDPLQPELDSFKEELDKYFKNHTSPDVDLGDISGINASVVNIQKEIDRLNEVAKNLNESLIDLQELGKYEQYIKGGSGYIPEAPRDGQAYVRKDGEWVLLSTFL

SEQ ID NO: 5691 - protein, 1241 aa, Artificial Sequence
  SARS-CoV-2/Congo/94/2020__EPI_ISL_417947 spike protein (1-1211) Foldon construct
MFVFLVLLPLVSSQCVNLTTRTQLPPAYTNSFTRGVYYPDKVFRSSVLHSTQDLFLPFFSNVTWFHAIHVSGTNGTKRFDNPVLPFNDGVYFASTEKSNIIRGWIFGTTLDSKTQSLLIVNNATNVVIKVCEFQFCNDPFLGVYYHKNNKSWMESEFRVYSSANNCTFEYVSQPFLMDLEGKQGNFKNLREFVFKNIDGYFKIYSKHTPINLVRDLPQGFSALEPLVDLPIGINITRFQTLLALHRSYLTPGDSSSGWTAGAAAYYVGYLQPRTFLLKYNENGTITDAVDCALDPLSETKCTLKSFTVEKGIYQTSNFRVQPTESIVRFPNITNLCPFGEVFNATRFASVYAWNRKRISNCVADYSVLYNSASFSTFKCYGVSPTKLNDLCFTNVYADSFVIRGDEVRQIAPGQTGKIADYNYKLPDDFTGCVIAWNSNNLDSKVGGNYNYLYRLFRKSNLKPFERDISTEIYQAGSTPCNGVEGFNCYFPLQSYGFQPTNGVGYQPYRVVVLSFELLHAPATVCGPKKSTNLVKNKCVNFNFNGLTGTGVLTESNKKFLPFQQFGRDIADTTDAVRDPQTLEILDITPCSFGGVSVITPGTNTSNQVAVLYQGVNCTEVPVAIHADQLTPTWRVYSTGSNVFQTRAGCLIGAEHVNNSYECDIPIGAGICASYQTQTNSPRRARSVASQSIIAYTMSLGAENSVAYSNNSIAIPTNFTISVTTEILPVSMTKTSVDCTMYICGDSTECSNLLLQYGSFCTQLNRALTGIAVEQDKNTQEVFAQVKQIYKTPPIKDFGGFNFSQILPDPSKPSKRSFIEDILFNKVTLADAGFIKQYGDCLGDIAARDLICAQKFNGLTVLPPLLTDEMIAQYTSALLAGTITSGWTFGAGAALQIPFAMQMAYRFNGIGVTQNVLYENQKLIANQFNSAIGKIQDSLSSTASALGKLQDVVNQNAQALNTLVKQLSSNFGAISSVLNDILSRLDKVEAEVQIDRLITGRLQSLQTYVTQQLIRAAEIRASANLAATKMSECVLGQSKRVDFCGKGYHLMSFPQSAPHGVVFLHVTYVPAQEKNFTTAPAICHDGKAHFPREGVFVSNGTHWFVTQRNFYEPQIITTDNTFVSGNCDVVIGIVNNTVYDPLQPELDSFKEELDKYFKNHTSPDVDLGDISGINASVVNIQKEIDRLNEVAKNLNESLIDLQELGKYEQYIKGGSGYIPEAPRDGQAYVRKDGEWVLLSTFL

SEQ ID NO: 5692 - protein, 1241 aa, Artificial Sequence
  SARS-CoV-2/Congo/158/2020__EPI_ISL_417950 spike protein (1-1211) Foldon construct
MFVFLVLLPLVSSQCVNLTTRTQLPPAYTNSFTRGVYYPDKVFRSSVLHSTQDLFLPFFSNVTWFHAIHVSGTNGTKRFDNPVLPFNDGVYFASTEKSNIIRGWIFGTTLDSKTQSLLIVNNATNVVIKVCEFQFCNDPFLGVYYHKNNKSWMESEFRVYSSANNCTFEYVSQPFLMDLEGKQGNFKNLREFVFKNIDGYFKIYSKHTPINLVRDLPQGFSALEPLVDLPIGINITRFQTLLALHRSYLTPGDSSSGWTAGAAAYYVGYLQPRTFLLKYNENGTITDAVDCALDPLSETKCTLKSFTVEKGIYQTSNFRVQPTESIVRFPNITNLCPFGEVFNATRFASVYAWNRKRISNCVADYSVLYNSASFSTFKCYGVSPTKLNDLCFTNVYADSFVIRGDEVRQIAPGQTGKIADYNYKLPDDFTGCVIAWNSNNLDSKVGGNYNYLYRLFRKSNLKPFERDISTEIYQAGSTPCNGVEGFNCYFPLQSYGFQPTNGVGYQPYRVVVLSFELLHAPATVCGPKKSTNLVKNKCVNFNFNGLTGTGVLTESNKKFLPFQQFGRDIADTTDAVRDPQTLEILDITPCSFGGVSVITPGTNTSNQVAVLYQDVNCTEVPVAIHADQLTPTWRVYSTGSNVFQTRAGCLIGAEHVNNSYECDIPIGAGICASYQTQTNSPRRARSVASQSIIAYTMSLGAENSVAYSNNSIAIPTNFTISVTTEILPVSMTKTSVDCTMYICGDSTECSNLLLQYGSFCTQLNRALTGIAVEQDKNTQEVFAQVKQIYKTPPIKDFGGFNFSQILPDPSKPSKRSFIEDLLFNKVTLADAGFIKQYGDCLGDIAARDLICAQKFNGLTVLPPLLTDEMIAQYTSALLAGTITSGWTFGAGAALQIPFAMQMAYRFNGIGVTQNVLYENQKLIANQFNSAIGKIQDSLSSTASALGKLQDVVNQNAQALNTLVKQLSSNFGAISSVLNDILSRLDKVEAEVQIDRLITGRLQSLQTYVTQQLIRAAEIRASANLAATKMSECVLGQSKRVDFCGKGYHLMSFPQSAPHGVVFLHVTYVPAQEKNFTTAPAICHDGKAHFPREGVFVSNGTHWFVTQRNFYEPQIITTDNTFLSGNCDVVIGIVNNTVYDPLQPELDSFKEELDKYFKNHTSPDVDLGDISGINASVVNIQKEIDRLNEVAKNLNESLIDLQELGKYEQYIKGGSGYIPEAPRDGQAYVRKDGEWVLLSTFL

SEQ ID NO: 5693 - protein, 1241 aa, Artificial Sequence
  SARS-CoV-2/USA/UT-00034/2020__EPI_ISL_417977 spike protein (1-1211) Foldon construct
MFVFLVLLPLVSSQCVNLTTRTQLPPAYTNSFTRGVYYPDKVFRSSVLHSTQDLFLPFFSNVTWFHAIHVSGTNGTKRFDNPVLPFNDGVYFASTEKSNIIRGWIFGTTLDSKTQSLLIVNNATNVVIKVCEFQFCNDPFLGVYYYKNNKSWMESEFRVYSSANNCTFEYVSQPFLMDLEGKQGNFKNLREFVFKNIDGYFKIYSKHTPINLVRDLPQGFSALEPLVDLPIGINITRFQTLLALHRSYLTPGDSSSGWTAGAAAYYVGYLQPRTFLLKYNENGTITDAVDCALDPLSETKCTLKSFTVEKGIYQTSNFRVQPTESIVRFPNITNLCPFGEVFNATRFASVYAWNRKRISNCVADYSVLYNSASFSTFKCYGVSPTKLNDLCFTNVYADSFVIRGDEVRQIAPGQTGKIADYNYKLPDDFTGCVIAWNSNNLDSKVGGNYNYLYRLFRKSNLKPFERDISTEIYQAGSTPCNGVEGFNCYFPLQSYGFQPTNGVGYQPYRVVVLSFELLHAPATVCGPKKSTNLVKNKCVNFNFNGLTGTGVLTESNKKFLPFQQFGRDIADTTDAVRDPQTLEILDITPCSFGGVSVITPGTNTSNQVAVLYQGVNCTEVPVAIHADQLTPTWRVYSTGSNVFQTRAGCLIGAEHVNNSYECDIPIGAGICASYQTQTNSPRRARSVASQSIIAYTMSLGAENSVAYSNNSIAIPTNFTISVTTEILPVSMTKTSVDCTMYICGDSTECSNLLLQYGSFCTQLNRALTGIAVEQDKNTQEVFAQVKQIYKTPPIKDFGGFNFSQILPDPSKPSKRSFIEDLLFNKVTLADAGFIKQYGDCLGDIAARDLICAQKFNGLTVLPPLLTDEMIAQYTSALLAGTITSGWTFGAGAALQIPFAMQMAYRFNGIGVTQNVLYENQKLIANQFNSAIGKIQDSLSSTASALGKLQDVVNQNAQALNTLVKQLSSNFGAISSVLNDILSRLDKVEAEVQIDRLITGRLQSLQTYVTQQLIRAAEIRASANLAATKMSECVLGQSKRVDFCGKGYHLMSFPQSAPHGVVFLHVTYVPAQEKNFTTAPAICHDGKAHFPREGVFVSNGTHWFVTQRNFYEPQIITTDNTFVSGNCDVVIGIVNNTVYDPLQPELDSFKEELDKYFKNHTSPDVDLGDISGINASVVNIQKEIDRLNEVAKNLNESLIDLQELGKYEQYIKGGSGYIPEAPRDGQAYVRKDGEWVLLSTFL

SEQ ID NO: 5694 - protein, 1241 aa, Artificial Sequence
  SARS-CoV-2/USA/UT-00033/2020__EPI_ISL_417976 spike protein (1-1211) Foldon construct
MFVFLVLLPLVSSQCVNLTTRTQLPPAYTNSFTRGVYYPDKVFRSSVLHSTQDLFLPFFSNVTWFHAIHVSGTNGTKRFDNPVLPFNDGVYFASTEKSNIIRGWIFGTTLDSKTQSLLIVNNATNVVIKVCEFQFCNDPFLGVYYHKNNKSWMESEFRVYSSANNCTFEYVSQPFLMDLEGKQGNFKNLREFVFKNIDGYFKIYSKHTPINLVRDLPQGFSALEPLVDLPIGINITRFQTLLALHRSYLTPGDSSSGLTAGAAAYYVGYLQPRTFLLKYNENGTITDAVDCALDPLSETKCTLKSFTVEKGIYQTSNFRVQPTESIVRFPNITNLCPFGEVFNATRFASVYAWNRKRISNCVADYSVLYNSASFSTFKCYGVSPTKLNDLCFTNVYADSFVIRGDEVRQIAPGQTGKIADYNYKLPDDFTGCVIAWNSNNLDSKVGGNYNYLYRLFRKSNLKPFERDISTEIYQAGSTPCNGVEGFNCYFPLQSYGFQPTNGVGYQPYRVVVLSFELLHAPATVCGPKKSTNLVKNKCVNFNFNGLTGTGVLTESNKKFLPFQQFGRDIADTTDAVRDPQTLEILDITPCSFGGVSVITPGTNTSNQVAVLYQGVNCTEVPVAIHADQLTPTWRVYSTGSNVFQTRAGCLIGAEHVNNSYECDIPIGAGICASYQTQTNSPRRARSVASQSIIAYTMSLGAENSVAYSNNSIAIPTNFTISVTTEILPVSMTKTSVDCTMYICGDSTECSNLLLQYGSFCTQLNRALTGIAVEQDKNTQEVFAQVKQIYKTPPIKDFGGFNFSQILPDPSKPSKRSFIEDLLFNKVTLADAGFIKQYGDCLGDIAARDLICAQKFNGLTVLPPLLTDEMIAQYTSALLAGTITSGWTFGAGAALQIPFAMQMAYRFNGIGVTQNVLYENQKLIANQFNSAIGKIQDSLSSTASALGKLQDVVNQNAQALNTLVKQLSSNFGAISSVLNDILSRLDKVEAEVQIDRLITGRLQSLQTYVTQQLIRAAEIRASANLAATKMSECVLGQSKRVDFCGKGYHLMSFPQSAPHGVVFLHVTYVPAQEKNFTTAPAICHDGKAHFPREGVFVSNGTHWFVTQRNFYEPQIITTDNTFVSGNCDVVIGIVNNTVYDPLQPELDSFKEELDKYFKNHTSPDVDLGDISGINASVVNIQKEIDRLNEVAKNLNESLIDLQELGKYEQYIKGGSGYIPEAPRDGQAYVRKDGEWVLLSTFL

SEQ ID NO: 5695 - protein, 1241 aa, Artificial Sequence
  SARS-CoV-2/USA/WI-13/2020__EPI_ISL_417516 spike protein (1-1211) Foldon construct
MFVFLVLLPLVSSQCVNLTTRTQLPPAYTNSFTRGVYYPDKVFRSSVLHSTQDLFLPFFSNVTWFHAIHVSGTNGTKRFDNPVLPFNDGVYFASTEKSNIIRGWIFGTTLDSKTQSLLIVNNATNVVIKVCEFQFCNDPFLGVYYHKNNKSWMESEFRVYSSANNCTFEYVSQPFLMDLEGKQGNFKNLREFVFKNIDGYFKIYSKHTPINLVRDLPQGFSALEPLVDLPIGINITRFQTLLALHRSYLTPGDSSSGWTAGAAAYYVGYLQPRTFLLKYNENGTITDAVDCALDPLSETKCTLKSFTVEKGIYQTSNFRVLPTESIVRFPNITNLCPFGEVFNATRFASVYAWNRKRISNCVADYSVLYNSASFSTFKCYGVSPTKLNDLCFTNVYADSFVIRGDEVRQIAPGQTGKIADYNYKLPDDFTGCVIAWNSNNLDSKVGGNYNYLYRLFRKSNLKPFERDISTEIYQAGSTPCNGVEGFNCYFPLQSYGFQPTNGVGYQPYRVVVLSFELLHAPATVCGPKKSTNLVKNKCVNFNFNGLTGTGVLTESNKKFLPFQQFGRDIADTTDAVRDPQTLEILDITPCSFGGVSVITPGTNTSNQVAVLYQGVNCTEVPVAIHADQLTPTWRVYSTGSNVFQTRAGCLIGAEHVNNSYECDIPIGAGICASYQTQTNSPRRARSVASQSIIAYTMSLGAENSVAYSNNSIAIPTNFTISVTTEILPVSMTKTSVDCTMYICGDSTECSNLLLQYGSFCTQLNRALTGIAVEQDKNTQEVFAQVKQIYKTPPIKDFGGFNFSQILPDPSKPSKRSFIEDLLFNKVTLADAGFIKQYGDCLGDIAARDLICAQKFNGLTVLPPLLTDEMIAQYTSALLAGTITSGWTFGAGAALQIPFAMQMAYRFNGIGVTQNVLYENQKLIANQFNSAIGKIQDSLSSTASALGKLQDVVNQNAQALNTLVKQLSSNFGAISSVLNDILSRLDKVEAEVQIDRLITGRLQSLQTYVTQQLIRAAEIRASANLAATKMSECVLGQSKRVDFCGKGYHLMSFPQSAPHGVVFLHVTYVPAQEKNFTTAPAICHDGKAHFPREGVFVSNGTHWFVTQRNFYEPQIITTDNTFVSGNCDVVIGIVNNTVYDPLQPELDSFKEELDKYFKNHTSPDVDLGDISGINASVVNIQKEIDRLNEVAKNLNESLIDLQELGKYEQYIKGGSGYIPEAPRDGQAYVRKDGEWVLLSTFL

SEQ ID NO: 5696 - protein, 1240 aa, Artificial Sequence
  SARS-CoV-2/India/1-27/2020__EPI_ISL_413522 spike protein (1-1210) Foldon construct
MFVFLVLLPLVSSQCVNLTTRTQLPPAYTNSFTRGVYYPDKVFRSSVLHSTQDLFLPFFSNVTWFHAIHVSGTNGTKRFDNPVLPFNDGVYFASTEKSNIIRGWIFGTTLDSKTQSLLIVNNATNVVIKVCEFQFCNDPFLGVYHKNNKSWMESEFRVYSSANNCTFEYVSQPFLMDLEGKQGNFKNLREFVFKNIDGYFKIYSKHTPINLVRDLPQGFSALEPLVDLPIGINITRFQTLLALHRSYLTPGDSSSGWTAGAAAYYVGYLQPRTFLLKYNENGTITDAVDCALDPLSETKCTLKSFTVEKGIYQTSNFRVQPTESIVRFPNITNLCPFGEVFNATRFASVYAWNRKRISNCVADYSVLYNSASFSTFKCYGVSPTKLNDLCFTNVYADSFVIRGDEVIQIAPGQTGKIADYNYKLPDDFTGCVIAWNSNNLDSKVGGNYNYLYRLFRKSNLKPFERDISTEIYQAGSTPCNGVEGFNCYFPLQSYGFQPTNGVGYQPYRVVVLSFELLHAPATVCGPKKSTNLVKNKCVNFNFNGLTGTGVLTESNKKFLPFQQFGRDIADTTDAVRDPQTLEILDITPCSFGGVSVITPGTNTSNQVAVLYQDVNCTEVPVAIHADQLTPTWRVYSTGSNVFQTRAGCLIGAEHVNNSYECDIPIGAGICASYQTQTNSPRRARSVASQSIIAYTMSLGAENSVAYSNNSIAIPTNFTISVTTEILPVSMTKTSVDCTMYICGDSTECSNLLLQYGSFCTQLNRALTGIAVEQDKNTQEVFAQVKQIYKTPPIKDFGGFNFSQILPDPSKPSKRSFIEDLLFNKVTLADAGFIKQYGDCLGDIAARDLICAQKFNGLTVLPPLLTDEMIAQYTSALLAGTITSGWTFGAGAALQIPFAMQMAYRFNGIGVTQNVLYENQKLIANQFNSAIGKIQDSLSSTASALGKLQDVVNQNAQALNTLVKQLSSNFGAISSVLNDILSRLDKVEAEVQIDRLITGRLQSLQTYVTQQLIRAAEIRASANLAATKMSECVLGQSKRVDFCGKGYHLMSFPQSAPHGVVFLHVTYVPAQEKNFTTAPAICHDGKAHFPREGVFVSNGTHWFVTQRNFYEPQIITTDNTFVSGNCDVVIGIVNNTVYDPLQPELDSFKEELDKYFKNHTSPDVDLGDISGINASVVNIQKEIDRLNEVAKNLNESLIDLQELGKYEQYIKGGSGYIPEAPRDGQAYVRKDGEWVLLSTFL

SEQ ID NO: 5697 - protein, 1235 aa, Artificial Sequence
  SARS-CoV-2/pangolin/Guangxi/P4L/2017__EPI_ISL_410538 spike protein (1-1205) Foldon construct
MFVFLFVLPLVSSQCVNLTTRTGIPPGYTNSSTRGVYYPDKVFRSSILHLTQDLFLPFFSNVTWFNTINYQGGFKKFDNPVLPFNDGVYFASTEKSNIIRGWIFGTTLDARTQSLLIVNNATNVVIKVCEFQFCTDPFLGVYYHNNNKTWVENEFRVYSSANNCTFEYISQPFLMDLEGKQGNFKNLREFVFKNVDGYFKIYSKHTPIDLVRDLPRGFAALEPLVDLPIGINITRFQTLLALHRSYLTPGNLESGWTTGAAAYYVGYLQQRTFLLSYNQNGTITDAVDCSLDPLSETKCTLKSLTVEKGIYQTSNFRVQPTISIVRFPNITNLCPFGEVFNASKFASVYAWNRKRISNCVADYSVLYNSTSFSTFKCYGVSPTKLNDLCFTNVYADSFVVKGDEVRQIAPGQTGVIADYNYKLPDDFTGCVIAWNSVKQDALTGGNYGYLYRLFRKSKLKPFERDISTEIYQAGSTPCNGQVGLNCYYPLERYGFHPTTGVNYQPFRVVVLSFELLNGPATVCGPKLSTTLVKDKCVNFNFNGLTGTGVLTTSKKQFLPFQQFGRDISDTTDAVRDPQTLEILDITPCSFGGVSVITPGTNTSNQVAVLYQDVNCTEVPMAIHAEQLTPAWRVYSAGANVFQTRAGCLVGAEHVNNSYECDIPVGAGICASYHSMSSLRSVNQRSIIAYTMSLGAENSVAYSNNSIAIPTNFTISVTTEILPVSMTKTSVDCTMYICGDSIECSNLLLQYGSFCTQLNRALTGIAVEQDKNTQEVFAQVKQIYKTPPIKDFGGFNFSQILPDPSKPSKRSFIEDLLFNKVTLADAGFIKQYGDCLGDIAARDLICAQKFNGLTVLPPLLTDEMIAQYTSALLAGTITSGWTFGAGAALQIPFAMQMAYRFNGIGVTQNVLYENQKLIANQFNSAIGKIQDSLSSTASALGKLQDVVNQNAQALNTLVKQLSSNFGAISSVLNDILSRLDKVEAEVQIDRLITGRLQSLQTYVTQQLIRAAEIRASANLAATKMSECVLGQSKRVDFCGKGYHLMSFPQSAPHGVVFLHVTYVPAQEKNFTTAPAICHEGKAHFPREGVFVSNGTHWFITQRNFYEPQIITTDNTFVSGSCDVVIGIVNNTVYDPLQPELDSFKEELDKYFKNHTSPDVDLGDISGINASVVNIQKEIDRLNEVAKNLNESPIDLQELGKYEQYIKGGSGYIPEAPRDGQAYVRKDGEWVLLSTFL

SEQ ID NO: 5698 - protein, 1235 aa, Artificial Sequence
  SARS-CoV-2/pangolin/Guangxi/P5L/2017__EPI_ISL_410540 spike protein (1-1205) Foldon construct
MFVFLFVLPLVSSQCVNLTTRTGIPPGYTNSSTRGVYYPDKVFRSSILHLTQDLFLPFFSNVTWFNTINYQGGFKKFDNPVLPFNDGVYFASTEKSNIIRGWIFGTTLDARTQSLLIVNNATNVVIKVCEFQFCTDPFLGVYYHNNNKTWVENEFRVYSSANNCTFEYISQPFLMDLEGKQGNFKNLREFVFKNVDGYFKIYSKHTPIDLVRDLPRGFAALEPLVDLPIGINITRFQTLLALHRSYLTPGKLESGWTTGAAAYYVGYLQQRTFLLSYNQNGTITDAVDCSLDPLSETKCTLKSLTVEKGIYQTSNFRVQPTISIVRFPNITNLCPFGEVFNASKFASVYAWNRKRISNCVADYSVLYNSTSFSTFKCYGVSPTKLNDLCFTNVYADSFVVKGDEVRQIAPGQTGVIADYNYKLPDDFTGCVIAWNSVKQDALTGGNYGYLYRLFRKSKLKPFERDISTEIYQAGSTPCNGQVGLNCYYPLERYGFHPTTGVNYQPFRVVVLSFELLNGPATVCGPKLSTTLVKDKCVNFNFNGLTGTGVLTTSKKQFLPFQQFGRDISDTTDAVRDPQTLEILDITPCSFGGVSVITPGTNTSNQVAVLYQDVNCTEVPMAIHAEQLTPAWRVYSAGANVFQTRAGCLVGAEHVNNSYECDIPVGAGICASYHSMSSFRSVNQRSIIAYTMSLGAENSVAYSNNSIAIPTNFTISVTTEILPVSMTKTSVDCTMYICGDSIECSNLLLQYGSFCTQLNRALTGIAVEQDKNTQEVFAQVKQIYKTPPIKDFGGFNFSQILPDPSKPSKRSFIEDLLFNKVTLADAGFIKQYGDCLGDIAARDLICAQKFNGLTVLPPLLTDEMIAQYTSALLAGTITSGWTFGAGAALQIPFAMQMAYRFNGIGVTQNVLYENQKLIANQFNSAIGKIQDSLSSTASALGKLQDVVNQNAQALNTLVKQLSSNFGAISSVLNDILSRLDKVEAEVQIDRLITGRLQSLQTYVTQQLIRAAEIRASANLAATKMSECVLGQSKRVDFCGKGYHLMSFPQSAPHGVVFLHVTYVPAQEKNFTTAPAICHEGKAHFPREGVFVSNGTHWFITQRNFYEPQIITTDNTFVSGSCDVVIGIVNNTVYDPLQPELDSFKEELDKYFKNHTSPDVDLGDISGINASVVNIQKEIDRLNEVAKNLNESLIDLQELGKYEQYIKGGSGYIPEAPRDGQAYVRKDGEWVLLSTFL

SEQ ID NO: 5699 - protein, 1235 aa, Artificial Sequence
  SARS-CoV-2/pangolin/Guangxi/P5E/2017__EPI_ISL_410541 spike protein (1-1205) Foldon construct
MFVFLFVLPLVSSQCVNLTTRTGIPPGYTNSSTRGVYYPDKVFRSSILHLTQDLFLPFFSNVTWFNTITYQGGSKKFDNPVLPFNDGVYFASTEKSNIIRGWIFGTTLDARTQSLLIVNNATNVVIKVCEFQFCTDPFLGVYYHNNNKTWVENEFRVYSSANNCTFEYISQPFLMDLEGKQGNFKNLREFVFKNVDGYFKIYSKHTPIDLVRDLPRGFAALEPLVDLPIGINITRFQTLLALHRSYLTPGKLESGWTTGAAAYYVGYLQQRTFLLSYNQNGTITDAVDCSLDPLSETKCTLKSLTVEKGIYQTSNFRVQPTISIVRFPNITNLCPFGEVFNASKFASVYAWNRKRISNCVADYSVLYNSTSFSTFKCYGVSPTKLNDLCFTNVYADSFVVKGDEVRQIAPGQTGVIADYNYKLPDDFTGCVIAWNSVKQDALTGDNYGYLYRLFRKSKLKPFERDISTEIYQAGSTPCNGQVGLNCYYPLERYGFHPTTGVNYQPFRVVVLSFELLNGPATVCGPKLSTTLVKDKCVNFNFNGLTGTGVLTTSKKQFLPFQQFGRDISDTTDAVRDPQTLEILDITPCSFGGVSVITPGTNTSNQVAVLYQDVNCTEVPMAIHAEQLTPAWRVYSAGANVFQTRAGCLVGAEHVNNSYECDIPVGAGICASYHSMSSFRSVNQRSIIAYTMSLGAENSVAYSNNSIAIPTNFTISVTTEILPVSMTKTSVDCTMYICGDSIECSNLLLQYGSFCTQLNRALTGIAVEQDKNTQEVFAQVKQIYKTPPIKDFGGFNFSQILPDPSKPSKRSFIEDLLFNKVTLADAGFIKQYGDCLGDIAARDLICAQKFNGLTVLPPLLTDEMIAQYTSALLAGTITSGWTFGAGAALQIPFAMQMAYRFNGIGVTQNVLYENQKLIANQFNSAIGKIQDSLSSTASALGKLQDVVNQNAQALNTLVKQLSSNFGAISSVLNDILSRLDKVEAEVQIDRLITGRLQSLQTYVTQQLIRAAEIRASANLAATKMSECVLGQSKRVDFCGKGYHLMSFPQSAPHGVVFLHVTYVPAQEKNFTTAPAICHEGKAHFPREGVFVSNGTHWFITQRNFYEPQIITTDNTFVSGSCDVVIGIVNNTVYDPLQPELDSFKEELDKYFKNHTSPDVDLGDISGINASVVNIQKEIDRLNEVAKNLNESLIDLQELGKYEQYIKGGSGYIPEAPRDGQAYVRKDGEWVLLSTFL

SEQ ID NO: 5700 - protein, 1233 aa, Artificial Sequence
  SARS-CoV-2/pangolin/Guangxi/P1E/2017__EPI_ISL_410539 spike protein (1-1203) Foldon construct
MFVFLFVLPLVSSQCVNLTTRTGIQPGYTNSSTRGVYYPDKVFRSSILHLTQDLFLPFFSNVTWFNTINYQGGFKKFDNPVLPFNDGVYFASTEKSNIIRGWIFGTTLDARTQSLLIVNNATNVVIKVCEFQFCTDPFLGVYYHNNNKTWVENEFRVYSSANNCTFEYISQPFLMDLEGKQGNFKNLREFVFKNVDGYFKIYSKHTPIDLVRDLPRGFAALEPLVDLPIGINITRFQTLLALHRSYLTPGKLESGWTTGAAAYYVGYLQQRTFLLSYNQNGTITDAVDCSLDPLSETKCTLKSLTVEKGIYQTSNFRVQPTISIVRFPNITNLCPFGEVFNASKFASVYAWNRKRISNCVADYSVLYNSTSFSTFKCYGVSPTKLNDLCFTNVYADSFVVKGDEVRQIAPGQTGVIADYNYKLPDDFTGCVIAWNSVKQDALTGGNYLYRLFRKSKLKPFERDISTEIYQAGSTPCNGQVGLNCYYPLERYGFHPTTGVNYQPFRVVVLSFELLNGPATVCGPKLSTTLVKDKCVNFNFNGLTGTGVLTTSKKQFLPFQQFGRDISDTTDAVRDPQTLEILDITPCSFGGVSVITPGTNTSNQVAVLYQDVNCTEVPMAIHAEQLTPAWRVYSAGANVFQTRAGCLVGAEHVNNSYECDIPVGAGICASYHSMSSLRSVNQRSIIAYTMSLGAENSVAYSNNSIAIPTNFTISVTTEILPVSMTKTSVDCTMYICGDSIECSNLLLQYGSFCTQLNRALTGIAVEQDKNTQEVFAQVKQIYKTPPIKDFGGFNFSQILPDPSKPSKRSFIEDLLFNKVTLADAGFIKQYGDCLGDIAARDLICAQKFNGLTVLPPLLTDEMIAQYTSALLAGTITSGWTFGAGAALQIPFAMQMAYRFNGIGVTQNVLYENQKLIANQFNSAIGKIQDSLSSTASALGKLQDVVNQNAQALNTLVKQLSSNFGAISSVLNDILSRLDKVEAEVQIDRLITGRLQSLQTYVTQQLIRAAEIRASANLAATKMSECVLGQSKRVDFCGKGYHLMSFPQSAPHGVVFLHVTYVPAQEKNFTTAPAICHEGKAHFPREGVFVSNGTHWFITQRNFYEPQIITTDNTFVSGSCDVVIGIVNNTVYDPLQPELDSFKEELDKYFKNHTSPDVDLGDISGINASVVNIQKEIDRLNEVAKNLNESLIDLQELGKYEQYIKGGSGYIPEAPRDGQAYVRKDGEWVLLSTFL

SEQ ID NO: 5701 - protein, 1241 aa, Artificial Sequence; identical to SEQ ID NO: 103
  SARS-CoV-2/Wuhan/WIV05/2019__EPI_ISL_402128 spike protein (1-1211)(K986P_V987P) Foldon construct

SEQ ID NO: 5702 - protein, 1237 aa, Artificial Sequence; identical to SEQ ID NO: 104
  SARS-CoV-2/bat/Yunnan/RaTG13/2013__EPI_ISL_402131 spike protein (1-1207)(K982P_V983P) Foldon construct

SEQ ID NO: 5703 - protein, 1241 aa, Artificial Sequence; identical to SEQ ID NO: 105
  SARS-CoV-2/Wuhan/HBCDC-HB-01/2019__EPI_ISL_402132 spike protein (1-1211)(K986P_V987P) Foldon construct

SEQ ID NO: 5704 - protein, 1241 aa, Artificial Sequence; identical to SEQ ID NO: 106
  SARS-CoV-2/Guangdong/20SF028/2020__EPI_ISL_403936 spike protein (1-1211)(K986P_V987P) Foldon construct

SEQ ID NO: 5705 - protein, 1241 aa, Artificial Sequence; identical to SEQ ID NO: 107
  SARS-CoV-2/Shenzhen/SZTH-001/2020__EPI_ISL_406592 spike protein (1-1211)(K986P_V987P) Foldon construct

SEQ ID NO: 5706 - protein, 1241 aa, Artificial Sequence; identical to SEQ ID NO: 108
  SARS-CoV-2/Shenzhen/SZTH-004/2020__EPI_ISL_406595 spike protein (1-1211)(K986P_V987P) Foldon construct

SEQ ID NO: 5707 - protein, 1241 aa, Artificial Sequence; identical to SEQ ID NO: 109
  SARS-CoV-2/France/IDF0372/2020__EPI_ISL_406596 spike protein (1-1211)(K986P_V987P) Foldon construct

SEQ ID NO: 5708 - protein, 1241 aa, Artificial Sequence; identical to SEQ ID NO: 110
  SARS-CoV-2/Australia/VIC01/2020__EPI_ISL_406844 spike protein (1-1211)(K986P_V987P) Foldon construct

SEQ ID NO: 5709 - protein, 1241 aa, Artificial Sequence; identical to SEQ ID NO: 111
  SARS-CoV-2/Germany/BavPat1/2020__EPI_ISL_406862 spike protein (1-1211)(K986P_V987P) Foldon construct

SEQ ID NO: 5710 - protein, 1241 aa, Artificial Sequence
  SARS-CoV-2/Wuhan/HBCDC-HB-02/2020__EPI_ISL_412978 spike protein (1-1211)(K986P_V987P) Foldon construct
MFVFLVLLPLVSSQCVNLTTRTQLPPAYTNSFTRGVYYPDKVFRSSVLHSTQDLFLPFFSNVTWFHAIHVSGTNGTKRFDNPVLPFNDGVYFASTEKSNIIRGWIFGTTLDSKTQSLLIVNNATNVVIKVCEFQFCNDPFLGVYYHKNNKSWMESEFRVYSSANNCTFEYVSQPFLMDLEGKQGNFKNLREFVFKNIDGYFKIYSKHTPINLVRDLPQGFSALEPLVDLPIGINITRFQTLLALHRSYLTPGDSSSGWTAGAAAYYVGYLQPRTFLLKYNENGTITDAVDCALDPLSETKCTLKSFTVEKGIYQTSNFRVQPTESIVRFPNITNLCPFGEVFNATRFASVYAWNRKRISNCVADYSVLYNSASFSTFKCYGVSPTKLNDLCFTNVYADSFVIRGDEVRQIAPGQTGKIADYNYKLPDDFTGCVIAWNSNNLDSKVGGNYNYLYRLFRKSNLKPFERDISTEIYQAGSTPCNGVEGFNCYFPLQSYGFQPTNGVGYQPYRVVVLSFELLHAPATVCGPKKSTNLVKNKCVNFNFNGLTGTGVLTESNKKFLPFQQFGRDIADTTDAVRDPQTLEILDITPCSFGGVSVITPGTNTSNQVAVLYQDVNCTEVPVAIHADQLTPTWRVYSTGSNVFQTRAGCLIGAEHVNNSYECDIPIGAGICASYQTQTNSPRRARSVASQSIIAYTMSLGAENSVAYSNNSIAIPTNFTISVTTEILPVSMTKTSVDCTMYICGDSTECSNFLLQYGSFCTQLNRALTGIAVEQDKNTQEVFAQVKQIYKTPPIKDFGGFNFSQILPDPSKPSKRSFIEDLLFNKVTLADAGFIKQYGDCLGDIAARDLICAQKFNGLTVLPPLLTDEMIAQYTSALLAGTITSGWTFGAGAALQIPFAMQMAYRFNGIGVTQNVLYENQKLIANQFNSAIGKIQDSLSSTASALGKLQDVVNQNAQALNTLVKQLSSNFGAISSVLNDILSRLDPPEAEVQIDRLITGRLQSLQTYVTQQLIRAAEIRASANLAATKMSECVLGQSKRVDFCGKGYHLMSFPQSAPHGVVFLHVTYVPAQEKNFTTAPAICHDGKAHFPREGVFVSNGTHWFVTQRNFYEPQIITTDNTFVSGNCDVVIGIVNNTVYDPLQPELDSFKEELDKYFKNHTSPDVDLGDISGINASVVNIQKEIDRLNEVAKNLNESLIDLQELGKYEQYIKGGSGYIPEAPRDGQAYVRKDGEWVLLSTFL

SEQ ID NO: 5711 - protein, 1241 aa, Artificial Sequence
  SARS-CoV-2/Australia/QLD02/2020__EPI_ISL_407896 spike protein (1-1211)(K986P_V987P) Foldon construct
MFVFLVLLPLVSSQCVNLTTRTQLPPAYTNSFTRGVYYPDKVFRSSVLHSTQDLFLPFFSNVTWFHAIHVSGTNGTKRFDNPVLPFNDGVYFASTEKSNIIRGWIFGTTLDSKTQSLLIVNNATNVVIKVCEFQFCNDPFLGVYYHKNNKSWMESEFRVYSSANNCTFEYVSQPFLMDLEGKQGNFKNLREFVFKNIDGYFKIYSKHTPINLVRDLPQGFSALEPLVDLPIGINITRFQTLLALHRSYLTPGDSSSGWTAGAAAYYVGYLQPRTFLLKYNENGTITDAVDCALDPLSETKCTLKSFTVEKGIYQTSNFRVQPTESIVRFPNITNLCPFGEVFNATRFASVYAWNRKRISNCVADYSVLYNSASFSTFKCYGVSPTKLNDLCFTNVYADSFVIRGDEVRQIAPGQTGKIADYNYKLPDDFTGCVIAWNSNNLDSKVGGNYNYLYRLFRKSNLKPFERDISTEIYQAGSTPCNGVEGFNCYFPLQSYGFQPTNGVGYQPYRVVVLSFELLHAPATVCGPKKSTNLVKNKCVNFNFNGLTGTGVLTESNKKFLPFQQFGRDIADTTDAVRDPQTLEILDITPCSFGGVSVITPGTNTSNQVAVLYQDVNCTEVPVAIHADQLTPTWRVYSTGSNVFQTRAGCLIGAEHVNNSYECDIPIGAGICASYQTQTNSPRRARSVASQSIIAYTMSLGAENSVAYSNNSIAIPTNFTISVTTEILPVSMTKTSVDCTMYICGDSTECSNLLLQYGSFCTQLNRALTGIAVEQDKNTQEVFAQVKQIYKTPPIKDFGGFNFSQILPDPSKPSKRSFIEDLLFNKVTLADAGFIKQYGDCLGDIAARDLICAQKFNGLTVLPPLLTDEMIAQYTSALLAGTITSGWTFGAGAALQIPFAMQMAYRFNGIGVTQNVLYENQKLIANQFNSAIGKIQDSLSSTASALGKLQDVVNQNAQALNTLVKQLSSNFGAISSVLNDILSRLDPPEAEVQIDRLITGRLQSLQTYVTQQLIRAAEIRASANLAATKMSECVLGQSKRVDFCGKGYHLMSFPQSAPHGVVFLHVTYVPAQEKNFTTAPAICHDGKAHFPREGVFVSNGTHWFVTQRNFYEPQIITTDNTFVSGNCDVVIGIVNNTVYDPLQLELDSFKEELDKYFKNHTSPDVDLGDISGINASVVNIQKEIDRLNEVAKNLNESLIDLQELGKYEQYIKGGSGYIPEAPRDGQAYVRKDGEWVLLSTFL

SEQ ID NO: 5712 - protein, 1241 aa, Artificial Sequence
  SARS-CoV-2/India/1-31/2020__EPI_ISL_413523 spike protein (1-1211)(K986P_V987P) Foldon construct
MFVFLVLLPLVSSQCVNLTTRTQLPPAYTNSFTRGVYYPDKVFRSSVLHSTQDLFLPFFSNVTWFHAIHVSGTNGTKRFDNPVLPFNDGVYFASTEKSNIIRGWIFGTTLDSKTQSLLIVNNATNVVIKVCEFQFCNDPFLGVYYHKNNKSWMESEFRVYSSANNCTFEYVSQPFLMDLEGKQGNFKNLREFVFKNIDGYFKIYSKHTPINLVRDLPQGFSALEPLVDLPIGINITRFQTLLALHRSYLTPGDSSSGWTAGAAAYYVGYLQPRTFLLKYNENGTITDAVDCALDPLSETKCTLKSFTVEKGIYQTSNFRVQPTESIVRFPNITNLCPFGEVFNATRFASVYAWNRKRISNCVADYSVLYNSASFSTFKCYGVSPTKLNDLCFTNVYADSFVIRGDEVRQIAPGQTGKIADYNYKLPDDFTGCVIAWNSNNLDSKVGGNYNYLYRLFRKSNLKPFERDISTEIYQAGSTPCNGVEGFNCYFPLQSYGFQPTNGVGYQPYRVVVLSFELLHAPATVCGPKKSTNLVKNKCVNFNFNGLTGTGVLTESNKKFLPFQQFGRDIADTTDAVRDPQTLEILDITPCSFGGVSVITPGTNTSNQVAVLYQDVNCTEVPVAIHADQLTPTWRVYSTGSNVFQTRAGCLIGAEHVNNSYECDIPIGAGICASYQTQTNSPRRARSVASQSIIAYTMSLGAENSVAYSNNSIAIPTNFTISVTTEILPVSMTKTSVDCTMYICGDSTECSNLLLQYGSFCTQLNRALTGIAVEQDKNTQEVFAQVKQIYKTPPIKDFGGFNFSQILPDPSKPSKRSFIEDLLFNKVTLADAGFIKQYGDCLGDIAARDLICAQKFNGLTVLPPLLTDEMIAQYTSALLAGTITSGWTFGAGAALQIPFAMQMAYRFNGIGVTQNVLYENQKLIANQFNSVIGKIQDSLSSTASALGKLQDVVNQNAQALNTLVKQLSSNFGAISSVLNDILSRLDPPEAEVQIDRLITGRLQSLQTYVTQQLIRAAEIRASANLAATKMSECVLGQSKRVDFCGKGYHLMSFPQSAPHGVVFLHVTYVPAQEKNFTTAPAICHDGKAHFPREGVFVSNGTHWFVTQRNFYEPQIITTDNTFVSGNCDVVIGIVNNTVYDPLQPELDSFKEELDKYFKNHTSPDVDLGDISGINASVVNIQKEIDRLNEVAKNLNESLIDLQELGKYEQYIKGGSGYIPEAPRDGQAYVRKDGEWVLLSTFL

SEQ ID NO: 5713 - protein, 1241 aa, Artificial Sequence
  SARS-CoV-2/Guangdong/GD2020087-P0008/2020__EPI_ISL_413863 spike protein (1-1211)(K986P_V987P) Foldon construct
MFVFLVLLPLVSSQCVNLTTRTQLPPAYTNSFTRGVYYPDKVFRSSVLHSTQDLFLPFFSNVTWFHAIHVSGTNGTKRFDNPVLPFNDGVYFASTEKSNIIRGWIFGTTLDSKTQSLLIVNNATNVVIKVCEFQFCNDPFLGVYYHKNNKSWMESEFRVYSSANNCTFEYVSQPFLMDLEGKQGNFKNLREFVFKNIDGYFKIYSKHTPINLVRDLPQGFSALEPLVDLPIGINITRFQTLLALHRSYLTPGDSSSGWTAGAAAYYVGYLQPRTFLLKYNENGTITDAVDCALDPLSETKCTLKSFTVEKGIYQTSNFRVQPTESIVRFPNITNLCPFGEVFNATRFASVYAWNRKRISNCVADYSVLYNSASFSTFKCYGVSPTKLNDLCFTNVYADSFVIRGDEVREIAPGQTGKIADYNYKLPDDFTGCVIAWNSNNLDSKVGGNYNYLYRLFRKSNLKPFERDISTEIYQAGSTPCNGVEGFNCYFPLQSYGFQPTNGVGYQPYRVVVLSFELLHAPATVCGPKKSTNLVKNKCVNFNFNGLTGTGVLTESNKKFLPFQQFGRDIADTTDAVRDPQTLEILDITPCSFGGVSVITPGTNTSNQVAVLYQDVNCTEVPVAIHADQLTPTWRVYSTGSNVFQTRAGCLIGAEHVNNSYECDIPIGAGICASYQTQTNSPRRARSVASQSIIAYTMSLGAENSVAYSNNSIAIPTNFTISVTTEILPVSMTKTSVDCTMYICGDSTECSNLLLQYGSFCTQLNRALTGIAVEQDKNTQEVFAQVKQIYKTPPIKDFGGFNFSQILPDPSKPSKRSFIEDLLFNKVTLADAGFIKQYGDCLGDIAARDLICAQKFNGLTVLPPLLTDEMIAQYTSALLAGTITSGWTFGAGAALQIPFAMQMAYRFNGIGVTQNVLYENQKLIANQFNSAIGKIQDSLSSTASALGKLQDVVNQNAQALNTLVKQLSSNFGAISSVLNDILSRLDPPEAEVQIDRLITGRLQSLQTYVTQQLIRAAEIRASANLAATKMSECVLGQSKRVDFCGKGYHLMSFPQSAPHGVVFLHVTYVPAQEKNFTTAPAICHDGKAHFPREGVFVSNGTHWFVTQRNFYEPQIITTDNTFVSGNCDVVIGIVNNTVYDPLQPELDSFKEELDKYFKNHTSPDVDLGDISGINASVVNIQKEIDRLNEVAKNLNESLIDLQELGKYEQYIKGGSGYIPEAPRDGQAYVRKDGEWVLLSTFL

SEQ ID NO: 5714 - protein, 1241 aa, Artificial Sequence
  SARS-CoV-2/Sweden/01/2020__EPI_ISL_411951 spike protein (1-1211)(K986P_V987P) Foldon construct
MFVFLVLLPLVSSQCVNLTTRTQLPPAYTNSFTRGVYYPDKVFRSSVLHSTQDLFLPFFSNVTWFHAIHVSGTNGTKRFDNPVLPFNDGVYFASTEKSNIIRGWIFGTTLDSKTQSLLIVNNATNVVIKVCEFQFCNDPFLGVYYHKNNKSWMESEFRVYSSANNCTFEYVSQPFLMDLEGKQGNFKNLREFVFKNIDGYFKIYSKHTPINLVRDLPQGFSALEPLVDLPIGINITRFQTLLALHRSYLTPGDSSSGWTAGAAAYYVGYLQPRTFLLKYNENGTITDAVDCALDPLSETKCTLKSFTVEKGIYQTSNFRVQPTESIVRFPNITNLCPFGEVFNATRFASVYAWNRKRISNCVADYSVLYNSASFSTFKCYGVSPTKLNDLCFTNVYADSFVIRGDEVRQIAPGQTGKIADYNYKLPDDFTGCVIAWNSNNLDSKVGGNYNYLYRLFRKSNLKPFERDISTEIYQAGSTPCNGVEGFNCYFPLQSYGFQPTNGVGYQPYRVVVLSFELLHAPATVCGPKKSTNLVKNKCVNFNFNGLTGTGVLTESNKKFLPFQQFGRDIADTTDAVRDPQTLEILDITPCSFGGVSVITPGTNTSNQVAVLYQDVNCTEVPVAIHADQLTPTWRVYSTGSNVFQTRAGCLIGAEHVNNSYECDIPIGAGICASYQTQTNSPRRARSVASQSIIAYTMSLGAENSVAYSNNSIAIPTNFTISVTTEILPVSMTKTSVDCTMYICGDSTECSNLLLQYGSFCTQLNRALTGIAVEQDKNTQEVFAQVKQIYKTPPIKDCGGFNFSQILPDPSKPSKRSFIEDLLFNKVTLADAGFIKQYGDCLGDIAARDLICAQKFNGLTVLPPLLTDEMIAQYTSALLAGTITSGWTFGAGAALQIPFAMQMAYRFNGIGVTQNVLYENQKLIANQFNSAIGKIQDSLSSTASALGKLQDVVNQNAQALNTLVKQLSSNFGAISSVLNDILSRLDPPEAEVQIDRLITGRLQSLQTYVTQQLIRAAEIRASANLAATKMSECVLGQSKRVDFCGKGYHLMSFPQSAPHGVVFLHVTYVPAQEKNFTTAPAICHDGKAHFPREGVFVSNGTHWFVTQRNFYEPQIITTDNTFVSGNCDVVIGIVNNTVYDPLQPELDSFKEELDKYFKNHTSPDVDLGDISGINASVVNIQKEIDRLNEVAKNLNESLIDLQELGKYEQYIKGGSGYIPEAPRDGQAYVRKDGEWVLLSTFL

SEQ ID NO: 5715 - protein, 1241 aa, Artificial Sequence
  SARS-CoV-2/Tianmen/HBCDC-HB-07/2020__EPI_ISL_412983 spike protein (1-1211)(K986P_V987P) Foldon construct
MFVFLVLLPLVSSQCVNLTTRTQLPPAYTNSFTRGVYYPDKVFRSSVLHSTQDLFLPFFSNVTWFHAIHVSGTNGTKRFDNPVLPFNDGVYFASTEKSNIIRGWIFGTTLDSKTQSLLIVNNATNVVIKVCEFQFCNDPFLGVYYHKNNKSWMESEFRVYSSANNCTFEYVSQPFLMDLEGKQGNFKNLREFVFKNIDGYFKIYSKHTPINLVRDLPQGFSALEPLVDLPIGINITRFQTLLALHRSYLTPGDSSSGWTAGAAAYYVGYLQPRTFLLKYNENGTITDAVDCALDPLSETKCTLKSFTVEKGIYQTSNFRVQPTESIVRFPNITNLCPFGEVFNATRFASVYAWNRKRISNCVADYSVLYNSASFSTFKCYGVSPTKLNDLCFTNVYADSFVIRGDEVRQIAPGQTGKIADYNYKLPDDFTGCVIAWNSNNLDSKVGGNYNYLYRLFRKSNLKPFERDISTEIYQAGSTPCNGVEGFNCYFPLQSYGFQPTNGVGYQPYRVVVLSFELLHAPATVCGPKKSTNLVKNKCVNFNFNGLTGTGVLTESNKKFLPFQQFGRDIADTTDAVRDPQTLEILDITPCSFGGVSVITPGTNTSNQVAVLYQDLNCTEVPVAIHADQLTPTWRVYSTGSNVFQTRAGCLIGAEHVNNSYECDIPIGAGICASYQTQTNSPRRARSVASQSIIAYTMSLGAENSVAYSNNSIAIPTNFTISVTTEILPVSMTKTSVDCTMYICGDSTECSNLLLQYGSFCTQLNRALTGIAVEQDKNTQEVFAQVKQIYKTPPIKDFGGFNFSQILPDPSKPSKRSFIEDLLFNKVTLADAGFIKQYGDCLGDIAARDLICAQKFNGLTVLPPLLTDEMIAQYTSALLAGTITSGWTFGAGAALQIPFAMQMAYRFNGIGVTQNVLYENQKLIANQFNSAIGKIQDSLSSTASALGKLQDVVNQNAQALNTLVKQLSSNFGAISSVLNDILSRLDPPEAEVQIDRLITGRLQSLQTYVTQQLIRAAEIRASANLAATKMSECVLGQSKRVDFCGKGYHLMSFPQSAPHGVVFLHVTYVPAQEKNFTTAPAICHDGKAHFPREGVFVSNGTHWFVTQRNFYEPQIITTDNTFVSGNCDVVIGIVNNTVYDPLQPELDSFKEELDKYFKNHTSPDVDLGDISGINASVVNIQKEIDRLNEVAKNLNESLIDLQELGKYEQYIKGGSGYIPEAPRDGQAYVRKDGEWVLLSTFL

SEQ ID NO: 5716 - protein, 1241 aa, Artificial Sequence
  SARS-CoV-2/Hong Kong/case42_VM20002493/2020__EPI_ISL_414527 spike protein (1-1211)(K986P_V987P) Foldon construct
MFVFLVLLPLVSSQCVNLTTRTQLPPAYTNSFTRGVYYPDKVFRSSVLHSTQDLFLPFFSNVTWFHAIHVSGTNGTKRFDNPVLPFNDGVYFASTEKSNIIRGWIFGTTLDSKTQSLLIVNNATNVVIKVCEFQFCNDPFLGVYYHKNNKSWMESEFRVYSSANNCTFEYVSQPFLMDLEGKQGNFKNLREFVFKNIDGYFKIYSKHTPINLVRDLPQGFSALEPLVDLPIGINITRFQTLLALHRSYLTPGDSSSGWTAGAAAYYVGYLQPRTFLLKYNENGTITDAVDCALDPLSETKCTLKSFTVEKGIYQTSNFRVQPTESIVRFPNITNLCPFGEVFNATRFASVYAWNRKRISNCVADYSVLYNSASFSTFKCYGVSPTKLNDLCFTNVYADSFVIRGDEVRQIAPGQTGKIADYNYKLPDDFTGCVIAWNSNNLDSKVGGNYNYLYRLFRKSNLKPFERDISTEIYQAGSTPCNGVEGFNCYFPLQSYGFQPTNGVGYQPYRVVVLSFELLHAPATVCGPKKSTNLVKNKCVNFNFNGLTGTGVLTESNKKFLPFQQFGRDIADTTDAVRDPQTLEILDITPCSFGGVSVITPGTNTSNQVAVLYQDVNCTEVPVAIHADQLTPTWRVYSTGSNVFQTRAGCLIGAEHVNNSYECDIPIGAGICASYQTQTNSPRRARSVASQSIIAYTMSLGAENSVAYSNNSIAIPTNFAISVTTEILPVSMTKTSVDCTMYICGDSTECSNLLLQYGSFCTQLNRALTGIAVEQDKNTQEVFAQVKQIYKTPPIKDFGGFNFSQILPDPSKPSKRSFIEDLLFNKVTLADAGFIKQYGDCLGDIAARDLICAQKFNGLTVLPPLLTDEMIAQYTSALLAGTITSGWTFGAGAALQIPFAMQMAYRFNGIGVTQNVLYENQKLIANQFNSAIGKIQDSLSSTASALGKLQDVVNQNAQALNTLVKQLSSNFGAISSVLNDILSRLDPPEAEVQIDRLITGRLQSLQTYVTQQLIRAAEIRASANLAATKMSECVLGQSKRVDFCGKGYHLMSFPQSAPHGVVFLHVTYVPAQEKNFTTAPAICHDGKAHFPREGVFVSNGTHWFVTQRNFYEPQIITTDNTFVSGNCDVVIGIVNNTVYDPLQPELDSFKEELDKYFKNHTSPDVDLGDISGINASVVNIQKEIDRLNEVAKNLNESLIDLQELGKYEQYIKGGSGYIPEAPRDGQAYVRKDGEWVLLSTFL

SEQ ID NO: 5717 - protein, 1241 aa, Artificial Sequence
  SARS-CoV-2/USA/CruiseA-23/2020__EPI_ISL_414482 spike protein (1-1211)(K986P_V987P) Foldon construct
MFVFLVLLPLVSSQCVNLTTRTQLPPAYTNSFTRGVYYPDKVFRSSVLHSTQDLFLPFFSNVTWFHAIHVSGTNGTKRFDNPVLPFNDGVYFASTEKSNIIRGWIFGTTLDSKTQSLLIVNNATNVVIKVCEFQFCNDPFLGVYYHKNNKSWMESEFRVYSSANNCTFEYVSQPFLMDLEVKQGNFKNLREFVFKNIDGYFKIYSKHTPINLVRDLPQGFSALEPLVDLPIGINITRFQTLLALHRSYLTPGDSSSGWTAGAAAYYVGYLQPRTFLLKYNENGTITDAVDCALDPLSETKCTLKSFTVEKGIYQTSNFRVQPTESIVRFPNITNLCPFGEVFNATRFASVYAWNRKRISNCVADYSVLYNSASFSTFKCYGVSPTKLNDLCFTNVYADSFVIRGDEVRQIAPGQTGKIADYNYKLPDDFTGCVIAWNSNNLDSKVGGNYNYLYRLFRKSNLKPFERDISTEIYQAGSTPCNGVEGFNCYFPLQSYGFQPTNGVGYQPYRVVVLSFELLHAPATVCGPKKSTNLVKNKCVNFNFNGLTGTGVLTESNKKFLPFQQFGRDIADTTDAVRDPQTLEILDITPCSFGGVSVITPGTNTSNQVAVLYQDVNCTEVPVAIHADQLTPTWRVYSTGSNVFQTRAGCLIGAEHVNNSYECDIPIGAGICASYQTQTNSPRRARSVASQSIIAYTMSLGAENSVAYSNNSIAIPTNFTISVTTEILPVSMTKTSVDCTMYICGDSTECSNLLLQYGSFCTQLNRALTGIAVEQDKNTQEVFAQVKQIYKTPPIKDFGGFNFSQILPDPSKPSKRSFIEDLLFNKVTLADAGFIKQYGDCLGDIAARDLICAQKFNGLTVLPPLLTDEMIAQYTSALLAGTITSGWTFGAGAALQIPFAMQMAYRFNGIGVTQNVLYENQKLIANQFNSAIGKIQDSLSSTASALGKLQDVVNQNAQALNTLVKQLSSNFGAISSVLNDILSRLDPPEAEVQIDRLITGRLQSLQTYVTQQLIRAAEIRASANLAATKMSECVLGQSKRVDFCGKGYHLMSFPQSAPHGVVFLHVTYVPAQEKNFTTAPAICHDGKAHFPREGVFVSNGTHWFVTQRNFYEPQIITTDNTFVSGNCDVVIGIVNNTVYDPLQPELDSFKEELDKYFKNHTSPDVDLGDISGINASVVNIQKEIDRLNEVAKNLNESLIDLQELGKYEQYIKGGSGYIPEAPRDGQAYVRKDGEWVLLSTFL

SEQ ID NO: 5718 - protein, 1241 aa, Artificial Sequence
  SARS-CoV-2/Hong Kong/case85_VM20002868/2020__EPI_ISL_414519 spike protein (1-1211)(K986P_V987P) Foldon construct
MFVFLVLVPLVSSQCVNLTTRTQLPPAYTNSFTRGVYYPDKVFRSSVLHSTQDLFLPFFSNVTWFHAIHVSGTNGTKRFDNPVLPFNDGVYFASTEKSNIIRGWIFGTTLDSKTQSLLIVNNATNVVIKVCEFQFCNDPFLGVYYHKNNKSWMESEFRVYSSANNCTFEYVSQPFLMDLEGKQGNFKNLREFVFKNIDGYFKIYSKHTPINLVRDLPQGFSALEPLVDLPIGINITRFQTLLALHRSYLTPGDSSSGWTAGAAAYYVGYLQPRTFLLKYNENGTITDAVDCALDPLSETKCTLKSFTVEKGIYQTSNFRVQPTESIVRFPNITNLCPFGEVFNATRFASVYAWNRKRISNCVADYSVLYNSASFSTFKCYGVSPTKLNDLCFTNVYADSFVIRGDEVRQIAPGQTGKIADYNYKLPDDFTGCVIAWNSNNLDSKVGGNYNYLYRLFRKSNLKPFERDISTEIYQAGSTPCNGVEGFNCYFPLQSYGFQPTNGVGYQPYRVVVLSFELLHAPATVCGPKKSTNLVKNKCVNFNFNGLTGTGVLTESNKKFLPFQQFGRDIADTTDAVRDPQTLEILDITPCSFGGVSVITPGTNTSNQVAVLYQDVNCTEVPVAIHADQLTPTWRVYSTGSNVFQTRAGCLIGAEHVNNSYECDIPIGAGICASYQTQTNSPRRARSVASQSIIAYTMSLGAENSVAYSNNSIAIPTNFTISVTTEILPVSMTKTSVDCTMYICGDSTECSNLLLQYGSFCTQLNRALTGIAVEQDKNTQEVFAQVKQIYKTPPIKDFGGFNFSQILPDPSKPSKRSFIEDLLFNKVTLADAGFIKQYGDCLGDIAARDLICAQKFNGLTVLPPLLTDEMIAQYTSALLAGTITSGWTFGAGAALQIPFAMQMAYRFNGIGVTQNVLYENQKLIANQFNSAIGKIQDSLSSTASALGKLQDVVNQNAQALNTLVKQLSSNFGAISSVLNDILSRLDPPEAEVQIDRLITGRLQSLQTYVTQQLIRAAEIRASANLAATKMSECVLGQSKRVDFCGKGYHLMSFPQSAPHGVVFLHVTYVPAQEKNFTTAPAICHDGKAHFPREGVFVSNGTHWFVTQRNFYEPQIITTDNTFVSGNCDVVIGIVNNTVYDPLQPELDSFKEELDKYFKNHTSPDVDLGDISGINASVVNIQKEIDRLNEVAKNLNESLIDLQELGKYEQYIKGGSGYIPEAPRDGQAYVRKDGEWVLLSTFL

SEQ ID NO: 5719 - protein, 1241 aa, Artificial Sequence; identical to SEQ ID NO: 111
  SARS-CoV-2/England/200990660/2020__EPI_ISL_414523 spike protein (1-1211)(K986P_V987P) Foldon construct

SEQ ID NO: 5720 - protein, 1241 aa, Artificial Sequence
  SARS-CoV-2/Australia/NSW09/2020__EPI_ISL_413595 spike protein (1-1211)(K986P_V987P) Foldon construct
MFVFLVLLPLVSSQCVNLTTRTQLPPAYTNSFTRGVYYPDKVFRSSVLHSTQDLFLPFFSNVTWFHAIHVSGTNGTKRFDNPVLPFNDGVYFASTEKSNIIRGWIFGTTLDSKTQSLLIVNNATNVVIKVCEFQFCNDPFLGVYYHKNNKSWMESEFRVYSSANNCTFEYVSQPFLMDLEGKQGNFKNLREFVFKNIDGYFKIYSKHTPINLVRDLPQGFSALEPLVDLPIGINITRFQTLLALHRSYLTPGDSSSGWTAGAAAYYVGYLQPRTFLLKYNENGTITDAVDCALDPLSETKCTLKSFTVEKGIYQTSNFRVQPTESIVRFPNITNLCPFGEVFNATRFASVYAWNRKRISNCVADYSVLYNSASFSTFKCYGVSPTKLNDLCFTNVYADSFVIRGDEVRQIAPGQTGKIADYNYKLPDDFTGCVIAWNSNNLDSKVGGNYNYLYRLFRKSNLKPFERDISTEIYQAGSTPCNGVEGFNCYFPLQSYGFQPTNGVGYQPYRVVVLSFELLHAPATVCGPKKSTNLVKNKCVNFNFNGLTGTGVLTESNKKFLPFQQFGRDIADTTDAVRDPQTLEILDITPCSFGGVSVITPGTNTSNQVAVLYQDVNCTEVPVAIHADQLTPTWRVYSTGSNVFQTRAGCLIGAEHVNNSYECDIPIGAGICASYQTQTNSPRRARSVASQSIIAYTMSLGAENSVAYSNNSIAIPTNFTISVTTEILPVSMTKTSVDCTMYICGDSTECSNLLLQYGSFCTQLNRALTGIAVEQDKNTQEVFAQVKQIYKTPPIKDFGGFNFSQILPDPSKPSKRSFIEDLLFNKVTLADAGFIKQYGDCLGDIAARDLICAQKFNGLTVLPPLLTDEMIAQYTSALLAGTITSGWTFGAGAALQIPFAMQMAYRFNGIGVTQNVLYENQKLIANQFNSAIGKIQDSLSFTASALGKLQDVVNQNAQALNTLVKQLSSNFGAISSVLNDILSRLDPPEAEVQIDRLITGRLQSLQTYVTQQLIRAAEIRASANLAATKMSECVLGQSKRVDFCGKGYHLMSFPQSAPHGVVFLHVTYVPAQEKNFTTAPAICHDGKAHFPREGVFVSNGTHWFVTQRNFYEPQIITTDNTFVSGNCDVVIGIVNNTVYDPLQPELDSFKEELDKYFKNHTSPDVDLGDISGINASVVNIQKEIDRLNEVAKNLNESLIDLQELGKYEQYIKGGSGYIPEAPRDGQAYVRKDGEWVLLSTFL

SEQ ID NO: 5721 - protein, 1241 aa, Artificial Sequence; identical to SEQ ID NO: 103
  SARS-CoV-2/Australia/NSW10/2020__EPI_ISL_413596 spike protein (1-1211)(K986P_V987P) Foldon construct

SEQ ID NO: 5722 - protein, 1241 aa, Artificial Sequence
  SARS-CoV-2/Switzerland/1000477797/2020__EPI_ISL_413023 spike protein (1-1211)(K986P_V987P) Foldon construct
MFVFLVLLPLVSSQCVNLTTRTQLPPAYTNSFTRGVYYPDKVFRSSVLHSTQDLFLPFFSNVTWFHAIHVSGTNGTKRFDNPVLPFNDGVYFASTEKSNIIRGWIFGTTLDSKTQSLLIVNNATNVVIKVCEFQFCNDPFLGVYYHKNNKSWMESEFRVYSSANNCTFEYVSQPFLMDLEGKQGNFKNLREFVFKNIDGYFNIYSKHTPINLVRDLPQGFSALEPLVDLPIGINITRFQTLLALHRSYLTPGDSSSGWTAGAAAYYVGYLQPRTFLLKYNENGTITDAVDCALDPLSETKCTLKSFTVEKGIYQTSNFRVQPTESIVRFPNITNLCPFGEVFNATRFASVYAWNRKRISNCVADYSVLYNSASFSTFKCYGVSPTKLNDLCFTNVYADSFVIRGDEVRQIAPGQTGKIADYNYKLPDDFTGCVIAWNSNNLDSKVGGNYNYLYRLFRKSNLKPFERDISTEIYQAGSTPCNGVEGFNCYFPLQSYGFQPTNGVGYQPYRVVVLSFELLHAPATVCGPKKSTNLVKNKCVNFNFNGLTGTGVLTESNKKFLPFQQFGRDIADTTDAVRDPQTLEILDITPCSFGGVSVITPGTNTSNQVAVLYQGVNCTEVPVAIHADQLTPTWRVYSTGSNVFQTRAGCLIGAEHVNNSYECDIPIGAGICASYQTQTNSPRRARSVASQSIIAYTMSLGAENSVAYSNNSIAIPTNFTISVTTEILPVSMTKTSVDCTMYICGDSTECSNLLLQYGSFCTQLNRALTGIAVEQDKNTQEVFAQVKQIYKTPPIKDFGGFNFSQILPDPSKPSKRSFIEDLLFNKVTLADAGFIKQYGDCLGDIAARDLICAQKFNGLTVLPPLLTDEMIAQYTSALLAGTITSGWTFGAGAALQIPFAMQMAYRFNGIGVTQNVLYENQKLIANQFNSAIGKIQDSLSSTASALGKLQDVVNQNAQALNTLVKQLSSNFGAISSVLNDILSRLDPPEAEVQIDRLITGRLQSLQTYVTQQLIRAAEIRASANLAATKMSECVLGQSKRVDFCGKGYHLMSFPQSAPHGVVFLHVTYVPAQEKNFTTAPAICHDGKAHFPREGVFVSNGTHWFVTQRNFYEPQIITTDNTFVSGNCDVVIGIVNNTVYDPLQPELDSFKEELDKYFKNHTSPDVDLGDISGINASVVNIQKEIDRLNEVAKNLNESLIDLQELGKYEQYIKGGSGYIPEAPRDGQAYVRKDGEWVLLSTFL

SEQ ID NO: 5723 - protein, 1241 aa, Artificial Sequence
  SARS-CoV-2/Belgium/BA-02291/2020__EPI_ISL_415159 spike protein (1-1211)(K986P_V987P) Foldon construct
MFVFLVLLPLVSSQCVNLTTRTQLPPAYTNSFTRGVYYPDKVFRSSVLHSTQDLFLPFFSNVTWFHAIHVSGTNGTKRFDNPVLPFNDGVYFASTEKSNIIRGWIFGTTLDSKTQSLLIVNNATNVVIKVCEFQFCNDPFLGVYYHKNNKSWMESEFRVYSSANNCTFEYVSQPFLMDLEGKQGNFKNLREFVFKNIDGYFKIYSKHTPINLVRDLPQGFSALEPLVDLPIGINITRFQTLLALHRSYLTPGDSSSGWTAGAAAYYVGYLQPRTFLLKYNENGTITDAVDCALDPLSETKCTLKSFTVEKGIYQTSNFRVQPTESIVRFPNITNLCPFGEVFNATRFASVYAWNRKRISNCVADYSVLYNSASFSTFKCYGVSPTKLNDLCFTNVYADSFVIRGDEVRQIAPGQTGKIADYNYKLPDDFTGCVIAWNSNNLDSKVGGNYNYLYRLFRRSNLKPFERDISTEIYQAGSTPCNGVEGFNCYFPLQSYGFQPTNGVGYQPYRVVVLSFELLPAPATVCGPKKSTNLVKNKCVNFNFNGLTGTGVLTESNKKFLPFQQFGRDIADTTDAVRDPQTLEILDITPCSFGGVSVITPGTNTSNQVAVLYQGVNCTEVPVAIHADQLTPTWRVYSTGSNVFQTRAGCLIGAEHVNNSYECDIPIGAGICASYQTQTNSPRRARSVASQSIIAYTMSLGAENSVAYSNNSIAIPTNFTISVTTEILPVSMTKTSVDCTMYICGDSTECSNLLLQYGSFCTQLNRALTGIAVEQDKNTQEVFAQVKQIYKTPPIKDFGGFNFSQILPDPSKPSKRSFIEDLLFNKVTLADAGFIKQYGDCLGDIAARDLICAQKFNGLTVLPPLLTDEMIAQYTSALLAGTITSGWTFGAGAALQIPFAMQMAYRFNGIGVTQNVLYENQKLIANQFNSAIGKIQDSLSSAAPALGKLQDVVNQNAQALNTLVKQLSSNFGAISSVLNDILSRLDPPEAEVQIDRLITGRLQSLQTYVTQQLIRAAEIRASANLAATKMSECVLGQSKRVDFCGKGYHLMSFPQSAPHGVVFLHVTYVPAQEKNFTTAPAICHDGKAHFPREGVFVSNGTHWFVTQRNFYEPQIITTDNTFVSGNCDVVIGIVNNTVYDPLQPELDSFKEELDKYFKNHTSPDVDLGDISGINASVVNIQKEIDRLNEVAKNLNESLIDLQELGKYEQYIKGGSGYIPEAPRDGQAYVRKDGEWVLLSTFL

SEQ ID NO: 5724 - protein, 1241 aa, Artificial Sequence
  SARS-CoV-2/USA/WA8-UW5/2020__EPI_ISL_413486 spike protein (1-1211)(K986P_V987P) Foldon construct
MFVFLVLLPLVSSQCVNLTTRTQLPPAYTNSFTRGVYYPDKVFRSSVLHSTQDLFLPFFSNVTWFHAIHVSGTNGTKRFDNPVLPFNDGVYFASTEKSNIIRGWIFGTTLDSKTQSLLIVNNATNVVIKVCEFQFCNDPFLGVYYHKNNKSWMESEFRVYSSANNCTFEYVSQPFLMDLEGKQGNFKNLREFVFKNIDGYFKIYSKHTPINLVRDLPQGFSALEPLVDLPIGINITRFQTLLALHRSYLTPGDSSSGWTAGAAAYYVGYLQPRTFLLKYNENGTITDAVDCALDPLSETKCTLKSFTVEKGIYQTSNFRVQPTESIVRFPNITNLCPFGEVFNATRFASVYAWNRKRISNCVADYSVLYNSASFSTFKCYGVSPTKLNDLCFTNVYADSFVIRGDEVRQIAPGQTGKIADYNYKLPDDFTGCVIAWNSNNLDSKVGGNYNYLYRLFRKSNLKPFERDISTEIYQAGSTPCNGVEGFNCYFPLQSYGFQPTNGVGYQPYRVVVLSFELLHAPATVCGPKKSTNLVKNKCVNFNFNGLTGTGVLTESNKKFLPFQQFGRDIADTTDAVRDPQTLEILDITPCSFGGVSVITPGTNTSNQVAVLYQDVNCTEVPVAIHADQLTPTWRVYSTGSNVFQTRAGCLIGAEYVNNSYECDIPIGAGICASYQTQTNSPRRARSVASQSIIAYTMSLGAENSVAYSNNSIAIPTNFTISVTTEILPVSMTKTSVDCTMYICGDSTECSNLLLQYGSFCTQLNRALTGIAVEQDKNTQEVFAQVKQIYKTPPIKDFGGFNFSQILPDPSKPSKRSFIEDLLFNKVTLADAGFIKQYGDCLGDIAARDLICAQKFNGLTVLPPLLTDEMIAQYTSALLAGTITSGWTFGAGAALQIPFAMQMAYRFNGIGVTQNVLYENQKLIANQFNSAIGKIQDSLSSTASALGKLQDVVNQNAQALNTLVKQLSSNFGAISSVLNDILSRLDPPEAEVQIDRLITGRLQSLQTYVTQQLIRAAEIRASANLAATKMSECVLGQSKRVDFCGKGYHLMSFPQSAPHGVVFLHVTYVPAQEKNFTTAPAICHDGKAHFPREGVFVSNGTHWFVTQRNFYEPQIITTDNTFVSGNCDVVIGIVNNTVYDPLQPELDSFKEELDKYFKNHTSPDVDLGDISGINASVVNIQKEIDRLNEVAKNLNESLIDLQELGKYEQYIKGGSGYIPEAPRDGQAYVRKDGEWVLLSTFL

SEQ ID NO: 5725 - protein, 1241 aa, Artificial Sequence
  SARS-CoV-2/England/20102000506/2020__EPI_ISL_415147 spike protein (1-1211)(K986P_V987P) Foldon construct
MFVFLVLLPLVSSQCVNLTTRTQLPPAYTNSFTRGVYYPDKVFRSSVLHSTQDLFLPFFSNVTWFHAIHVSGTNGTKRFDNPVLPFNDGVYFASTEKSNIIRGWIFGTTLDSKTQSLLIVNNATNVVIKVCEFQFCNDPFLGVYYHKNNKSWMESEFRVYSSANNCTFEYVSQPFLMDLEGKQGNFKNLREFVFKNIDGYFKIYSKHTPINLVRDLPQGFSALEPLVDLPIGINITRFQTLLALHRSYLTPGDSSSGWTAGAAAYYVGYLQPRTFLLKYNENGTITDAVDCALDPLSETKCTLKSFTVEKGIYQTSNFRVQPTESIVRFPNITNLCPFGEVFNATRFASVYAWNRKRISNCVADYSVLYNSASFSTFKCYGVSPTKLNDLCFTNVYADSFVIRGDEVRQIAPGQTGKIADYNYKLPDDFTGCVIAWNSNNLDSKVGGNYNYLYRLFRKSNLKPFERDISTEIYQAGSTPCNGVEGFNCYFPLQSYGFQPTNGVGYQPYRVVVLSFELLHAPATVCGPKKSTNLVKNKCVNFNFNGLTGTGVLTESNKKFLPFQQFGRDIADTTDAVRDPQTLEILDITPCSFGGVSVITPGTNTSNQVAVLYQGVNCTEVPVAIHADQLTPTWRVYSTGSNVFQTRAGCLIGAEHVNNSYECDIPIGAGICASYQTQTNSPRRARSVASQSIIAYTMSLGAENSVAYSNNSIAIPTNFTISVTTEILPVSMTKTSVDCTMYICGDSTECSNLLLQYGSFCTQLNRALTGIAVEQDKNTQEVFAQVKQIYKTPPIKDFGGFNFSQILPDPSKPSKRSFIEDLLFNKVTLADAGFIKQYGYCLGDIAARDLICAQKFNGLTVLPPLLTDEMIAQYTSALLAGTITSGWTFGAGAALQIPFAMQMAYRFNGIGVTQNVLYENQKLIANQFNSAIGKIQDSLSSTASALGKLQDVVNQNAQALNTLVKQLSSNFGAISSVLNDILSRLDPPEAEVQIDRLITGRLQSLQTYVTQQLIRAAEIRASANLAATKMSECVLGQSKRVDFCGKGYHLMSFPQSAPHGVVFLHVTYVPAQEKNFTTAPAICHDGKAHFPREGVFVSNGTHWFVTQRNFYEPQIITTDNTFVSGNCDVVIGIVNNTVYDPLQPELDSFKEELDKYFKNHTSPDVDLGDISGINASVVNIQKEIDRLNEVAKNLNESLIDLQELGKYEQYIKGGSGYIPEAPRDGQAYVRKDGEWVLLSTFL

SEQ ID NO: 5726 - protein, 1241 aa, Artificial Sequence
  SARS-CoV-2/Belgium/VAG-03013/2020__EPI_ISL_415155 spike protein (1-1211)(K986P_V987P) Foldon construct
MFVFLVLLPLVSSQCVNLTTRTQLPPAYTNSFTRGVYYPDKVFRSSVLHSTQDLFLPFFSNVTWFHAIHVSGTNGTKRFDNPVLPFNDGVYFASTEKSNIIRGWIFGTTLDSKTQSLLIVNNATNVVIKVCEFQFCNDPFLGVYYHKNNKSWMESEFRVYSSANNCTFEYVSQPFLMDLEGKQGNFKNLREFVFKNIDGYFKIYSKHTPINLVRDLPQGFSALEPLVDLPIGINITRFQTLLALHRSYLTPGDSSSGWTAGAAAYYVGYLQPRTFLLKYNENGTITDAVDCALDPLSETKCTLKSFTVEKGIYQTSNFRVQPTESIVRFPNITNLCPFGEVFNATRFASVYAWNRKRISNCVADYSVLYNSASFSTFKCYGVSPTKLNDLCFTNVYADSFVIRGDEVRQIAPGQTGKIADYNYKLPDDFTGCVIAWNSNNLDSKVGGNYNYLYRLFRKSNLKPFERDISTEIYQAGSTPCNGVEGFNCYFPLQSYGFQPTNGVGYQPYRVVVLSFELLHAPATVCGPKKSTNLVKNKCVNFNFNGLTGTGVLTESNKKFLPFQQFGRDIADTTDAVRDPQTLEILDITPCSFGGVSVITPGTNTSNQVAVLYQGVNCTEVPVAIHADQLTPTWRVYSTGSNVFQTRAGCLIGAEHVNNSYECDIPIGAGICASYQTQTNSPRRARSVASQSIIAYTMSLGAENSVAYSNNSIAIPTNFTISVTTEILPVSMTKTSVDCTMYICGDSTECSNLLLQYGSFCTQLNRALTGIAVEQDKNTQEVFAQVKQIYKTPPIKDFGGFNFSQILPDPSKPSKRSFIEDLLFNKVTLADAGFIKQYGDCLGDIAARDLICAQKFNGLTVLPPLLTDEMIAQYTSALLAGTITSGWTFGAGAALQIPFAMQMAYRFNGIGVTQNVLYENQKLIANQFNSAIGKIQDSLSSTATALGKLQDVVNQNAQALNTLVKQLSSNFGAISSVLNDILSRLDPPEAEVQIDRLITGRLQSLQTYVTQQLIRAAEIRASANLAATKMSECVLGQSKRVDFCGKGYHLMSFPQSAPHGVVFLHVTYVPAQEKNFTTAPAICHDGKAHFPREGVFVSNGTHWFVTQRNFYEPQIITTDNTFVSGNCDVVIGIVNNTVYDPLQPELDSFKEELDKYFKNHTSPDVDLGDISGINASVVNIQKEIDRLNEVAKNLNESLIDLQELGKYEQYIKGGSGYIPEAPRDGQAYVRKDGEWVLLSTFL

SEQ ID NO: 5727 - protein, 1241 aa, Artificial Sequence
  SARS-CoV-2/Belgium/BC-03016/2020__EPI_ISL_415157 spike protein (1-1211)(K986P_V987P) Foldon construct
MFVFLVLLPLVSSQCVNLTTRTQLPPAYTNSFTRGVYYPDKVFRSSVLHSTQDLFLPFFSNVTWFHAIHVSGTNGTKRFDNPVLPFNDGVYFASTEKSNIIRGWIFGTTLDSKTQSLLIVNNATNVVIKVCEFQFCNDPFLGVYYHKNNKSWMESEFRVYSSANNCTFEYVSQPFLMDLEGKQGNFKNLREFVFKNIDGYFKIYSKHTPINLVRDLPQGFSALEPLVDLPIGINITRFQTLLALHRSYLTPGDSSSGWTAGAAAYYVGYLQPRTFLLKYNENGTITDAVDCALDPLSETKCTLKSFTVEKGIYQTSNFRVQPTESIVRFPNITNLCPFGEVFNATRFASVYAWNRKRISNCVADYSVLYNSASFSTFKCYGVSPTKLNDLCFTNVYADSFVIRGDEVRQIAPGQTGKIADYNYKLPDDFTGCVIAWNSNNLDSKVGGNYNYLYRLFRKSNLKPFERDISTEIYQAGSTPCNGVEGFNCYFPLQSYGFQPTNGVGYQPYRVVVLSFELLHAPATVCGPKKSTNLVKNKCVNFNFNGLTGTGVLTESNKKFLPFQQFGRDIADTTDAVRDPQTLEILDITPCSFGGVSVITPGTNTSNQVAVLYQGVNCTEVPVAIHADQLTPTWRVYSTGSNVFQTRAGCLIGAEHVNNSYECDIPIGAGICASYQTQTNSPRRARSVASQSIIAYTMSLGAENSVAYSNNSIAIPTNFTISVTTEILPVSMTKTSVDCTMYICGDSTECSNLLLQYGSFCTQLNRALTGIAVEQDKNTQEVFAQVKQIYKTPPIKDFGGFNFSQILPDPSKPSKRSFIEDLLFNKVTLADAGFIKQYGDCLGDIAARDLICAQKFNGLTVLPPLLTDEMIAQYTSALLAGTITSGWTFGAGAALQIPFAMQMAYRFNGIGVTQNVLYENQKLIANQFNSAIGKIQDSLSSTAPALGKLQDVVNQNAQALNTLVKQLSSNFGAISSVLNDILSRLDPPEAEVQIDRLITGRLQSLQTYVTQQLIRAAEIRASANLAATKMSECVLGQSKRVDFCGKGYHLMSFPQSAPHGVVFLHVTYVPAQEKNFTTAPAICHDGKAHFPREGVFVSNGTHWFVTQRNFYEPQIITTDNTFVSGNCDVVIGIVNNTVYDPLQPELDSFKEELDKYFKNHTSPDVDLGDISGINASVVNIQKEIDRLNEVAKNLNESLIDLQELGKYEQYIKGGSGYIPEAPRDGQAYVRKDGEWVLLSTFL

SEQ ID NO: 5728 - protein, 1241 aa, Artificial Sequence
  SARS-CoV-2/Germany/BavPat3/2020__EPI_ISL_414521 spike protein (1-1211)(K986P_V987P) Foldon construct
MFVFLVLLPLVSSQCVNLTTRTQLPPAYTNSFTRGVYYPDKVFRSSVLHSTQDLFLPFFSNVTWFHAIHVSGTNGTKRFDNPVLPFNDGVYFASTEKSNIIRGWIFGTTLDSKTQSLLIVNNATNVVIKVCEFQFCNDPFLGVYYHKNNKSWMESEFRVYSSANNCTFEYVSQPFLMDLEGKQGNFKNLREFVFKNIDGYFKIYSKHTPINLVRDLPQGFSALEPLVDLPIGINITRFQTLLALHRSYLTPGDSSSGWTAGAAAYYVGYLQPRTFLLKYNENGTITDAVDCALDPLSETKCTLKSFTVEKGIYQTSNFRVQPTESIVRFPNITNLCPFGEVFNATRFASVYAWNRKRISNCVADYSVLYNSASFSTFKCYGVSPTKLNDLCFTNVYADSFVIRGDEVRQIAPGQTGKIADYNYKLPDDFTGCVIAWNSNNLDSKVGGNYNYLYRLFRKSNLKPFERDISTEIYQAGSTPCNGVEGFNCYFPLQSYGFQPTNGVGYQPYRVVVLSFELLHAPATVCGPKKSTNLVKNKCVNFNFNGLTGTGVLTESNKKFLPFQQFGRDIADTTDAVRDPQTLEILDITPCSFGGVSVITPGTNTSNQVAVLYQDVNCTEVPVAIHADQLTPTWRVYSTGSNVFQTRAGCLIGAEHVNNSYECDIPIGAGICASYQTQTNSPRRARSVASQSIIAYTMSLGAENSVAYSNNSIAIPTNFTISVTTEILPVSMTKTSVDCTMYICGDSTECSNLLLQYGSFCTQLNRALTGIAVEQDKNTQQVFAQVKQIYKTPPIKDFGGFNFSQILPDPSKPSKRSFIEDLLFNKVTLADAGFIKQYGDCLGDIAARDLICAQKFNGLTVLPPLLTDEMIAQYTSALLAGTITSGWTFGAGAALQIPFAMQMAYRFNGIGVTQNVLYENQKLIANQFNSAIGKIQDSLSSTASALGKLQDVVNQNAQALNTLVKQLSSNFGAISSVLNDILSRLDPPEAEVQIDRLITGRLQSLQTYVTQQLIRAAEIRASANLAATKMSECVLGQSKRVDFCGKGYHLMSFPQSAPHGVVFLHVTYVPAQEKNFTTAPAICHDGKAHFPREGVFVSNGTHWFVTQRNFYEPQIITTDNTFVSGNCDVVIGIVNNTVYDPLQPELDSFKEELDKYFKNHTSPDVDLGDISGINASVVNIQKEIDRLNEVAKNLNESLIDLQELGKYEQYIKGGSGYIPEAPRDGQAYVRKDGEWVLLSTFL

SEQ ID NO: 5729 - protein, 1241 aa, Artificial Sequence
  SARS-CoV-2/France/HF1805/2020__EPI_ISL_414628 spike protein (1-1211)(K986P_V987P) Foldon construct
MFVFLVLLPLVSSQCVNLTTRTQLPPAYTNSFTRGVYYPDKVFRSSVLHSTQDLFLPFFSNVTWFHAIHVSGTNGTKRFDNPVLPFNDGVYFASTEKSNIIRGWIFGTTLDSKTQSLLIVNNATNVVIKVCEFQFCNDPFLGVYYHKNNKSWMESEFRVYSSANNCTFEYVSQPFLMDLEGKQGNFKNLREFVFKNIDGYFKIYSKHTPINLVRDLPQGFSALEPLVDLPIGINITRFQTLLALHRSYLTPGDSSSGWTAGAAAYYVGYLQPRTFLLKYNENGTITDAVDCALDPLSETKCTLKSFTVEKGIYQTSNFRVQPTESIVRFPNITNLCPFGEVFNATRFASVYAWNRKRISNCVADYSVLYNSASFSTFKCYGVSPTKLNDLCFTNVYADSFVIRGDEVRQIAPGQTGKIADYNYKLPDDFTGCVIAWNSNNLDSKVGGNYNYLYRLFRKSNLKPFERDISTEIYQAGSTPCNGVEGFNCYFPLQSYGFQPTNGVGYQPYRVVVLSFELLHAPATVCGPKKSTNLVKNKCVNFNFNGLTGTGVLTESNKKFLPFQQFGRDIADTTDAVRDPQTLEILDITPCSFGGVSVITPGTNTSNQVAVLYQGVNCTEVPVAIHADQLTPTWRVYSTGSNVFQTRAGCLIGAEHVNNSYECDIPIGAGICASYQTQTNSPRRARSVASQSIIAYTMSLGAENSVAYSNNSIAIPTNFTISVTTEILPVSMTKTSVDCTMYICGDSTECSNLLLQYGSFCTQLNRALTGIAVEQDKNTQEVFAQVKQIYKTPPIKDFGGFNFSQILPDPSKPSKRSFIEDLLFNKVTLADAGFIKQYGDCLGDIAARDLICAQKFNGLTVLPPLLTDEMIAQYTSALLAGTITSGWTFGAGAALQIPFAMQMAYRFNGIGVTQNVLYENQKLIANQFNSAIGKIQDSLSSTASALGKLQDVVNQNAQALNTLVKQLSSNFGAISSVLNDILSRLDPPEAEVQIDRLITGRLQSLQTYVTQQLIRAAEIRASANLAATKMSECVLGQSKRVDFCGKGYHLMSFPQSAPHGVVFLHVTYVPAQEKNFTTAPAICHDGKAHFPREGVFVSNGTHWFVTQRNFYEPQIITTDNTFVSGNCDVVIGVVNNTVYDPLQPELDSFKEELDKYFKNHTSPDVDLGDISGINASVVNIQKEIDRLNEVAKNLNESLIDLQELGKYEQYIKGGSGYIPEAPRDGQAYVRKDGEWVLLSTFL

SEQ ID NO: 5730 - protein, 1241 aa, Artificial Sequence
  SARS-CoV-2/Netherlands/ZuidHolland_9/2020__EPI_ISL_414445 spike protein (1-1211)(K986P_V987P) Foldon construct
MFVFLVLLPLVSSQCVNLTTRTQLPPAYTNSFTRGVYYPDKVFRSSVLHSTQDLFLPFFSNVTWFHAIHVSGTNGTKRFDNPVLPFNDGVYFASTEKSNIIRGWIFGTTLDSKTQSLLIVNNATNVVIKVCEFQFCNDPFLGVYYHKNNKSWMESEFRVYSSANNCTFEYVSQPFLMDLEGKQGNFKNLREFVFKNIDGYFKIYSKHTPINLVRDLPQGFSALEPLVDLPIGINITRFQTLLALHRSYLTPGDSSSGWTAGAAAYYVGYLQPRTFLLKYNENGTITDAVDCALDPLSETKCTLKSFTVEKGIYQTSNFRVQPTESIVRFPNITNLCPFGEVFNATRFASVYAWNRKRISNCVADYSVLYNSASFSTFKCYGVSPTKLNDLCFTNVYADSFVIRGDEVRQIAPGQTGKIADYNYKLPDDFTGCVIAWNSNNLDSKVGGNYNYLYRLFRKSNLKPFERDISTEIYQAGSTPCNGVEGFNCYFPLQSYGFQPTNGVGYQPYRVVVLSFELLHAPATVCGPKKSTNLVKNKCVNFNFNGLTGTGVLTESNKKFLPFQQFGRDIADTTDAVRDPQTLEILDITPCSFGGVSVITPGTNTSNQVAVLYQGVNCTEVPVAIHADQLTPTWRVYSTGSNVFQTRAGCLIGAEHVNNSYECDIPIGAGICASYQTQTNSPRRARSVASQSIIAYTMSLGAENSVAYSNNSIAIPTNFTISVTTEILPVSMTKTSVDCTMYICGDSTECSNLLLQYGSFCTQLNRALTGIAVEQDKNTQEVFAQVKQIYKTPPIKDFGGFNFSQILPDPSKPSKRSFIEDLLFNKVTLADAGFIKQYGDCLGDIAARDLICVQKFNGLTVLPPLLTDEMIAQYTSALLAGTITSGWTFGAGAALQIPFAMQMAYRFNGIGVTQNVLYENQKLIANQFNSAIGKIQDSLSSTASALGKLQDVVNQNAQALNTLVKQLSSNFGAISSVLNDILSRLDPPEAEVQIDRLITGRLQSLQTYVTQQLIRAAEIRASANLAATKMSECVLGQSKRVDFCGKGYHLMSFPQSAPHGVVFLHVTYVPAQEKNFTTAPAICHDGKAHFPREGVFVSNGTHWFVTQRNFYEPQIITTDNTFVSGNCDVVIGIVNNTVYDPLQPELDSFKEELDKYFKNHTSPDVDLGDISGINASVVNIQKEIDRLNEVAKNLNESLIDLQELGKYEQYIKGGSGYIPEAPRDGQAYVRKDGEWVLLSTFL

SEQ ID NO: 5731 - protein, 1241 aa, Artificial Sequence
  SARS-CoV-2/Finland/FIN03032020A/2020__EPI_ISL_413602 spike protein (1-1211)(K986P_V987P) Foldon construct
MFVFLVLLPLVSSQCVNLTTRTQLPPAYTNSFTRGVYYPDKVFRSSVLHSTQDLFLPFFSNVTWFHAIHVSGTNGTKRFDNPVLPFNDGVYFASTEKSNIIRGWIFGTTLDSKTQSLLIVNNATNVVIKVCEFQFCNDPFLGVYYHKNNKSWMESEFRVYSSANNCTFEYVSQPFLMDLEGKQGNFKNLREFVFKNIDGYFKIYSKHTPINLVRDLPQGFSALEPLVDLPIGINITRFQTLLALHRSYLTPGDSSSGWTAGAAAYYVGYLQPRTFLLKYNENGTITDAVDCALDPLSETKCTLKSFTVEKGIYQTSNFRVQPTESIVRFPNITNLCPFGEVFNATRFASVYAWNRKRISNCVADYSVLYNSASFSTFKCYGVSPTKLNDLCFTNVYADSFVIRGDEVRQIAPGQTGKIADYNYKLPDDFTGCVISWNSNNLDSKVGGNYNYLYRLFRKSNLKPFERDISTEIYQAGSTPCNGVEGFNCYFPLQSYGFQPTNGVGYQPYRVVVLSFELLHAPATVCGPKKSTNLVKNKCVNFNFNGLTGTGVLTESNKKFLPFQQFGRDIADTTDAVRDPQTLEILDITPCSFGGVSVITPGTNTSNQVAVLYQGVNCTEVPVAIHADQLTPTWRVYSTGSNVFQTRAGCLIGAEHVNNSYECDIPIGAGICASYQTQTNSPRRARSVASQSIIAYTMSLGAENSVAYSNNSIAIPTNFTISVTTEILPVSMTKTSVDCTMYICGDSTECSNLLLQYGSFCTQLNRALTGIAVEQDKNTQEVFAQVKQIYKTPPIKDFGGFNFSQILPDPSKPSKRSFIEDLLFNKVTLADAGFIKQYGDCLGDIAARDLICAQKFNGLTVLPPLLTDEMIAQYTSALLAGTITSGWTFGAGAALQIPFAMQMAYRFNGIGVTQNVLYENQKLIANQFNSAIGKIQDSLSSTASALGKLQDVVNQNAQALNTLVKQLSSNFGAISSVLNDILSRLDPPEAEVQIDRLITGRLQSLQTYVTQQLIRAAEIRASANLAATKMSECVLGQSKRVDFCGKGYHLMSFPQSAPHGVVFLHVTYVPAQEKNFTTAPAICHDGKAHFPREGVFVSNGTHWFVTQRNFYEPQIITTDNTFVSGNCDVVIGIVNNTVYDPLQPELDSFKEELDKYFKNHTSPDVDLGDISGINASVVNIQKEIDRLNEVAKNLNESLIDLQELGKYEQYIKGGSGYIPEAPRDGQAYVRKDGEWVLLSTFL

SEQ ID NO: 5732 - protein, 1241 aa, Artificial Sequence
  SARS-CoV-2/France/GE1977/2020__EPI_ISL_414632 spike protein (1-1211)(K986P_V987P) Foldon construct
MFVFLVLLPLVSSQCVNLTTRTQLPPAYTNSFTRGVYYPDKVFRSSVLHSTQDLFLPFFSNVTWFHAIHVSGTNGTKRFDNPVLPFNDGVYFASTEKSNIIRGWIFGTTLDSKTQSLLIVNNATNVVIKVCEFQFCNDPFLGVYYHKNNKSWMESEFRVYSSANNCTFEYVSQPFLMDLEGKQGNFKNLREFVFKNIDGYFKIYSKHTPINLVRDLPQGFSALEPLVDLPIGINITRFQTLLALHRSYLTPGDSSSGWTAGAAAYYVGYLQPRTFLLKYNENGTITDAVDCALDPLSETKCTLKSFTVEKGIYQTSNFRVQPTESIVRFPNITNLCPFGEVFNATRFASVYAWNRKRISNCVADYSVLYNSASFSTFKCYGVSPTKLNDLCFTNVYADSFVIRGDEVRQIAPGQTGKIADYNYKLPDDFTGCVIAWNSNNLDSKVGGNYNYLYRLFRKSNLKPFERDISTEIYQAGSTPCNGVEGFNCYFPLQSYGFQPTNGVGYQPYRVVVLSFELLHAPATVCGPKKSTNLVKNKCVNFNFNGLTGTGVLTESNKKFLPFQQFGRDIADTTDAVRDPQTLEILDITPCSFGGVSVITPGTNTSNQVAVLYQGVNCTEVPVAIHADQLTPTWRVYSTGSNVFQTRAGCLIGAEHVNNSYECDIPIGAGICASYQTQTNSPRRARSVASQSIIAYTMSLGAENSVAYSNNSIAIPTNFTISVTTEILPVSMTKTSVDCTMYICGDSTECSNLLLQYGSFCTQLNRALTGIAVEQDKNTQEVFAQVKQIYKTPPIKDFGGFNFSQILPDPSKPSKRSFIEDLLFNKVTLADAGFIKQYGDCLGDIAARDLICAQKFNGLTVLPPLLTDEMIAQYTSALLAGTITSGWTFGAGAALQIPFAMQMAYRFNGIGVTQNVLYENQKLIANQFNSAIGKIQDSLFSTASALGKLQDVVNQNAQALNTLVKQLSSNFGAISSVLNDILSRLDPPEAEVQIDRLITGRLQSLQTYVTQQLIRAAEIRASANLAATKMSECVLGQSKRVDFCGKGYHLMSFPQSAPHGVVFLHVTYVPAQEKNFTTAPAICHDGKAHFPREGVFVSNGTHWFVTQRNFYEPQIITTDNTFVSGNCDVVIGIVNNTVYDPLQPELDSFKEELDKYFKNHTSPDVDLGDISGINASVVNIQKEIDRLNEVAKNLNESLIDLQELGKYEQYIKGGSGYIPEAPRDGQAYVRKDGEWVLLSTFL

SEQ ID NO: 5733 - protein, 1241 aa, Artificial Sequence
  SARS-CoV-2/Finland/FIN-313/2020__EPI_ISL_414641 spike protein (1-1211)(K986P_V987P) Foldon construct
MFVFLVLLPLVSSQCVNLTTRTQLPPAYTNSFTRGVYYPDKVFRSSVLHSTQDLFLPFFSNVTWFHAIHVSGTNGTKRFDNPVLPFNDGVYFASTEKSNIIRGWIFGTTLDSKTQSLLIVNNATNVVIKVCEFQFCNDPFLGVYYHKNNKSWMESEFRVYSSANNCTFEYVSQPFLMDLEGKQGNFKNLREFVFKNIDGYFKIYSKHTPINLVRDLPQGFSALEPLVDLPIGINITRFKTLLALHRSYLTPGDSSSGWTAGAAAYYVGYLQPRTFLLKYNENGTITDAVDCALDPLSETKCTLKSFTVEKGIYQTSNFRVQPTESIVRFPNITNLCPFGEVFNATRFASVYAWNRKRISNCVADYSVLYNSASFSTFKCYGVSPTKLNDLCFTNVYADSFVIRGDEVRQIAPGQTGKIADYNYKLPDDFTGCVIAWNSNNLDSKVGGNYNYLYRLFRKSNLKPFERDISTEIYQAGSTPCNGVEGFNCYFPLQSYGFQPTNGVGYQPYRVVVLSFELLHAPATVCGPKKSTNLVKNKCVNFNFNGLTGTGVLTESNKKFLPFQQFGRDIADTTDAVRDPQTLEILDITPCSFGGVSVITPGTNTSNQVAVLYQGVNCTEVPVAIHADQLTPTWRVYSTGSNVFQTRAGCLIGAEHVNNSYECDIPIGAGICASYQTQTNSPRRARSVASQSIIAYTMSLGAENSVAYSNNSIAIPTNFTISVTTEILPVSMTKTSVDCTMYICGDSTECSNLLLQYGSFCTQLNRALTGIAVEQDKNTQEVFAQVKQIYKTPPIKDFGGFNFSQILPDPSKPSKRSFIEDLLFNKVTLADAGFIKQYGDCLGDIAARDLICAQKFNGLTVLPPLLTDEMIAQYTSALLAGTITSGWTFGAGAALQIPFAMQMAYRFNGIGVTQNVLYENQKLIANQFNSAIGKIQDSLSSTASALGKLQDVVNQNAQALNTLVKQLSSNFGAISSVLNDILSRLDPPEAEVQIDRLITGRLQSLQTYVTQQLIRAAEIRASANLAATKMSECVLGQSKRVDFCGKGYHLMSFPQSAPHGVVFLHVTYVPAQEKNFTTAPAICHDGKAHFPREGVFVSNGTHWFVTQRNFYEPQIITTDNTFVSGNCDVVIGIVNNTVYDPLQPELDSFKEELDKYFKNHTSPDVDLGDISGINASVVNIQKEIDRLNEVAKNLNESLIDLQELGKYEQYIKGGSGYIPEAPRDGQAYVRKDGEWVLLSTFL

SEQ ID NO: 5734 - protein, 1241 aa, Artificial Sequence
  SARS-CoV-2/Netherlands/ZuidHolland_2/2020__EPI_ISL_414556 spike protein (1-1211)(K986P_V987P) Foldon construct
MFVFLVLLPLVSSQCVNLTTRTQLPPAYTNSFTRGVYYPDKVFRSSVLHSTQDLFLPFFSNVTWFHAIHVSGTNGTKRFDNPVLPFNDGVYFASTEKSNIIRGWIFGTTLDSKTQSLLIVNNATNVVIKVCEFQFCNDPFLGVYYHKNNKSWMESEFRVYSSANNCTFEYVSQPFLMDLEGKQGNFKNLREFVFKNIDGYFKIYSKHTPINLVRDLPQGFSALEPLVDLPIGINITRFQTLLALHRSYLTPGDSSSGWTAGAAAYYVGYLQPRTFLLKYNENGTITDAVDCALDPLSETKCTLKSFTVEKGIYQTSNFRVQPTESIVRFPNITNLCPFGEVFNATRFASVYAWNRKRISNCVADYSVLYNSASFSTFKCYGVSPTKLNDLCFTNVYADSFVIRGDEVRQIAPGQTGKIADYNYKLPDDFTGCVIAWNSNNLDSKVGGNYNYLYRLFRKSNLKPFERDISTEIYQAGSTPCNGVEGFNCYFPLQSYGFQPTNGVGYQPYRVVVLSFELLHAPATVCGPKKSTNLVKNKCVNFNFNGLTGTGVLTESNKKFLPFQQFGRDIADTTDAVRDPQTLEILDITPCSFGGVSVITPGTNTSNQVAVLYQGVNCTEVPVAIHADQLTPTWRVYSTGSNVFQTRAGCLIGAEHVNNSYECDIPIGAGICASYQTQTNSPRRARSVASQSIIAYTMSLGAENSVAYSNNSIAIPTNFTISVTTEILPVSMTKTSVDCTMYICGDSTECSNLLLQYGSFCTQLNRALTGIALEQDKNTQEVFAQVKQIYKTPPIKDFGGFNFSQILPDPSKPSKRSFIEDLLFNKVTLADAGFIKQYGDCLGDIAARDLICAQKFNGLTVLPPLLTDEMIAQYTSALLAGTITSGWTFGAGAALQIPFAMQMAYRFNGIGVTQNVLYENQKLIANQFNSAIGKIQDSLSSTASALGKLQDVVNQNAQALNTLVKQLSSNFGAISSVLNDILSRLDPPEAEVQIDRLITGRLQSLQTYVTQQLIRAAEIRASANLAATKMSECVLGQSKRVDFCGKGYHLMSFPQSAPHGVVFLHVTYVPAQEKNFTTAPAICHDGKAHFPREGVFVSNGTHWFVTQRNFYEPQIITTDNTFVSGNCDVVIGIVNNTVYDPLQPELDSFKEELDKYFKNHTSPDVDLGDISGINASVVNIQKEIDRLNEVAKNLNESLIDLQELGKYEQYIKGGSGYIPEAPRDGQAYVRKDGEWVLLSTFL

SEQ ID NO: 5735 - protein, 1241 aa, Artificial Sequence
  SARS-CoV-2/USA/WA-UW31/2020__EPI_ISL_414618 spike protein (1-1211)(K986P_V987P) Foldon construct
MFVFLVLLPLVSSQCVNLTTRTQLPPAYTNSFTRGVYYPDKVFRSSVLHSTQDLFLPFFSNVTWFHAIHVSGTNGTKRFDNPVLPFNDGVYFASTEKSNIIRGWIFGTTLDSKTQSLLIVNNATNVVIKVCEFQFCNDPFLGVYYHKNNKSWMESEFRVYSSANNCTFEYVSQPFLMDLEGKQGNFKNLREFVFKNIDGYFKIYSKHTPINLVRDLPQGFSALEPLVDLPIGINITRFQTLLALHRSYLTPGDSSSGWTAGAAAYYVGYLQPRTFLLKYNENGTITDAVDCALDPLSETKCTLKSFTVEKGIYQTSNFRVQPTESIVRFPNITNLCPFGEVFNATRFASVYAWNRKRISNCVADYSVLYNSASFSTFKCYGVSPTKLNDLCFTNVYADSFVIRGDEVRQIAPGQTGKIADYNYKLPDDFTGCVIAWNSNNLDSKVGGNYNYLYRLFRKSNLKPFERDISTEIYQAGSTPCNGAEGFNCYFPLQSYGFQPTNGVGYQPYRVVVLSFELLHAPATVCGPKKSTNLVKNKCVNFNFNGLTGTGVLTESNKKFLPFQQFGRDIADTTDAVRDPQTLEILDITPCSFGGVSVITPGTNTSNQVAVLYQDVNCTEVPVAIHADQLTPTWRVYSTGSNVFQTRAGCLIGAEHVNNSYECDIPIGAGICASYQTQTNSPRRARSVASQSIIAYTMSLGAENSVAYSNNSIAIPTNFTISVTTEILPVSMTKTSVDCTMYICGDSTECSNLLLQYGSFCTQLNRALTGIAVEQDKNTQEVFAQVKQIYKTPPIKDFGGFNFSQILPDPSKPSKRSFIEDLLFNKVTLADAGFIKQYGDCLGDIAARDLICAQKFNGLTVLPPLLTDEMIAQYTSALLAGTITSGWTFGAGAALQIPFAMQMAYRFNGIGVTQNVLYENQKLIANQFNSAIGKIQDSLSSTASALGKLQDVVNQNAQALNTLVKQLSSNFGAISSVLNDILSRLDPPEAEVQIDRLITGRLQSLQTYVTQQLIRAAEIRASANLAATKMSECVLGQSKRVDFCGKGYHLMSFPQSAPHGVVFLHVTYVPAQEKNFTTAPAICHDGKAHFPREGVFVSNGTHWFVTQRNFYEPQIITTDNTFVSGNCDVVIGIVNNTVYDPLQPELDSFKEELDKYFKNHTSPDVDLGDISGINASVVNIQKEIDRLNEVAKNLNESLIDLQELGKYEQYIKGGSGYIPEAPRDGQAYVRKDGEWVLLSTFL

SEQ ID NO: 5736 - protein, 1241 aa, Artificial Sequence
  SARS-CoV-2/South Korea/SNU01/2020__EPI_ISL_411929 spike protein (1-1211)(K986P_V987P) Foldon construct
MFVFLVLLPLVSSQCVNLTTRTQLPPAYTNSFTRGVYYPDKVFRSSVLHSTQDLFLPFFSNVTWFHAIHVSGTNGTKRFDNPVLPFNDGVYFASTEKSNIIRGWIFGTTLDSKTQSLLIVNNATNVVIKVCEFQFCNDPFLGVYYHKNNKSWMESEFRVYSSANNCTFEYVSQPFLMDLEGKQGNFKNLREFVFKNIDGYFKIYSKHTPINLVRDLPQGFWALEPLVDLPIGINITRFQTLLALHRSYLTPGDSSSGWTAGAAAYYVGYLQPRTFLLKYNENGTITDAVDCALDPLSETKCTLKSFTVEKGIYQTSNFRVQPTESIVRFPNITNLCPFGEVFNATRFASVYAWNRKRISNCVADYSVLYNSASFSTFKCYGVSPTKLNDLCFTNVYADSFVIRGDEVRQIAPGQTGKIADYNYKLPDDFTGCVIAWNSNNLDSKVGGNYNYLYRLFRKSNLKPFERDISTEIYQAGSTPCNGVEGFNCYFPLQSYGFQPTNGVGYQPYRVVVLSFELLHAPATVCGPKKSTNLVKNKCVNFNFNGLTGTGVLTESNKKFLPFQQFGRDIADTTDAVRDPQTLEILDITPCSFGGVSVITPGTNTSNQVAVLYQDVNCTEVPVAIHADQLTPTWRVYSTGSNVFQTRAGCLIGAEHVNNSYECDIPIGAGICASYQTQTNSPRRARSVASQSIIAYTMSLGAENSVAYSNNSIAIPTNFTISVTTEILPVSMTKTSVDCTMYICGDSTECSNLLLQYGSFCTQLNRALTGIAVEQDKNTQEVFAQVKQIYKTPPIKDFGGFNFSQILPDPSKPSKRSFIEDLLFNKVTLADAGFIKQYGDCLGDIAARDLICAQKFNGLTVLPPLLTDEMIAQYTSALLAGTITSGWTFGAGAALQIPFAMQMAYRFNGIGVTQNVLYENQKLIANQFNSAIGKIQDSLSSTASALGKLQDVVNQNAQALNTLVKQLSSNFGAISSVLNDILSRLDPPEAEVQIDRLITGRLQSLQTYVTQQLIRAAEIRASANLAATKMSECVLGQSKRVDFCGKGYHLMSFPQSAPHGVVFLHVTYVPAQEKNFTTAPAICHDGKAHFPREGVFVSNGTHWFVTQRNFYEPQIITTDNTFVSGNCDVVIGIVNNTVYDPLQPELDSFKEELDKYFKNHTSPDVDLGDISGINASVVNIQKEIDRLNEVAKNLNESLIDLQELGKYEQYIKGGSGYIPEAPRDGQAYVRKDGEWVLLSTFL

SEQ ID NO: 5737 - protein, 1241 aa, Artificial Sequence
  SARS-CoV-2/China/WF0004/2020__EPI_ISL_413694 spike protein (1-1211)(K986P_V987P) Foldon construct
MFVFLVLLPLVSSQCVNLTTRTQLPPAYTNSFTRGVYYPDKVFRSSVLHSTQDLFLPFFSNVTWFHAIHVSGTNGTKRFDNPVLPFNDGVYFASTEKSNIIRGWIFGTTLDSKTQSLLIVNNATNVVIKVCEFQFCNDPFLGVYYHKNNKSWTESEFRVYSSANNCTFEYVSQPFLMDLEGKQGNFKNLREFVFKNIDGYFKIYSKHTPINLVRDLPQGFSALEPLVDLPIGINITRFQTLLALHRSYLTPGDSSSGWTAGAAAYYVGYLQPRTFLLKYNENGTITDAVDCALDPLSETKCTLKSFTVEKGIYQTSNFRVQPTESIVRFPNITNLCPFGEVFNATRFASVYAWNRKRISNCVADYSVLYNSASFSTFKCYGVSPTKLNDLCFTNVYADSFVIRGDEVRQIAPGQTGKIADYNYKLPDDFTGCVIAWNSNNLDSKVGGNYNYLYRLFRKSNLKPFERDISTEIYQAGSTPCNGVEGFNCYFPLQSYGFQPTNGVGYQPYRVVVLSFELLHAPATVCGPKKSTNLVKNKCVNFNFNGLTGTGVLTESNKKFLPFQQFGRDIADTTDAVRDPQTLEILDITPCSFGGVSVITPGTNTSNQVAVLYQDVNCTEVPVAIHADQLTPTWRVYSTGSNVFQTRAGCLIGAEHVNNSYECDIPIGAGICASYQTQTNSPRRARSVASQSIIAYTMSLGAENSVAYSNNSIAIPTNFTISVTTEILPVSMTKTSVDCTMYICGDSTECSNLLLQYGSFCTQLNRALTGIAVEQDKNTQEVFAQVKQIYKTPPIKDFGGFNFSQILPDPSKPSKRSFIEDLLFNKVTLADAGFIKQYGDCLGDIAARDLICAQKFNGLTVLPPLLTDEMIAQYTSALLAGTITSGWTFGAGAALQIPFAMQMAYRFNGIGVTQNVLYENQKLIANQFNSAIGKIQDSLSSTASALGKLQDVVNQNAQALNTLVKQLSSNFGAISSVLNDILSRLDPPEAEVQIDRLITGRLQSLQTYVTQQLIRAAEIRASANLAATKMSECVLGQSKRFDFCGKGYHLMSFPQSAPHGVVFLHVTYVPAQEKNFTTAPAICHDGKAHFPREGVFVSNGTHWFVTQRNFYEPQIITTDNTFVSGNCDVVIGIVNNTVYDPLQPELDSFKEELDKYFKNHTSPDVDLGDISGINASVVNIQKEIDRLNEVAKNLNESLIDLQELGKYEQYIKGGSGYIPEAPRDGQAYVRKDGEWVLLSTFL

SEQ ID NO: 5738 - protein, 1241 aa, Artificial Sequence
  SARS-CoV-2/China/WF0028/2020__EPI_ISL_413791 spike protein (1-1211)(K986P_V987P) Foldon construct
MFVFLVLLPLVSSQCVNLTTRTQLPPAYTNSFTRGVYYPDKVFRSSVLHSTQDLFLPFFSNVTWFHAIHVSGTNGTKRFDNPVLPFNDGVYFASTEKSNIIRGWIFGTTLDSKTQSLLIVNNATNVVIKVCEFQFCNDPFLGVYYHKNNKSWMESEFRVYSSANNCTFEYVSQPFLMDLEGKQGNFKNLREFVFKNIDGYFKIYSKHTPINLVRDLPQGFSALEPLVDLPIGINITRFQTLLALHRSYLTPGDSSSGWTAGAAAYYVGYLQPRTFLLKYNENGTITDAVDCALDPLSETKCTLKSFTVEKGIYQTSNFRVQPTESIVRFPNITNLCPFGEVFNATRFASVYAWNRKRISNCVADYSVLYNSASFSTFKCYGVSPTKLNDLCFTNVYADSFVIRGDEVRQIAPGQTGKIADYNYKLPDDFTGCVIAWNSNNLDSKVGGNYNYLYRLFRKSNLKPFERDISTEIYQAGSTPCNGVEGFNCYFPLQSYGFQPTNGVGYQPYRVVVLSFELLHAPATVCGPKKSTNLVKNKCVNFNFNGLTGTGVLTESNKKFLPFQQFGRDIADTTDAVRDPQTLEILDITPCSFGGVSVITPGTNTSNQVAVLYQDVNCTEVPVAIHADQLTPTWRVYSTGSNVFQTRAGCLIGAEHVNNSYECDIPIGAGICASYQTQTNSPRRARSVASQSIIAYTMSLGAENSVAYSNNSIAIPTNFTISVTTEILPVSMTKTSVDCTMYICGDSTECSNLLLQYGSFCTQLNRALTGIAVEQDKNTQEVFAQVKQIYKTPPIKDFGGFNFSQILPDPSKPSKRSFIEDLLFNKVTLADAGFIKQYGDCLGDIAARDLICAQKFNGLTVLPPLLTDEMIAQYTSALLAGTITSGWTFGAGAALQIPFAMQMAYRFNGIGVTQNVLYENQKLIANQFNSAIGKIQDSLSSTASALGKLQDVVNQNAQALNTLVKQLSSNFGAISSVLNDILSRLDPPEAEVQIDRLITGRLQSLQTYVTQQLIRAAEIRASANLAATKMSECVLGQSKRVDFCGKGYHLMSFPQSAPHGVVFLHVTYVPAQEKNFTTAPAICHDGKAHFPREGVFVSNGTHWFVTQRNFYEPQIITTDNTFVSGNCDVVIGIVNNTVYDPLQPELESFKEELDKYFKNHTSPDVDLGDISGINASVVNIQKEIDRLNEVAKNLNESLIDLQELGKYEQYIKGGSGYIPEAPRDGQAYVRKDGEWVLLSTFL

SEQ ID NO: 5739 - protein, 1241 aa, Artificial Sequence
  SARS-CoV-2/2019-nCoV/USA-CruiseA-18/2020__MT159716.1 spike protein (1-1211)(K986P_V987P) Foldon construct
MFVFLVLLPLVSSQCVNLTTRTQLPPAYTNSFTRGVYYPDKVFRSSVLHSTQDLFLPFFSNVTWFHAIHVSGTNGTKRFDNPVLPFNDGVYFASTEKSNIIRGWIFGTTLDSKTQSLLIVNNATNVVIKVCEFQFCNDPFLGVYYHKNNKSWMESELRVYSSANNCTFEYVSQPFLMDLEGKQGNFKNLREFVFKNIDGYFKIYSKHTPINLVRDLPQGFSALEPLVDLPIGINITRFQTLLALHRSYLTPGDSSSGWTAGAAAYYVGYLQPRTFLLKYNENGTITDAVDCALDPLSETKCTLKSFTVEKGIYQTSNFRVQPTESIVRFPNITNLCPFGEVFNATRFASVYAWNRKRISNCVADYSVLYNSASFSTFKCYGVSPTKLNDLCFTNVYADSFVIRGDEVRQIAPGQTGKIADYNYKLPDDFTGCVIAWNSNNLDSKVGGNYNYLYRLFRKSNLKPFERDISTEIYQAGSTPCNGVEGFNCYFPLQSYGFQPTNGVGYQPYRVVVLSFELLHAPATVCGPKKSTNLVKNKCVNFNFNGLTGTGVLTESNKKFLPFQQFGRDIADTTDAVRDPQTLEILDITPCSFGGVSVITPGTNTSNQVAVLYQDVNCTEVPVAIHADQLTPTWRVYSTGSNVFQTRAGCLIGAEHVNNSYECDIPIGAGICASYQTQTNSPRRARSVASQSIIAYTMSLGAENSVAYSNNSIAIPTNFTISVTTEILPVSMTKTSVDCTMYICGDSTECSNLLLQYGSFCTQLNRALTGIAVEQDKNTQEVFAQVKQIYKTPPIKDFGGFNFSQILPDPSKPSKRSFIEDLLFNKVTLADAGFIKQYGDCLGDIAARDLICAQKFNGLTVLPPLLTDEMIAQYTSALLAGTITSGWTFGAGAALQIPFAMQMAYRFNGIGVTQNVLYENQKLIANQFNSAIGKIQDSLSSTASALGKLQDVVNQNAQALNTLVKQLSSNFGAISSVLNDILSRLDPPEAEVQIDRLITGRLQSLQTYVTQQLIRAAEIRASANLAATKMSECVLGQSKRVDFCGKGYHLMSFPQSAPHGVVFLHVTYVPAQEKNFTTAPAICHDGKAHFPREGVFVSNGTHWFVTQRNFYEPQIITTDNTFVSGNCDVVIGIVNNTVYDPLQPELDSFKEELDKYFKNHTSPDVDLGDISGINASVVNIQKEIDRLNEVAKNLNESLIDLQELGKYEQYIKGGSGYIPEAPRDGQAYVRKDGEWVLLSTFL

SEQ ID NO: 5740 - protein, 1241 aa, Artificial Sequence
  SARS-CoV-2/SARS-CoV-2/Yunnan-01/human/2020/CHN__MT049951.1 spike protein (1-1211)(K986P_V987P) Foldon construct
MFVFLVLLPLVSSQCVNLTTRTQLPPANTNSFTRGVYYPDKVFRSSVLHSTQDLFLPFFSNVTWFHAIHVSGTNGTKRFDNPVLPFNDGVYFASTEKSNIIRGWIFGTTLDSKTQSLLIVNNATNVVIKVCEFQFCNDPFLGVYYHKNNKSWMESEFRVYSSANNCTFEYVSQPFLMDLEGKQGNFKNLREFVFKNIDGYFKIYSKHTPINLVRDLPQGFSALEPLVDLPIGINITRFQTLLALHRSYLTPGDSSSGWTAGAAAYYVGYLQPRTFLLKYNENGTITDAVDCALDPLSETKCTLKSFTVEKGIYQTSNFRVQPTESIVRFPNITNLCPFGEVFNATRFASVYAWNRKRISNCVADYSVLYNSASFSTFKCYGVSPTKLNDLCFTNVYADSFVIRGDEVRQIAPGQTGKIADYNYKLPDDFTGCVIAWNSNNLDSKVGGNYNYLYRLFRKSNLKPFERDISTEIYQAGSTPCNGVEGFNCYFPLQSYGFQPTNGVGYQPYRVVVLSFELLHAPATVCGPKKSTNLVKNKCVNFNFNGLTGTGVLTESNKKFLPFQQFGRDIADTTDAVRDPQTLEILDITPCSFGGVSVITPGTNTSNQVAVLYQDVNCTEVPVAIHADQLTPTWRVYSTGSNVFQTRAGCLIGAEHVNNSYECDIPIGAGICASYQTQTNSPRRARSVASQSIIAYTMSLGAENSVAYSNNSIAIPTNFTISVTTEILPVSMTKTSVDCTMYICGDSTECSNLLLQYGSFCTQLNRALTGIAVEQDKNTQEVFAQVKQIYKTPPIKDFGGFNFSQILPDPSKPSKRSFIEDLLFNKVTLADAGFIKQYGDCLGDIAARDLICAQKFNGLTVLPPLLTDEMIAQYTSALLAGTITSGWTFGAGAALQIPFAMQMAYRFNGIGVTQNVLYENQKLIANQFNSAIGKIQDSLSSTASALGKLQDVVNQNAQALNTLVKQLSSNFGAISSVLNDILSRLDPPEAEVQIDRLITGRLQSLQTYVTQQLIRAAEIRASANLAATKMSECVLGQSKRVDFCGKGYHLMSFPQSAPHGVVFLHVTYVPAQEKNFTTAPAICHDGKAHFPREGVFVSNGTHWFVTQRNFYEPQIITTDNTFVSGNCDVVIGIVNNTVYDPLQPELDSFKEELDKYFKNHTSPDVDLGDISGINASVVNIQKEIDRLNEVAKNLNESLIDLQELGKYEQYIKGGSGYIPEAPRDGQAYVRKDGEWVLLSTFL

SEQ ID NO: 5741 - protein, 1241 aa, Artificial Sequence
  SARS-CoV-2/USA/WA-UW292/2020__EPI_ISL_418077 spike protein (1-1211)(K986P_V987P) Foldon construct
MFVFLVLLPLVSSQCVNLTTRTQLPPAYTNSFTRGVYYPDKVFRSSVLHSTQDLFLPFFSNVTWFHAIHVSGTNGTKRFDNPVLPFNDGVYFASTEKSNIIRGWIFGTTLDSKTQSLLIVNNATNVVIKVCEFQFCNDPFLGVYYHKNNKSWMESEFRVYSSANNCTFEYVSQPFLMDLEGKQGNFKNLREFVFKNIDGYFKIYSKHTPINLVRDLPQGFSALEPLVDLPIGINITRFQTLLALHRSYLTPGDSSSGWTAGAAAYYVGYLQPRTFLLKYNENGTITDAVDCALDPLSETKCTLKSFTVEKGIYQTSNFRVQPTESIVRFPNITNLCPFGEVFNATRFASVYAWNRKRISNCVADYSVLYNSASFSTFKCYGVSPTKLNDLCFTNVYADSFVIRGDEVRQIAPGQTGKIADYNYKLPDDFTGCVIAWNSNNLDSKVGGNYNYLYRLFRKSNLKPFERDISTEIYQASSTPCNGVEGFNCYFPLQSYGFQPTNGVGYQPYRVVVLSFELLHAPATVCGPKKSTNLVKNKCVNFNFNGLTGTGVLTESNKKFLPFQQFGRDIADTTDAVRDPQTLEILDITPCSFGGVSVITPGTNTSNQVAVLYQDVNCTEVPVAIHADQLTPTWRVYSTGSNVFQTRAGCLIGAEHVNNSYECDIPIGAGICASYQTQTNSPRRARSVASQSIIAYTMSLGAENSVAYSNNSIAIPTNFTISVTTEILPVSMTKTSVDCTMYICGDSTECSNLLLQYGSFCTQLNRALTGIAVEQDKNTQEVFAQVKQIYKTPPIKDFGGFNFSQILPDPSKPSKRSFIEDLLFNKVTLADAGFIKQYGDCLGDIAARDLICAQKFNGLTVLPPLLTDEMIAQYTSALLAGTITSGWTFGAGAALQIPFAMQMAYRFNGIGVTQNVLYENQKLIANQFNSAIGKIQDSLSSTASALGKLQDVVNQNAQALNTLVKQLSSNFGAISSVLNDILSRLDPPEAEVQIDRLITGRLQSLQTYVTQQLIRAAEIRASANLAATKMSECVLGQSKRVDFCGKGYHLMSFPQSAPHGVVFLHVTYVPAQEKNFTTAPAICHDGKAHFPREGVFVSNGTHWFVTQRNFYEPQIITTDNTFVSGNCDVVIGIVNNTVYDPLQPELDSFKEELDKYFKNHTSPDVDLGDISGINASVVNIQKEIDRLNEVAKNLNESLIDLQELGKYEQYIKGGSGYIPEAPRDGQAYVRKDGEWVLLSTFL

SEQ ID NO: 5742 - protein, 1241 aa, Artificial Sequence
  SARS-CoV-2/Iceland/192/2020__EPI_ISL_417819 spike protein (1-1211)(K986P_V987P) Foldon construct
MFVFFVLLPLVSSQCVNLTTRTQLPPAYTNSFTRGVYYPDKVFRSSVLHSTQDLFLPFFSNVTWFHAIHVSGTNGTKRFDNPVLPFNDGVYFASTEKSNIIRGWIFGTTLDSKTQSLLIVNNATNVVIKVCEFQFCNDPFLGVYYHKNNKSWMESEFRVYSSANNCTFEYVSQPFLMDLEGKQGNFKNLREFVFKNIDGYFKIYSKHTPINLVRDLPQGFSALEPLVDLPIGINITRFQTLLALHRSYLTPGDSSSGWTAGAAAYYVGYLQPRTFLLKYNENGTITDAVDCALDPLSETKCTLKSFTVEKGIYQTSNFRVQPTESIVRFPNITNLCPFGEVFNATRFASVYAWNRKRISNCVADYSVLYNSASFSTFKCYGVSPTKLNDLCFTNVYADSFVIRGDEVRQIAPGQTGKIADYNYKLPDDFTGCVIAWNSNNLDSKVGGNYNYLYRLFRKSNLKPFERDISTEIYQAGSTPCNGVEGFNCYFPLQSYGFQPTNGVGYQPYRVVVLSFELLHAPATVCGPKKSTNLVKNKCVNFNFNGLTGTGVLTESNKKFLPFQQFGRDIADTTDAVRDPQTLEILDITPCSFGGVSVITPGTNTSNQVAVLYQGVNCTEVPVAIHADQLTPTWRVYSTGSNVFQTRAGCLIGAEHVNNSYECDIPIGAGICASYQTQTNSPRRARSVASQSIIAYTMSLGAENSVAYSNNSIAIPTNFTISVTTEILPVSMTKTSVDCTMYICGDSTECSNLLLQYGSFCTQLNRALTGIAVEQDKNTQEVFAQVKQIYKTPPIKDFGGFNFSQILPDPSKPSKRSFIEDLLFNKVTLADAGFIKQYGDCLGDIAARDLICAQKFNGLTVLPPLLTDEMIAQYTSALLAGTITSGWTFGAGAALQIPFAMQMAYRFNGIGVTQNVLYENQKLIANQFNSAIGKIQDSLSSTASALGKLQDVVNQNAQALNTLVKQLSSNFGAISSVLNDILSRLDPPEAEVQIDRLITGRLQSLQTYVTQQLIRAAEIRASANLAATKMSECVLGQSKRVDFCGKGYHLMSFPQSAPHGVVFLHVTYVPAQEKNFTTAPAICHDGKAHFPREGVFVSNGTHWFVTQRNFYEPQIITTDNTFVSGNCDVVIGIVNNTVYDPLQPELDSFKEELDKYFKNHTSPDVDLGDISGINASVVNIQKEIDRLNEVAKNLNESLIDLQELGKYEQYIKGGSGYIPEAPRDGQAYVRKDGEWVLLSTFL

SEQ ID NO: 5743 - protein, 1241 aa, Artificial Sequence
  SARS-CoV-2/Belgium/ULG-6939/2020__EPI_ISL_417020 spike protein (1-1211)(K986P_V987P) Foldon construct
MFVFLVLLPLVSSQCVNLTTRTQLPPAYTNSFTRGVYYPDKVFRSSVLHSTQDLFLPFFSNVTWFHAIHVSGTNGTKRFDNPVLPFNDGVYFASTEKSNIIRGWIFGTTLDSKTQSLLIVNNATNVVIKVCEFQFCNDPFLGVYYHKNNKSWMESEFRVYSSANNCTFEYVSQPFLMDLEGKQGNFKNLREFVFKNIDGYFKIYSKHTPINLVRDLPQGFSALEPLVDLPIGINITRFQTLLALHRSYLTPGDSSSGWTAGAAAYYVGYLQPRTFLLKYNENGTITDAVDCALDPLSETKCTLKSFTVEKGIYQTSNFRVQPTESIVRFPNITNLCPFGEVFNATRFASVYAWNRKRISNCVADYSVLYNSASFSTFKCYGVSPTKLNDLCFTNVYADSFVIRGDEVRQIAPGQTGKIADYNYKLPDDFTGCVIAWNSNNLDSKVGGNYNYLYRLFRKSNLKPFERDISTEIYQAGSTPCNGVEGFNCYFPLQSYGFQPTNGVGYQPYRVVVLSFELLHAPATVCGPKKSTNLVKNKCVNFNFNGLTGTGVLTESNKKFLPFQQFGRDIADTTDAVRDPQTLEILDITPCSFGGVSVITPGTNTSNQVAVLYQGVNCTEVPVAIHADQLTPTWRVYSTGSNVFQTRAGCLIGAEHVNNSYECDIPIGAGICASYQTQTNSPRRARSVASQSIIAYTMSLGAENSVVYSNNSIAIPTNFTISVTTEILPVSMTKTSVDCTMYICGDSTECSNLLLQYGSFCTQLNRALTGIAVEQDKNTQEVFAQVKQIYKTPPIKDFGGFNFSQILPDPSKPSKRSFIEDLLFNKVTLADAGFIKQYGDCLGDIAARDLICAQKFNGLTVLPPLLTDEMIAQYTSALLAGTITSGWTFGAGAALQIPFAMQMAYRFNGIGVTQNVLYENQKLIANQFNSAIGKIQDSLSSTASALGKLQDVVNQNAQALNTLVKQLSSNFGAISSVLNDILSRLDPPEAEVQIDRLITGRLQSLQTYVTQQLIRAAEIRASANLAATKMSECVLGQSKRVDFCGKGYHLMSFPQSAPHGVVFLHVTYVPAQEKNFTTAPAICHDGKAHFPREGVFVSNGTHWFVTQRNFYEPQIITTDNTFVSGNCDVVIGIVNNTVYDPLQPELDSFKEELDKYFKNHTSPDVDLGDISGINASVVNIQKEIDRLNEVAKNLNESLIDLQELGKYEQYIKGGSGYIPEAPRDGQAYVRKDGEWVLLSTFL

SEQ ID NO: 5744 - protein, 1241 aa, Artificial Sequence
  SARS-CoV-2/France/HF2496/2020__EPI_ISL_418231 spike protein (1-1211)(K986P_V987P) Foldon construct
MFVFLVLLPLVSSQCVNLTTRTQLPPAYTNSFTRGVYYPDKVFRSSVLHSTQDLFLPFFSNVTWFHAIHVSGTNGTKRFDNPVLPFNDGVYFASTEKSNIIRGWIFGTTLDSKTQSLLIVNNATNVVIKVCEFQFCNDPFLGVYYHKNNKSWMESEFRVYSSANNCTFEYVSQPFLMDLEGKQGNFKNLREFVFKNIDGYFKIYSKHTPINLVRDLPQGFSALEPLVDLPIGINITRFQTLLALHRSYLTPGDSSSGWTAGAAAYYVGYLQPRTFLLKYNENGTITDAVDCALDPLSETKCTLKSFTVEKGIYQTSNFRVQPTESIVRFPNITNLCPFGEVFNATRFASVYAWNRKRISNCVADYSVLYNSASFSTFKCYGVSPTKLNDLCFTNVYADSFVIRGDEVRQIAPGQTGKIADYNYKLPDDFTGCVIAWNSNNLDSKVGGNYNYLYRLFRKSNLKPFERDISTEIYQAGSTPCNGVEGFNCYFPLQSYGFQPTNGVGYQPYRVVVLSFELLHAPATVCGPKKSTNLVKNKCVNFNFNGLTGTGVLTESNKKFLPFQQFGRDIADTTDAVRDPQTLEILDITPCSFGGVSVITPGTNTSNQVAVLYQGVNCTEVPVAIHADQLTPTWRVYSTGSNVFQTRAGCLIGAEHVNNSYECDIPIGAGICASYQTQTNSPRRARSVASQSIIAYTMSLGAENSVAYSNNSIAIPTNFTISVTTEILPVSMTKTSVDCTMYICGDSTECSNLLLQYGSFCTQLNRALTGIAVEQDKNTQEVFAQVKQIYKTPPIKDFGGFNFSQILPDPSKPSKRSFIEDLLFNKVTLADAGFIKQYGDCLGDIVARDLICAQKFNGLTVLPPLLTDEMIAQYTSALLAGTITSGWTFGAGAALQIPFAMQMAYRFNGIGVTQNVLYENQKLIANQFNSAIGKIQDSLSSTASALGKLQDVVNQNAQALNTLVKQLSSNFGAISSVLNDILSRLDPPEAEVQIDRLITGRLQSLQTYVTQQLIRAAEIRASANLAATKMSECVLGQSKRVDFCGKGYHLMSFPQSAPHGVVFLHVTYVPAQEKNFTTAPAICHDGKAHFPREGVFVSNGTHWFVTQRNFYEPQIITTDNTFVSGNCDVVIGIVNNTVYDPLQPELDSFKEELDKYFKNHTSPDVDLGDISGINASVVNIQKEIDRLNEVAKNLNESLIDLQELGKYEQYIKGGSGYIPEAPRDGQAYVRKDGEWVLLSTFL

SEQ ID NO: 5745 - protein, 1241 aa, Artificial Sequence
  SARS-CoV-2/USA/WA-UW291/2020__EPI_ISL_418076 spike protein (1-1211)(K986P_V987P) Foldon construct
MFVFLVLLPLVSSQCVNLTTRTQLPPAYTNSFTRGVYYPDKVFRSSVLHSTQDLFLPFFSNVTWFHAIHVSGTNGTKRFDNPVLPFNDGVYFASTEKSNIIRGWIFGTTLDSKTQSLLIVNNATNVVIKVCEFQFCNDPFLGVYYHKNNKSWMESEFRVYSSANNCTFEYVSQPFLMDLEGKQGNFKNLREFVFKNIDGYFKIYSKHTPINLVRDLPQGFSALEPLVDLPIGINITRFQTLLALHRSYLTPGDSSSGWTAGAAAYYVGYLQPRTFLLKYNENGTITDAVDCALDPLSETKCTLKSFTVEKGIYQTSNFRVQPTESIVRFPNITNLCPFGEVFNATRFASVYAWNRKRISNCVADYSVLYNSASFSTFKCYGVSPTKLNDLCFTNVYADSFVIRGDEVRQIAPGQTGKIADYNYKLPDDFTGCVIAWNSNNLDSKVGGNYNYLYRLFRKSNLKPFERDISTEIYQAGSTPCNGVEGFNCYFPLQSYGFQPTNGVGYQPYRVVVLSFELLHAPATVCGPKKSTNLVKNKCVNFNFNGLTGTGVLTESNKKFLPFQQFGRDIADTTDAVRDPQTLEILDITPCSFGGVSVITPGTNTSNQVAVLYQGVNCTEVPVAIHADQLTPTWRVYSTGSNVFQTRAGCLIGAEHVNNSYECDIPIGAGICASYQTQTNSPRRARSVASQSIIAYTMSLGAENSVAYSNNSIAIPTNFTISVTTEILPVSMTKTSVDCTMYICGDSTECSNLLLQYGSFCTQLNRALTGIAVEQDKNTQEVFAQVKQIYKTPPIKDFGGFNFSQILPDPSKPSKRSFIEDLLFNKVTLADAGFIKQYGDCLGDIAARDLICAQKFNGLTVLPPLLTDEMIAQYTSALLAGTITSGWTFGAGAALQIPFAMQMAYRFNGIGVTQNVLYENQKLIANQFNSAIGKIQYSLSSTASALGKLQDVVNQNAQALNTLVKQLSSNFGAISSVLNDILSRLDPPEAEVQIDRLITGRLQSLQTYVTQQLIRAAEIRASANLAATKMSECVLGQSKRVDFCGKGYHLMSFPQSAPHGVVFLHVTYVPAQEKNFTTAPAICHDGKAHFPREGVFVSNGTHWFVTQRNFYEPQIITTDNTFVSGNCDVVIGIVNNTVYDPLQPELDSFKEELDKYFKNHTSPDVDLGDISGINASVVNIQKEIDRLNEVAKNLNESLIDLQELGKYEQYIKGGSGYIPEAPRDGQAYVRKDGEWVLLSTFL

SEQ ID NO: 5746 - protein, 1241 aa, Artificial Sequence; identical to SEQ ID NO: 111
  SARS-CoV-2/Portugal/PT0034/2020__EPI_ISL_418019 spike protein (1-1211)(K986P_V987P) Foldon construct

SEQ ID NO: 5747 - protein, 1241 aa, Artificial Sequence
  SARS-CoV-2/Iceland/202/2020__EPI_ISL_417750 spike protein (1-1211)(K986P_V987P) Foldon construct
MFVFLVLLPLVSSQCVNLTTRTQLPPAYTNSFTRGVYYPDKVFRSSVLHSTQDLFLPFFSNVTWFHAIHVSGTNGTKRFDNPVLPFNDGVYFASTEKSNIIRGWIFGTTLDSKTQSLLIVNNATNVVIKVCEFQFCNDPFLGVYYHKNNKSWMESEFRVYSSANNCTFEYVSQPFLMDLEGKQGNFKNLREFVFKNIDGYFKIYSKHTPINLVRDLPQGFSALEPLVDLPIGINITRFQTLLALHRSYLTPGDSSSGWTAGAAAYYVGYLQPRTFLLKYNENGTITDAVDCALDPLSETKCTLKSFTVEKGIYQTSNFRVQPTESIVRFPNITNLCPFGEVFNATRFASVYAWNRKRISNCVADYSVLYNSASFSTFKCYGVSPTKLNDLCFTNVYADSFVIRGDEVRQIAPGQTGKIADYNYKLPDDFTGCVIAWNSNNLDSKVGGNYNYLYRLFRKSNLKPFERDISTEIYQAGSTPCNGVEGFNCYFPLQSYGFQPTNGVGYQPYRVVVLSFELLHAPATVCGPKKSTNLVKNKCVNFNFNGLTGTGVLTESNKKFLPFQQFGRDIADTTDAVRDPQTLEILDITPCSFGGVSVITPGTNTSNQVAVLYQDVNCTEVPVAIHADQLTPTWRVYSTGSNVFQTRAGCLIGAEHVNNSYECDIPIGAGICASYQTQTNSPRRARSVASQSIIAYTMSLGAENSVAYSNNSIAIPTNFTISVTTEILPVSMTKTSVDCTMYICGDSTECSNLLLQYGSFCTQLNRALTGIAVEQDKNTQEVFAQVKQIYKTPPIKDFGGFNFSQILPDPSKPSKRSFIEDLLFNKVTLADAGFIKQYGDCLGDIAARDLICAQKFNGLTVLPPLLTDEMIAQYTSALLAGTITSGWTFGAGAALQIPFAMQMAYRFNGIGVTQNVLYENQKLIANQFNSAIGKIQDSLSSTASALGKLQDVVNQNAQALNTLVKQLSSNFGAISSVLNDILSRLDPPEAEVQIDRLITGRLQSLQTYVTQQLIRAAEIRASANLAATKMSECVLGQSKRVDFCGKGYHLMSFPQSAPHGVVFLHVTYVPAQEKNFTTAPAICHDGKAHFPREGVFVSNGTHWFVTQRNFYEPQIITTDNTFVSGNCDVVIGIVNNTVYDPLQPELDSFKEELDKYFKNHTSPDVDLGDIPGINASVVNIQKEIDRLNEVAKNLNESLIDLQELGKYEQYIKGGSGYIPEAPRDGQAYVRKDGEWVLLSTFL

SEQ ID NO: 5748 - protein, 1241 aa, Artificial Sequence
  SARS-CoV-2/USA/WA-UW261/2020__EPI_ISL_418046 spike protein (1-1211)(K986P_V987P) Foldon construct
MFVFLVLLPLVSSQCVNLTTRTQLPPAYTNSFTRGVYYPDKVFRSSVLHSTQDLFLPFFSNVTWFHAIHVSGTNGTKRFDNPVLPFNDGVYFASTEKSNIIRGWIFGTTLDSKTQSLLIVNNATNVVIKVCEFQFCNDPFLGVYYHKNNKSWMESEFRVYSSANNCTFEYVSQPFLMDLEGKQGNFKNLREFVFKNIDGYFKIYSKHTPINLVRDLPQGFSALEPLVDLPIGINITRFQTLLALHRSYLTPGDSSSGWTAGAAAYYVGYLQPRTFLLKYNENGTITDAVDCALDPLSETKCTLKSFTVEKGIYQTSNFRVQPTESIVRFPNITNLCPFGEVFNATRFTSVYAWNRKRISNCVADYSVLYNSASFSTFKCYGVSPTKLNDLCFTNVYADSFVIRGDEVRQIAPGQTGKIADYNYKLPDDFTGCVIAWNSNNLDSKVGGNYNYLYRLFRKSNLKPFERDISTEIYQAGSTPCNGVEGFNCYFPLQSYGFQPTNGVGYQPYRVVVLSFELLHAPATVCGPKKSTNLVKNKCVNFNFNGLTGTGVLTESNKKFLPFQQFGRDIADTTDAVRDPQTLEILDITPCSFGGVSVITPGTNTSNQVAVLYQDVNCTEVPVAIHADQLTPTWRVYSTGSNVFQTRAGCLIGAEHVNNSYECDIPIGAGICASYQTQTNSPRRARSVASQSIIAYTMSLGAENSVAYSNNSIAIPTNFTISVTTEILPVSMTKTSVDCTMYICGDSTECSNLLLQYGSFCTQLNRALTGIAVEQDKNTQEVFAQVKQIYKTPPIKDFGGFNFSQILPDPSKPSKRSFIEDLLFNKVTLADAGFIKQYGDCLGDIAARDLICAQKFNGLTVLPPLLTDEMIAQYTSALLAGTITSGWTFGAGAALQIPFAMQMAYRFNGIGVTQNVLYENQKLIANQFNSAIGKIQDSLSSTASALGKLQDVVNQNAQALNTLVKQLSSNFGAISSVLNDILSRLDPPEAEVQIDRLITGRLQSLQTYVTQQLIRAAEIRASANLAATKMSECVLGQSKRVDFCGKGYHLMSFPQSAPHGVVFLHVTYVPAQEKNFTTAPAICHDGKAHFPREGVFVSNGTHWFVTQRNFYEPQIITTDNTFVSGNCDVVIGIVNNTVYDPLQPELDSFKEELDKYFKNHTSPDVDLGDISGINASVVNIQKEIDRLNEVAKNLNESLIDLQELGKYEQYIKGGSGYIPEAPRDGQAYVRKDGEWVLLSTFL

SEQ ID NO: 5749 - protein, 1241 aa, Artificial Sequence
  SARS-CoV-2/Portugal/PT0035/2020__EPI_ISL_418020 spike protein (1-1211)(K986P_V987P) Foldon construct
MFVFLVLLPLVSSQCVNLTTRTQLPPAYTNSFTRGVYYPDKVFRSSVLHSTQDLFLPFFSNVTWFHAIHVSGTNGTKRFDNPVLPFNDGVYFASTEKSNIIRGWIFGTTLDSKTQSLLIVNNATNVVIKVCEFQFCNDPFLGVYYHKNNKSWMESEFRVYSSANNCTFEYVSQPFLMDLEGKQGNFKNLREFVFKNIDGYFKIYSKHTPINLVRDLPQGFSALEPLVDLPIGINITRFQTLLALHRSYLTPGDSSSGWTAGAAAYYVGYLQPRTFLLKYNENGTITDAVDCALDPLSETKCTLKSFTVEKGIYQTSNFRVQPTESIVRFPNITNLCPFGEVFNATRFASVYAWNRKRISNCVADYSVLYNSASFSTFKCYGVSPTKLNDLCFTNVYADSFVIRGDEVRQIAPGQTGKIADYNYKLPDDFTGCVIAWNSNNLDSKVGGNYNYLYRLFRKSNLKPFERDISTEIYQAGSTPCNGVEGFNCYFPLQSYGFQPTNGVGYQPYRVVVLSFELLHAPATVCGPKKSTNLVKNKCVNFNFNGLTGTGVLTESNKKFLPFQQFGRDIADTTDAVRDPQTLEILDITPCSFGGVSVITPGTNTSNQVAVLYQDVNCTEVPVAIHADQLTPTWRVYSTGSNVFQTRAGCLIGAEHVNNSYECDIPIGAGICASYQTQTNSPRRARSVASQSIIAYTMSLGAENSVAYSNNSIAIPTNFTISVTTEILPVSMTKTSVDCTMYICGDSTECSNLLLQYGSFCTQLNRALTGIAVEQDKNTQEVFAQVKQIYKTPPIKDFGGFNFSQILPDPSKPSKRSFIEDLLFNKVTLADAGFIKQYGDCLGDISARDLICAQKFNGLTVLPPLLTDEMIAQYTSALLAGTITSGWTFGAGAALQIPFAMQMAYRFNGIGVTQNVLYENQKLIANQFNSAIGKIQDSLSSTASALGKLQDVVNQNAQALNTLVKQLSSNFGAISSVLNDILSRLDPPEAEVQIDRLITGRLQSLQTYVTQQLIRAAEIRASANLAATKMSECVLGQSKRVDFCGKGYHLMSFPQSAPHGVVFLHVTYVPAQEKNFTTAPAICHDGKAHFPREGVFVSNGTHWFVTQRNFYEPQIITTDNTFVSGNCDVVIGIVNNTVYDPLQPELDSFKEELDKYFKNHTSPDVDLGDISGINASVVNIQKEIDRLNEVAKNLNESLIDLQELGKYEQYIKGGSGYIPEAPRDGQAYVRKDGEWVLLSTFL

SEQ ID NO: 5750 - protein, 1241 aa, Artificial Sequence
  SARS-CoV-2/USA/NY-NYUMC7/2020__EPI_ISL_418192 spike protein (1-1211)(K986P_V987P) Foldon construct
MFVFLVLLPLVSSQCVNLTTRTQLPPAYTNSFTRGVYYPDKVFRSSVLHSTQDLFLPFFSNVTWFHAIHVSGTNGTKRFDNPVLPFNDGVYFASTEKSNIIRGWIFGTTLDSKTQSLLIVNNATNVVIKVCEFQFCNDPFLGVYHHKNNKSWMESEFRVYSSANNCTFEYVSQPFLMDLEGKQGNFKNLREFVFKNIDGYFKIYSKHTPINLVRDLPQGFSALEPLVDLPIGINITRFQTLLALHRSYLTPGDSSSGWTAGAAAYYVGYLQPRTFLLKYNENGTITDAVDCALDPLSETKCTLKSFTVEKGIYQTSNFRVQPTESIVRFPNITNLCPFGEVFNATRFASVYAWNRKRISNCVADYSVLYNSASFSTFKCYGVSPTKLNDLCFTNVYADSFVIRGDEVRQIAPGQTGKIADYNYKLPDDFTGCVIAWNSNNLDSKVGGNYNYLYRLFRKSNLKPFERDISTEIYQAGSTPCNGVEGFNCYFPLQSYGFQPTNGVGYQPYRVVVLSFELLHAPATVCGPKKSTNLVKNKCVNFNFNGLTGTGVLTESNKKFLPFQQFGRDIADTTDAVRDPQTLEILDITPCSFGGVSVITPGTNTSNQVAVLYQGVNCTEVPVAIHADQLTPTWRVYSTGSNVFQTRAGCLIGAEHVNNSYECDIPIGAGICASYQTQTNSPRRARSVASQSIIAYTMSLGAENSVAYSNNSIAIPTNFTISVTTEILPVSMTKTSVDCTMYICGDSTECSNLLLQYGSFCTQLNRALTGIAVEQDKNTQEVFAQVKQIYKTPPIKDFGGFNFSQILPDPSKPSKRSFIEDLLFNKVTLADAGFIKQYGDCLGDIAARDLICAQKFNGLTVLPPLLTDEMIAQYTSALLAGTITSGWTFGAGAALQIPFAMQMAYRFNGIGVTQNVLYENQKLIANQFNSAIGKIQDSLSSTASALGKLQDVVNQNAQALNTLVKQLSSNFGAISSVLNDILSRLDPPEAEVQIDRLITGRLQSLQTYVTQQLIRAAEIRASANLAATKMSECVLGQSKRVDFCGKGYHLMSFPQSAPHGVVFLHVTYVPAQEKNFTTAPAICHDGKAHFPREGVFVSNGTHWFVTQRNFYEPQIITTDNTFVSGNCDVVIGIVNNTVYDPLQPELDSFKEELDKYFKNHTSPDVDLGDISGINASVVNIQKEIDRLNEVAKNLNESLIDLQELGKYEQYIKGGSGYIPEAPRDGQAYVRKDGEWVLLSTFL

SEQ ID NO: 5751 - protein, 1241 aa, Artificial Sequence
  SARS-CoV-2/Iceland/189/2020__EPI_ISL_417709 spike protein (1-1211)(K986P_V987P) Foldon construct
MFVFLVLLPLVSSQCVNLTTRTQLPPAYTNSFTRGVYYPDKVFRSSVLHSTQDLFLPFFSNVTWFHAIHVSGTNGTKRFDNPVLPFNDGVYFASTEKSNIIRGWIFGTTLDSKTQSLLIVNNATNVVIKVCEFQFCNDPFLGVYYHKNNKSWMESEFRVYSSANNCTFEYVSQPFLMDLEGKQGNFKNLREFVFKNIDGYFKIYSKHTPINLVRDLPQGFSALEPLVDLPIGINITRFQTLLALHRSYLTPGDSSSGWTAGAAAYYVGYLQPRTFLLKYNENGTITDAVDCALDPLSETKCTLKSFTVEKGIYQTSNFRVQPTESIVRFPNITNLCPFGEVFNATRFASVYAWNRKRISNCVADYSVLYNSASFSTFKCYGVSPTKLNDLCFTNVYADSFVIRGDEVRQIAPGQTGKIADYNYKLPDDFTGCVIAWNSNNLDSKVGGNYNYLYRLFRKSNLKPFERDISTEIYQAGSTPCNGVEGFNCYFPLQSYGFQPTNGVGYQPYRVVVLSFELLHAPATVCGPKKSTNLVKNKCVNFNFNGLTGTGVLTESNKKFLPFQQFGRDIADTTDAVRDPQTLEILDITPCSFGGVSVITPGTNTSNQVAVLYQGVNCTEVPVAIHADQLTPTWRVYSTGSNVFQTRAGCLIGAEHVNNSYECDIPIGAGICASYQTQTNSPRRARSVASQSIIAYTMSLGAENSVAYSNNSIAIPTNFTISVTTEILPVSMTKTSVDCTMYICGDSTECSNLLLQYGSFCTQLNRALTGIAVEQDKNTQEVFAQVKQIYKTPPIKDFGGFNFSQILPDPSKPSKRSFIEDLLFNKVTLADAGFTKQYGDCLGDIAARDLICAQKFNGLTVLPPLLTDEMIAQYTSALLAGTITSGWTFGAGAALQIPFAMQMAYRFNGIGVTQNVLYENQKLIANQFNSAIGKIQDSLSSTASALGKLQDVVNQNAQALNTLVKQLSSNFGAISSVLNDILSRLDPPEAEVQIDRLITGRLQSLQTYVTQQLIRAAEIRASANLAATKMSECVLGQSKRVDFCGKGYHLMSFPQSAPHGVVFLHVTYVPAQEKNFTTAPAICHDGKAHFPREGVFVSNGTHWFVTQRNFYEPQIITTDNTFVSGNCDVVIGIVNNTVYDPLQPELDSFKEELDKYFKNHTSPDVDLGDISGINASVVNIQKEIDRLNEVAKNLNESLIDLQELGKYEQYIKGGSGYIPEAPRDGQAYVRKDGEWVLLSTFL

SEQ ID NO: 5752 - protein, 1241 aa, Artificial Sequence
  SARS-CoV-2/Australia/NSW56/2020__EPI_ISL_417408 spike protein (1-1211)(K986P_V987P) Foldon construct
MFVFLVLLPLVSSQCVNLTTRTQLPPAYTNSFTRGVYYPDKVFRSSVLHSTQDLFLPFFSNVTWFHAIHVSGTNGTKRFDNPVLPFNDGVYFASTEKSNIIRGWIFGTTLDSKTQSLLIVNNATNVVIKVCEFQFCNDPFLGVYYHKNNKSWMESEFRVYSSANNCTFEYVSQPFLMDLEGKQGNFKNLREFVFKNIDGYFKIYSKHTPINLVRDLPQGFSALEPLVDLPIGINITRFQTLLALHRSYLTPGDSSSGWTAGAAAYYVGYLQPRTFLLKYNENGTITDAVDCALDPLSETKCTLKSFTVEKGIYQTSNFRVQPTESIVRFPNITNLCPFGEVFNATRFASVYAWNRKRISNCVADYSVLYNSASFSTFKCYGVSPTKLNDLCFTNVYADSFVIRGDEVRQIAPGQTGKIADYNYKLPDDFTGCVIAWNSNNLDSKVGGNYNYLYRLFRKSNLKPFERDISTEIYQAGSTPCNGVEGFNCYFPLQSYGFQPTNGVGYQPYRVVVLSFELLHAPATVCGPKKSTNLVKNKCVNFNFNGLTGTGVLTESNKKFLPFQQFGRDIADTTDAVRDPQTLEILDITPCSFGGVSVITPGTNTSNQVAVLYQDVNCTEVPVAIHADQLTPTWRVYSTGSNVFQTRAGCLIGAEHVNNSYECDIPIGAGICASYQTQTNSPRRARSVASQSIIAYTMSLGAENSVAYSNNSIAIPTNFTISVTTEILPVSMTKTSVDCTMYICGDSTECSNLLLQYGSFCTQLNRALTGIAVEQDKNTQEVFAQVKQIYKTPPIKDFGGFNFSQILPDSSKPSKRSFIEDLLFNKVTLADAGFIKQYGDCLGDIAARDLICAQKFNGLTVLPPLLTDEMIAQYTSALLAGTITSGWTFGAGAALQIPFAMQMAYRFNGIGVTQNVLYENQKLIANQFNSAIGKIQDSLSSTASALGKLQDVVNQNAQALNTLVKQLSSNFGAISSVLNDILSRLDPPEAEVQIDRLITGRLQSLQTYVTQQLIRAAEIRASANLAATKMSECVLGQSKRVDFCGKGYHLMSFPQSAPHGVVFLHVTYVPAQEKNFTTAPAICHDGKAHFPREGVFVSNGTHWFVTQRNFYEPQIITTDNTFVSGNCDVVIGIVNNTVYDPLQPELDSFKEELDKYFKNHTSPDVDLGDISGINASVVNIQKEIDRLNEVAKNLNESLIDLQELGKYEQYIKGGSGYIPEAPRDGQAYVRKDGEWVLLSTFL

SEQ ID NO: 5753 - protein, 1241 aa, Artificial Sequence
  SARS-CoV-2/Iceland/280/2020__EPI_ISL_417608 spike protein (1-1211)(K986P_V987P) Foldon construct
MFVFLVLLPLVSSQCVNLTTRTQLPPAYTNSFTRGVYYPDKVFRSSVLHSTQDLFLPFFSNVTWFHAIHVSGTNGTKRFDNPVLPFNDGVYFASTEKSNIIRGWIFGTTLDSKTQSLLIVNNATNVVIKVCEFQFCNDPFLGVYYHKNNKSWMESEFRVYSSANNCTFEYVSQPFLMDLEGKQGNFKNLREFVFKNIDGYFKIYSKHTPINLVRDLPQGFSALEPLVDLPIGINITRFQTLLALHRSYLTPGDSSSGWTAGAAAYYVGYLQPRTFLLKYNENGTITDAVDCALDPLSETKCTLKSFTVEKGIYQTSNFRVQPTESIVRFPNITNLCPFGEVFNATRFASVYAWNRKRISNCVADYSVLYNSASFSTFKCYGVSPTKLNDLCFTNVYADSFVIRGDEVRQIAPGQTGKIADYNYKLPDDFTGCVIAWNSNNLDSKVGGNYNYLYRLFRKSNLKPFERDISTEIYQAGSTPCNGVEGFNCYFPLQSYGFQPTNGVGYQPYRVVVLSFELLHAPATVCGPKKSTNLVKNKCVNFNFNGLTGTGVLTESNKKFLPFQQFGRDIADTTDAVRDPQTLEILDITPCSFGGVSVITPGTNTSNQVAVLYQGVNCTEVPVAIHADQLTPTWRVYSTGSNVFQTRAGCLIGAEHVNNSYECDIPIGAGICASYHTQTNSPRRARSVASQSIIAYTMSLGAENSVAYSNNSIAIPTNFTISVTTEILPVSMTKTSVDCTMYICGDSTECSNLLLQYGSFCTQLNRALTGIAVEQDKNTQEVFAQVKQIYKTPPIKDFGGFNFSQILPDPSKPSKRSFIEDLLFNKVTLADAGFIKQYGDCLGDIAARDLICAQKFNGLTVLPPLLTDEMIAQYTSALLAGTITSGWTFGAGAALQIPFAMQMAYRFNGIGVTQNVLYENQKLIANQFNSAIGKIQDSLSSTASALGKLQDVVNQNAQALNTLVKQLSSNFGAISSVLNDILSRLDPPEAEVQIDRLITGRLQSLQTYVTQQLIRAAEIRASANLAATKMSECVLGQSKRVDFCGKGYHLMSFPQSAPHGVVFLHVTYVPAQEKNFTTAPAICHDGKAHFPREGVFVSNGTHWFVTQRNFYEPQIITTDNTFVSGNCDVVIGIVNNTVYDPLQPELDSFKEELDKYFKNHTSPDVDLGDISGINASVVNIQKEIDRLNEVAKNLNESLIDLQELGKYEQYIKGGSGYIPEAPRDGQAYVRKDGEWVLLSTFL

SEQ ID NO: 5754 - protein, 1241 aa, Artificial Sequence; identical to SEQ ID NO: 111
  SARS-CoV-2/Iceland/247/2020__EPI_ISL_417575 spike protein (1-1211)(K986P_V987P) Foldon construct

SEQ ID NO: 5755 - protein, 1241 aa, Artificial Sequence
  SARS-CoV-2/Iceland/238/2020__EPI_ISL_417566 spike protein (1-1211)(K986P_V987P) Foldon construct
MFVFLVLLPLVSSQCVNLTTRTQLPPAYTNSFTRGVYYPDKVFRSSVLHSTQDLFLPFFSNVTWFHAIHVSGTNGTKRFDNPVLPFNDGVYFASTEKSNIIRGWIFGTTLDSKTQSLLIVNNATNVVIKVCEFQFCNDPFLGVYYHKNNKSWMESEFRVYSSANNCTFEYVSQPFLMDLEGKQGNFKNLREFVFKNIDGYFKIYSKHTPINLVRDLPQGFSALEPLVDLPIGINITRFQTLLALHRSYLTPGDSSSGWTAGAAAYYVGYLQPRTFLLKYNENGTITDAVDCALDPLSETKCTLKSFTVEKGIYQTSNFRVQPTESIVRFPNITNLCPFGEVFNATRFASVYAWNRKRISNCVADYSVLYNSASFSTFKCYGVSPTKLNDLCFTNVYADSFVIRGDEVRQIAPGQTGKIADYNYKLPDDFTGCVIAWNSNNLDSKVGGNYNYLYRLFRKSNLKPFERDISTEIYQAGSTPCNGVEGFNCYFPLQSYGFQPTNGVGYQPYRVVVLSFELLHAPATVCGPKKSTNLVKNKCVNFNFNGLTGTGVLTESNKKFLPFQQFGRDIADTTDAVRDPQTLEILDITPCSFGGVSVITPGTNTSNQVAVLYQGVNCTEVPVAIHADQLTPTWRVYSTGSNVFQTRAGCLIGAEHVNNSYECDIPIGAGICASYQTQTNSPRRARSVASQSIIAYTMSLGAENSVAYSNNSIAIPTNFTISVTTEILPVSMTKTSVDCTMYICGDSTECSNLLLQYGSFCTQLNRALTGIAVEQDKNTQEVFAQVKQIYKTPPIKDFGGFNFSQILPDPSKPSKRSFIEDLLFNKVTLADVGFIKQYGDCLGDIAARDLICAQKFNGLTVLPPLLTDEMIAQYTSALLAGTITSGWTFGAGAALQIPFAMQMAYRFNGIGVTQNVLYENQKLIANQFNSAIGKIQDSLSSTASALGKLQDVVNQNAQALNTLVKQLSSNFGAISSVLNDILSRLDPPEAEVQIDRLITGRLQSLQTYVTQQLIRAAEIRASANLAATKMSECVLGQSKRVDFCGKGYHLMSFPQSAPHGVVFLHVTYVPAQEKNFTTAPAICHDGKAHFPREGVFVSNGTHWFVTQRNFYEPQIITTDNTFVSGNCDVVIGIVNNTVYDPLQPELDSFKEELDKYFKNHTSPDVDLGDISGINASVVNIQKEIDRLNEVAKNLNESLIDLQELGKYEQYIKGGSGYIPEAPRDGQAYVRKDGEWVLLSTFL

SEQ ID NO: 5756 - protein, 1241 aa, Artificial Sequence
  SARS-CoV-2/Greece/16/2020__EPI_ISL_418265 spike protein (1-1211)(K986P_V987P) Foldon construct
MFVFLVLLPLVSSQCVNLTTRTQLPPAYTNSFTRGVYYPDKVFRSSVLHSTQDLFLPFFSNVTWFHAIHVSGTNGTKRFDNPVLPFNDGVYFASTEKSNIIRGWIFGTTLDSKTQSLLIVNNATNVVIKVCEFQFCNDPFLGVYYHKNNKSWMESEFRVYSSANNCTFEYVSQPFLMDLEGKQGNFKNLREFVFKNVDGYFKIYSKHTPINLVRDLPQGFSALEPLVDLPIGINITRFQTLLALHRSYLTPGDSSSGWTAGAAAYYVGYLQPRTFLLKYNENGTITDAVDCALDPLSETKCTLKSFTVEKGIYQTSNFRVQPTESIVRFPNITNLCPFGEVFNATRFASVYAWNRKRISNCVADYSVLYNSASFSTFKCYGVSPTKLNDLCFTNVYADSFVIRGDEVRQIAPGQTGKIADYNYKLPDDFTGCVIAWNSNNLDSKVGGNYNYLYRLFRKSNLKPFERDISTEIYQAGSTPCNGVEGFNCYFPLQSYGFQPTNGVGYQPYRVVVLSFELLHAPATVCGPKKSTNLVKNKCVNFNFNGLTGTGVLTESNKKFLPFQQFGRDIADTTDAVRDPQTLEILDITPCSFGGVSVITPGTNTSNQVAVLYQDVNCTEVPVAIHADQLTPTWRVYSTGSNVFQTRAGCLIGAEHVNNSYECDIPIGAGICASYQTQTNSPRRARSVASQSIIAYTMSLGAENSVAYSNNSIAIPTNFTISVTTEILPVSMTKTSVDCTMYICGDSTECSNLLLQYGSFCTQLNRALTGIAVEQDKNTQEVFAQVKQIYKTPPIKDFGGFNFSQILPDPSKPSKRSFIEDLLFNKVTLADAGFIKQYGDCLGDIAARDLICAQKFNGLTVLPPLLTDEMIAQYTSALLAGTITSGWTFGAGAALQIPFAMQMAYRFNGIGVTQNVLYENQKLIANQFNSAIGKIQDSLSSTASALGKLQDVVNQNAQALNTLVKQLSSNFGAISSVLNDILSRLDPPEAEVQIDRLITGRLQSLQTYVTQQLIRAAEIRASANLAATKMSECVLGQSKRVDFCGKGYHLMSFPQSAPHGVVFLHVTYVPAQEKNFTTAPAICHDGKAHFPREGVFVSNGTHWFVTQRNFYEPQIITTDNTFVSGNCDVVIGIVNNTVYDPLQPELDSFKEELDKYFKNHTSPDVDLGDISGINASVVNIQKEIDRLNEVAKNLNESLIDLQELGKYEQYIKGGSGYIPEAPRDGQAYVRKDGEWVLLSTFL

SEQ ID NO: 5757 - protein, 1241 aa, Artificial Sequence
  SARS-CoV-2/Iceland/319/2020__EPI_ISL_417648 spike protein (1-1211)(K986P_V987P) Foldon construct
MFVFLVLLPLVSSQCVNLTTRTQLPPAYTNSFTRGVYYPDKVFRSSVLHSTQDLFLPFFSNVTWFHAIHVSGTNGTKRFDNPVLPFNDGVYFASTEKSNIIRGWIFGTTLDSKTQSLLIVNNATNVVIKVCEFQFCNDPFLGVYYHKNNKSWMESEFRVYSSANNCTFEYVSQPFLIDLEGKQGNFKNLREFVFKNIDGYFKIYSKHTPINLVRDLPQGFSALEPLVDLPIGINITRFQTLLALHRSYLTPGDSSSGWTAGAAAYYVGYLQPRTFLLKYNENGTITDAVDCALDPLSETKCTLKSFTVEKGIYQTSNFRVQPTESIVRFPNITNLCPFGEVFNATRFASVYAWNRKRISNCVADYSVLYNSASFSTFKCYGVSPTKLNDLCFTNVYADSFVIRGDEVRQIAPGQTGKIADYNYKLPDDFTGCVIAWNSNNLDSKVGGNYNYLYRLFRKSNLKPFERDISTEIYQAGSTPCNGVEGFNCYFPLQSYGFQPTNGVGYQPYRVVVLSFELLHAPATVCGPKKSTNLVKNKCVNFNFNGLTGTGVLTESNKKFLPFQQFGRDIADTTDAVRDPQTLEILDITPCSFGGVSVITPGTNTSNQVAVLYQGVNCTEVPVAIHADQLTPTWRVYSTGSNVFQTRAGCLIGAEHVNNSYECDIPIGAGICASYQTQTNSPRRARSVASQSIIAYTMSLGAENSVAYSNNSIAIPTNFTISVTTEILPVSMTKTSVDCTMYICGDSTECSNLLLQYGSFCTQLNRALTGIAVEQDKNTQEVFAQVKQIYKTPPIKDFGGFNFSQILPDPSKPSKRSFIEDLLFNKVTLADAGFIKQYGDCLGDIAARDLICAQKFNGLTVLPPLLTDEMIAQYTSALLAGTITSGWTFGAGAALQIPFAMQMAYRFNGIGVTQNVLYENQKLIANQFNSAIGKIQDSLSSTASALGKLQDVVNQNAQALNTLVKQLSSNFGAISSVLNDILSRLDPPEAEVQIDRLITGRLQSLQTYVTQQLIRAAEIRASANLAATKMSECVLGQSKRVDFCGKGYHLMSFPQSAPHGVVFLHVTYVPAQEKNFTTAPAICHDGKAHFPREGVFVSNGTHWFVTQRNFYEPQIITTDNTFVSGNCDVVIGIVNNTVYDPLQPELDSFKEELDKYFKNHTSPDVDLGDISGINASVVNIQKEIDRLNEVAKNLNESLIDLQELGKYEQYIKGGSGYIPEAPRDGQAYVRKDGEWVLLSTFL

SEQ ID NO: 5758 - protein, 1241 aa, Artificial Sequence
  SARS-CoV-2/Congo/94/2020__EPI_ISL_417947 spike protein (1-1211)(K986P_V987P) Foldon construct
MFVFLVLLPLVSSQCVNLTTRTQLPPAYTNSFTRGVYYPDKVFRSSVLHSTQDLFLPFFSNVTWFHAIHVSGTNGTKRFDNPVLPFNDGVYFASTEKSNIIRGWIFGTTLDSKTQSLLIVNNATNVVIKVCEFQFCNDPFLGVYYHKNNKSWMESEFRVYSSANNCTFEYVSQPFLMDLEGKQGNFKNLREFVFKNIDGYFKIYSKHTPINLVRDLPQGFSALEPLVDLPIGINITRFQTLLALHRSYLTPGDSSSGWTAGAAAYYVGYLQPRTFLLKYNENGTITDAVDCALDPLSETKCTLKSFTVEKGIYQTSNFRVQPTESIVRFPNITNLCPFGEVFNATRFASVYAWNRKRISNCVADYSVLYNSASFSTFKCYGVSPTKLNDLCFTNVYADSFVIRGDEVRQIAPGQTGKIADYNYKLPDDFTGCVIAWNSNNLDSKVGGNYNYLYRLFRKSNLKPFERDISTEIYQAGSTPCNGVEGFNCYFPLQSYGFQPTNGVGYQPYRVVVLSFELLHAPATVCGPKKSTNLVKNKCVNFNFNGLTGTGVLTESNKKFLPFQQFGRDIADTTDAVRDPQTLEILDITPCSFGGVSVITPGTNTSNQVAVLYQGVNCTEVPVAIHADQLTPTWRVYSTGSNVFQTRAGCLIGAEHVNNSYECDIPIGAGICASYQTQTNSPRRARSVASQSIIAYTMSLGAENSVAYSNNSIAIPTNFTISVTTEILPVSMTKTSVDCTMYICGDSTECSNLLLQYGSFCTQLNRALTGIAVEQDKNTQEVFAQVKQIYKTPPIKDFGGFNFSQILPDPSKPSKRSFIEDILFNKVTLADAGFIKQYGDCLGDIAARDLICAQKFNGLTVLPPLLTDEMIAQYTSALLAGTITSGWTFGAGAALQIPFAMQMAYRFNGIGVTQNVLYENQKLIANQFNSAIGKIQDSLSSTASALGKLQDVVNQNAQALNTLVKQLSSNFGAISSVLNDILSRLDPPEAEVQIDRLITGRLQSLQTYVTQQLIRAAEIRASANLAATKMSECVLGQSKRVDFCGKGYHLMSFPQSAPHGVVFLHVTYVPAQEKNFTTAPAICHDGKAHFPREGVFVSNGTHWFVTQRNFYEPQIITTDNTFVSGNCDVVIGIVNNTVYDPLQPELDSFKEELDKYFKNHTSPDVDLGDISGINASVVNIQKEIDRLNEVAKNLNESLIDLQELGKYEQYIKGGSGYIPEAPRDGQAYVRKDGEWVLLSTFL

SEQ ID NO: 5759 - protein, 1241 aa, Artificial Sequence
  SARS-CoV-2/Congo/158/2020__EPI_ISL_417950 spike protein (1-1211)(K986P_V987P) Foldon construct
MFVFLVLLPLVSSQCVNLTTRTQLPPAYTNSFTRGVYYPDKVFRSSVLHSTQDLFLPFFSNVTWFHAIHVSGTNGTKRFDNPVLPFNDGVYFASTEKSNIIRGWIFGTTLDSKTQSLLIVNNATNVVIKVCEFQFCNDPFLGVYYHKNNKSWMESEFRVYSSANNCTFEYVSQPFLMDLEGKQGNFKNLREFVFKNIDGYFKIYSKHTPINLVRDLPQGFSALEPLVDLPIGINITRFQTLLALHRSYLTPGDSSSGWTAGAAAYYVGYLQPRTFLLKYNENGTITDAVDCALDPLSETKCTLKSFTVEKGIYQTSNFRVQPTESIVRFPNITNLCPFGEVFNATRFASVYAWNRKRISNCVADYSVLYNSASFSTFKCYGVSPTKLNDLCFTNVYADSFVIRGDEVRQIAPGQTGKIADYNYKLPDDFTGCVIAWNSNNLDSKVGGNYNYLYRLFRKSNLKPFERDISTEIYQAGSTPCNGVEGFNCYFPLQSYGFQPTNGVGYQPYRVVVLSFELLHAPATVCGPKKSTNLVKNKCVNFNFNGLTGTGVLTESNKKFLPFQQFGRDIADTTDAVRDPQTLEILDITPCSFGGVSVITPGTNTSNQVAVLYQDVNCTEVPVAIHADQLTPTWRVYSTGSNVFQTRAGCLIGAEHVNNSYECDIPIGAGICASYQTQTNSPRRARSVASQSIIAYTMSLGAENSVAYSNNSIAIPTNFTISVTTEILPVSMTKTSVDCTMYICGDSTECSNLLLQYGSFCTQLNRALTGIAVEQDKNTQEVFAQVKQIYKTPPIKDFGGFNFSQILPDPSKPSKRSFIEDLLFNKVTLADAGFIKQYGDCLGDIAARDLICAQKFNGLTVLPPLLTDEMIAQYTSALLAGTITSGWTFGAGAALQIPFAMQMAYRFNGIGVTQNVLYENQKLIANQFNSAIGKIQDSLSSTASALGKLQDVVNQNAQALNTLVKQLSSNFGAISSVLNDILSRLDPPEAEVQIDRLITGRLQSLQTYVTQQLIRAAEIRASANLAATKMSECVLGQSKRVDFCGKGYHLMSFPQSAPHGVVFLHVTYVPAQEKNFTTAPAICHDGKAHFPREGVFVSNGTHWFVTQRNFYEPQIITTDNTFLSGNCDVVIGIVNNTVYDPLQPELDSFKEELDKYFKNHTSPDVDLGDISGINASVVNIQKEIDRLNEVAKNLNESLIDLQELGKYEQYIKGGSGYIPEAPRDGQAYVRKDGEWVLLSTFL

SEQ ID NO: 5760 - protein, 1241 aa, Artificial Sequence
  SARS-CoV-2/USA/UT-00034/2020__EPI_ISL_417977 spike protein (1-1211)(K986P_V987P) Foldon construct
MFVFLVLLPLVSSQCVNLTTRTQLPPAYTNSFTRGVYYPDKVFRSSVLHSTQDLFLPFFSNVTWFHAIHVSGTNGTKRFDNPVLPFNDGVYFASTEKSNIIRGWIFGTTLDSKTQSLLIVNNATNVVIKVCEFQFCNDPFLGVYYYKNNKSWMESEFRVYSSANNCTFEYVSQPFLMDLEGKQGNFKNLREFVFKNIDGYFKIYSKHTPINLVRDLPQGFSALEPLVDLPIGINITRFQTLLALHRSYLTPGDSSSGWTAGAAAYYVGYLQPRTFLLKYNENGTITDAVDCALDPLSETKCTLKSFTVEKGIYQTSNFRVQPTESIVRFPNITNLCPFGEVFNATRFASVYAWNRKRISNCVADYSVLYNSASFSTFKCYGVSPTKLNDLCFTNVYADSFVIRGDEVRQIAPGQTGKIADYNYKLPDDFTGCVIAWNSNNLDSKVGGNYNYLYRLFRKSNLKPFERDISTEIYQAGSTPCNGVEGFNCYFPLQSYGFQPTNGVGYQPYRVVVLSFELLHAPATVCGPKKSTNLVKNKCVNFNFNGLTGTGVLTESNKKFLPFQQFGRDIADTTDAVRDPQTLEILDITPCSFGGVSVITPGTNTSNQVAVLYQGVNCTEVPVAIHADQLTPTWRVYSTGSNVFQTRAGCLIGAEHVNNSYECDIPIGAGICASYQTQTNSPRRARSVASQSIIAYTMSLGAENSVAYSNNSIAIPTNFTISVTTEILPVSMTKTSVDCTMYICGDSTECSNLLLQYGSFCTQLNRALTGIAVEQDKNTQEVFAQVKQIYKTPPIKDFGGFNFSQILPDPSKPSKRSFIEDLLFNKVTLADAGFIKQYGDCLGDIAARDLICAQKFNGLTVLPPLLTDEMIAQYTSALLAGTITSGWTFGAGAALQIPFAMQMAYRFNGIGVTQNVLYENQKLIANQFNSAIGKIQDSLSSTASALGKLQDVVNQNAQALNTLVKQLSSNFGAISSVLNDILSRLDPPEAEVQIDRLITGRLQSLQTYVTQQLIRAAEIRASANLAATKMSECVLGQSKRVDFCGKGYHLMSFPQSAPHGVVFLHVTYVPAQEKNFTTAPAICHDGKAHFPREGVFVSNGTHWFVTQRNFYEPQIITTDNTFVSGNCDVVIGIVNNTVYDPLQPELDSFKEELDKYFKNHTSPDVDLGDISGINASVVNIQKEIDRLNEVAKNLNESLIDLQELGKYEQYIKGGSGYIPEAPRDGQAYVRKDGEWVLLSTFL

SEQ ID NO: 5761 - protein, 1241 aa, Artificial Sequence
  SARS-CoV-2/USA/UT-00033/2020__EPI_ISL_417976 spike protein (1-1211)(K986P_V987P) Foldon construct
MFVFLVLLPLVSSQCVNLTTRTQLPPAYTNSFTRGVYYPDKVFRSSVLHSTQDLFLPFFSNVTWFHAIHVSGTNGTKRFDNPVLPFNDGVYFASTEKSNIIRGWIFGTTLDSKTQSLLIVNNATNVVIKVCEFQFCNDPFLGVYYHKNNKSWMESEFRVYSSANNCTFEYVSQPFLMDLEGKQGNFKNLREFVFKNIDGYFKIYSKHTPINLVRDLPQGFSALEPLVDLPIGINITRFQTLLALHRSYLTPGDSSSGLTAGAAAYYVGYLQPRTFLLKYNENGTITDAVDCALDPLSETKCTLKSFTVEKGIYQTSNFRVQPTESIVRFPNITNLCPFGEVFNATRFASVYAWNRKRISNCVADYSVLYNSASFSTFKCYGVSPTKLNDLCFTNVYADSFVIRGDEVRQIAPGQTGKIADYNYKLPDDFTGCVIAWNSNNLDSKVGGNYNYLYRLFRKSNLKPFERDISTEIYQAGSTPCNGVEGFNCYFPLQSYGFQPTNGVGYQPYRVVVLSFELLHAPATVCGPKKSTNLVKNKCVNFNFNGLTGTGVLTESNKKFLPFQQFGRDIADTTDAVRDPQTLEILDITPCSFGGVSVITPGTNTSNQVAVLYQGVNCTEVPVAIHADQLTPTWRVYSTGSNVFQTRAGCLIGAEHVNNSYECDIPIGAGICASYQTQTNSPRRARSVASQSIIAYTMSLGAENSVAYSNNSIAIPTNFTISVTTEILPVSMTKTSVDCTMYICGDSTECSNLLLQYGSFCTQLNRALTGIAVEQDKNTQEVFAQVKQIYKTPPIKDFGGFNFSQILPDPSKPSKRSFIEDLLFNKVTLADAGFIKQYGDCLGDIAARDLICAQKFNGLTVLPPLLTDEMIAQYTSALLAGTITSGWTFGAGAALQIPFAMQMAYRFNGIGVTQNVLYENQKLIANQFNSAIGKIQDSLSSTASALGKLQDVVNQNAQALNTLVKQLSSNFGAISSVLNDILSRLDPPEAEVQIDRLITGRLQSLQTYVTQQLIRAAEIRASANLAATKMSECVLGQSKRVDFCGKGYHLMSFPQSAPHGVVFLHVTYVPAQEKNFTTAPAICHDGKAHFPREGVFVSNGTHWFVTQRNFYEPQIITTDNTFVSGNCDVVIGIVNNTVYDPLQPELDSFKEELDKYFKNHTSPDVDLGDISGINASVVNIQKEIDRLNEVAKNLNESLIDLQELGKYEQYIKGGSGYIPEAPRDGQAYVRKDGEWVLLSTFL

SEQ ID NO: 5762 - protein, 1241 aa, Artificial Sequence
  SARS-CoV-2/USA/WI-13/2020__EPI_ISL_417516 spike protein (1-1211)(K986P_V987P) Foldon construct
MFVFLVLLPLVSSQCVNLTTRTQLPPAYTNSFTRGVYYPDKVFRSSVLHSTQDLFLPFFSNVTWFHAIHVSGTNGTKRFDNPVLPFNDGVYFASTEKSNIIRGWIFGTTLDSKTQSLLIVNNATNVVIKVCEFQFCNDPFLGVYYHKNNKSWMESEFRVYSSANNCTFEYVSQPFLMDLEGKQGNFKNLREFVFKNIDGYFKIYSKHTPINLVRDLPQGFSALEPLVDLPIGINITRFQTLLALHRSYLTPGDSSSGWTAGAAAYYVGYLQPRTFLLKYNENGTITDAVDCALDPLSETKCTLKSFTVEKGIYQTSNFRVLPTESIVRFPNITNLCPFGEVFNATRFASVYAWNRKRISNCVADYSVLYNSASFSTFKCYGVSPTKLNDLCFTNVYADSFVIRGDEVRQIAPGQTGKIADYNYKLPDDFTGCVIAWNSNNLDSKVGGNYNYLYRLFRKSNLKPFERDISTEIYQAGSTPCNGVEGFNCYFPLQSYGFQPTNGVGYQPYRVVVLSFELLHAPATVCGPKKSTNLVKNKCVNFNFNGLTGTGVLTESNKKFLPFQQFGRDIADTTDAVRDPQTLEILDITPCSFGGVSVITPGTNTSNQVAVLYQGVNCTEVPVAIHADQLTPTWRVYSTGSNVFQTRAGCLIGAEHVNNSYECDIPIGAGICASYQTQTNSPRRARSVASQSIIAYTMSLGAENSVAYSNNSIAIPTNFTISVTTEILPVSMTKTSVDCTMYICGDSTECSNLLLQYGSFCTQLNRALTGIAVEQDKNTQEVFAQVKQIYKTPPIKDFGGFNFSQILPDPSKPSKRSFIEDLLFNKVTLADAGFIKQYGDCLGDIAARDLICAQKFNGLTVLPPLLTDEMIAQYTSALLAGTITSGWTFGAGAALQIPFAMQMAYRFNGIGVTQNVLYENQKLIANQFNSAIGKIQDSLSSTASALGKLQDVVNQNAQALNTLVKQLSSNFGAISSVLNDILSRLDPPEAEVQIDRLITGRLQSLQTYVTQQLIRAAEIRASANLAATKMSECVLGQSKRVDFCGKGYHLMSFPQSAPHGVVFLHVTYVPAQEKNFTTAPAICHDGKAHFPREGVFVSNGTHWFVTQRNFYEPQIITTDNTFVSGNCDVVIGIVNNTVYDPLQPELDSFKEELDKYFKNHTSPDVDLGDISGINASVVNIQKEIDRLNEVAKNLNESLIDLQELGKYEQYIKGGSGYIPEAPRDGQAYVRKDGEWVLLSTFL

SEQ ID NO: 5763 - protein, 1240 aa, Artificial Sequence
  SARS-CoV-2/India/1-27/2020__EPI_ISL_413522 spike protein (1-1210)(K985P_V986P) Foldon construct
MFVFLVLLPLVSSQCVNLTTRTQLPPAYTNSFTRGVYYPDKVFRSSVLHSTQDLFLPFFSNVTWFHAIHVSGTNGTKRFDNPVLPFNDGVYFASTEKSNIIRGWIFGTTLDSKTQSLLIVNNATNVVIKVCEFQFCNDPFLGVYHKNNKSWMESEFRVYSSANNCTFEYVSQPFLMDLEGKQGNFKNLREFVFKNIDGYFKIYSKHTPINLVRDLPQGFSALEPLVDLPIGINITRFQTLLALHRSYLTPGDSSSGWTAGAAAYYVGYLQPRTFLLKYNENGTITDAVDCALDPLSETKCTLKSFTVEKGIYQTSNFRVQPTESIVRFPNITNLCPFGEVFNATRFASVYAWNRKRISNCVADYSVLYNSASFSTFKCYGVSPTKLNDLCFTNVYADSFVIRGDEVIQIAPGQTGKIADYNYKLPDDFTGCVIAWNSNNLDSKVGGNYNYLYRLFRKSNLKPFERDISTEIYQAGSTPCNGVEGFNCYFPLQSYGFQPTNGVGYQPYRVVVLSFELLHAPATVCGPKKSTNLVKNKCVNFNFNGLTGTGVLTESNKKFLPFQQFGRDIADTTDAVRDPQTLEILDITPCSFGGVSVITPGTNTSNQVAVLYQDVNCTEVPVAIHADQLTPTWRVYSTGSNVFQTRAGCLIGAEHVNNSYECDIPIGAGICASYQTQTNSPRRARSVASQSIIAYTMSLGAENSVAYSNNSIAIPTNFTISVTTEILPVSMTKTSVDCTMYICGDSTECSNLLLQYGSFCTQLNRALTGIAVEQDKNTQEVFAQVKQIYKTPPIKDFGGFNFSQILPDPSKPSKRSFIEDLLFNKVTLADAGFIKQYGDCLGDIAARDLICAQKFNGLTVLPPLLTDEMIAQYTSALLAGTITSGWTFGAGAALQIPFAMQMAYRFNGIGVTQNVLYENQKLIANQFNSAIGKIQDSLSSTASALGKLQDVVNQNAQALNTLVKQLSSNFGAISSVLNDILSRLDPPEAEVQIDRLITGRLQSLQTYVTQQLIRAAEIRASANLAATKMSECVLGQSKRVDFCGKGYHLMSFPQSAPHGVVFLHVTYVPAQEKNFTTAPAICHDGKAHFPREGVFVSNGTHWFVTQRNFYEPQIITTDNTFVSGNCDVVIGIVNNTVYDPLQPELDSFKEELDKYFKNHTSPDVDLGDISGINASVVNIQKEIDRLNEVAKNLNESLIDLQELGKYEQYIKGGSGYIPEAPRDGQAYVRKDGEWVLLSTFL

SEQ ID NO: 5764 - protein, 1235 aa, Artificial Sequence
  SARS-CoV-2/pangolin/Guangxi/P4L/2017__EPI_ISL_410538 spike protein (1-1205)(K980P_V981P) Foldon construct
MFVFLFVLPLVSSQCVNLTTRTGIPPGYTNSSTRGVYYPDKVFRSSILHLTQDLFLPFFSNVTWFNTINYQGGFKKFDNPVLPFNDGVYFASTEKSNIIRGWIFGTTLDARTQSLLIVNNATNVVIKVCEFQFCTDPFLGVYYHNNNKTWVENEFRVYSSANNCTFEYISQPFLMDLEGKQGNFKNLREFVFKNVDGYFKIYSKHTPIDLVRDLPRGFAALEPLVDLPIGINITRFQTLLALHRSYLTPGNLESGWTTGAAAYYVGYLQQRTFLLSYNQNGTITDAVDCSLDPLSETKCTLKSLTVEKGIYQTSNFRVQPTISIVRFPNITNLCPFGEVFNASKFASVYAWNRKRISNCVADYSVLYNSTSFSTFKCYGVSPTKLNDLCFTNVYADSFVVKGDEVRQIAPGQTGVIADYNYKLPDDFTGCVIAWNSVKQDALTGGNYGYLYRLFRKSKLKPFERDISTEIYQAGSTPCNGQVGLNCYYPLERYGFHPTTGVNYQPFRVVVLSFELLNGPATVCGPKLSTTLVKDKCVNFNFNGLTGTGVLTTSKKQFLPFQQFGRDISDTTDAVRDPQTLEILDITPCSFGGVSVITPGTNTSNQVAVLYQDVNCTEVPMAIHAEQLTPAWRVYSAGANVFQTRAGCLVGAEHVNNSYECDIPVGAGICASYHSMSSLRSVNQRSIIAYTMSLGAENSVAYSNNSIAIPTNFTISVTTEILPVSMTKTSVDCTMYICGDSIECSNLLLQYGSFCTQLNRALTGIAVEQDKNTQEVFAQVKQIYKTPPIKDFGGFNFSQILPDPSKPSKRSFIEDLLFNKVTLADAGFIKQYGDCLGDIAARDLICAQKFNGLTVLPPLLTDEMIAQYTSALLAGTITSGWTFGAGAALQIPFAMQMAYRFNGIGVTQNVLYENQKLIANQFNSAIGKIQDSLSSTASALGKLQDVVNQNAQALNTLVKQLSSNFGAISSVLNDILSRLDPPEAEVQIDRLITGRLQSLQTYVTQQLIRAAEIRASANLAATKMSECVLGQSKRVDFCGKGYHLMSFPQSAPHGVVFLHVTYVPAQEKNFTTAPAICHEGKAHFPREGVFVSNGTHWFITQRNFYEPQIITTDNTFVSGSCDVVIGIVNNTVYDPLQPELDSFKEELDKYFKNHTSPDVDLGDISGINASVVNIQKEIDRLNEVAKNLNESPIDLQELGKYEQYIKGGSGYIPEAPRDGQAYVRKDGEWVLLSTFL

SEQ ID NO: 5765 - protein, 1235 aa, Artificial Sequence
  SARS-CoV-2/pangolin/Guangxi/P5L/2017__EPI_ISL_410540 spike protein (1-1205)(K980P_V981P) Foldon construct
MFVFLFVLPLVSSQCVNLTTRTGIPPGYTNSSTRGVYYPDKVFRSSILHLTQDLFLPFFSNVTWFNTINYQGGFKKFDNPVLPFNDGVYFASTEKSNIIRGWIFGTTLDARTQSLLIVNNATNVVIKVCEFQFCTDPFLGVYYHNNNKTWVENEFRVYSSANNCTFEYISQPFLMDLEGKQGNFKNLREFVFKNVDGYFKIYSKHTPIDLVRDLPRGFAALEPLVDLPIGINITRFQTLLALHRSYLTPGKLESGWTTGAAAYYVGYLQQRTFLLSYNQNGTITDAVDCSLDPLSETKCTLKSLTVEKGIYQTSNFRVQPTISIVRFPNITNLCPFGEVFNASKFASVYAWNRKRISNCVADYSVLYNSTSFSTFKCYGVSPTKLNDLCFTNVYADSFVVKGDEVRQIAPGQTGVIADYNYKLPDDFTGCVIAWNSVKQDALTGGNYGYLYRLFRKSKLKPFERDISTEIYQAGSTPCNGQVGLNCYYPLERYGFHPTTGVNYQPFRVVVLSFELLNGPATVCGPKLSTTLVKDKCVNFNFNGLTGTGVLTTSKKQFLPFQQFGRDISDTTDAVRDPQTLEILDITPCSFGGVSVITPGTNTSNQVAVLYQDVNCTEVPMAIHAEQLTPAWRVYSAGANVFQTRAGCLVGAEHVNNSYECDIPVGAGICASYHSMSSFRSVNQRSIIAYTMSLGAENSVAYSNNSIAIPTNFTISVTTEILPVSMTKTSVDCTMYICGDSIECSNLLLQYGSFCTQLNRALTGIAVEQDKNTQEVFAQVKQIYKTPPIKDFGGFNFSQILPDPSKPSKRSFIEDLLFNKVTLADAGFIKQYGDCLGDIAARDLICAQKFNGLTVLPPLLTDEMIAQYTSALLAGTITSGWTFGAGAALQIPFAMQMAYRFNGIGVTQNVLYENQKLIANQFNSAIGKIQDSLSSTASALGKLQDVVNQNAQALNTLVKQLSSNFGAISSVLNDILSRLDPPEAEVQIDRLITGRLQSLQTYVTQQLIRAAEIRASANLAATKMSECVLGQSKRVDFCGKGYHLMSFPQSAPHGVVFLHVTYVPAQEKNFTTAPAICHEGKAHFPREGVFVSNGTHWFITQRNFYEPQIITTDNTFVSGSCDVVIGIVNNTVYDPLQPELDSFKEELDKYFKNHTSPDVDLGDISGINASVVNIQKEIDRLNEVAKNLNESLIDLQELGKYEQYIKGGSGYIPEAPRDGQAYVRKDGEWVLLSTFL

SEQ ID NO: 5766 - protein, 1235 aa, Artificial Sequence
  SARS-CoV-2/pangolin/Guangxi/P5E/2017__EPI_ISL_410541 spike protein (1-1205)(K980P_V981P) Foldon construct
MFVFLFVLPLVSSQCVNLTTRTGIPPGYTNSSTRGVYYPDKVFRSSILHLTQDLFLPFFSNVTWFNTITYQGGSKKFDNPVLPFNDGVYFASTEKSNIIRGWIFGTTLDARTQSLLIVNNATNVVIKVCEFQFCTDPFLGVYYHNNNKTWVENEFRVYSSANNCTFEYISQPFLMDLEGKQGNFKNLREFVFKNVDGYFKIYSKHTPIDLVRDLPRGFAALEPLVDLPIGINITRFQTLLALHRSYLTPGKLESGWTTGAAAYYVGYLQQRTFLLSYNQNGTITDAVDCSLDPLSETKCTLKSLTVEKGIYQTSNFRVQPTISIVRFPNITNLCPFGEVFNASKFASVYAWNRKRISNCVADYSVLYNSTSFSTFKCYGVSPTKLNDLCFTNVYADSFVVKGDEVRQIAPGQTGVIADYNYKLPDDFTGCVIAWNSVKQDALTGDNYGYLYRLFRKSKLKPFERDISTEIYQAGSTPCNGQVGLNCYYPLERYGFHPTTGVNYQPFRVVVLSFELLNGPATVCGPKLSTTLVKDKCVNFNFNGLTGTGVLTTSKKQFLPFQQFGRDISDTTDAVRDPQTLEILDITPCSFGGVSVITPGTNTSNQVAVLYQDVNCTEVPMAIHAEQLTPAWRVYSAGANVFQTRAGCLVGAEHVNNSYECDIPVGAGICASYHSMSSFRSVNQRSIIAYTMSLGAENSVAYSNNSIAIPTNFTISVTTEILPVSMTKTSVDCTMYICGDSIECSNLLLQYGSFCTQLNRALTGIAVEQDKNTQEVFAQVKQIYKTPPIKDFGGFNFSQILPDPSKPSKRSFIEDLLFNKVTLADAGFIKQYGDCLGDIAARDLICAQKFNGLTVLPPLLTDEMIAQYTSALLAGTITSGWTFGAGAALQIPFAMQMAYRFNGIGVTQNVLYENQKLIANQFNSAIGKIQDSLSSTASALGKLQDVVNQNAQALNTLVKQLSSNFGAISSVLNDILSRLDPPEAEVQIDRLITGRLQSLQTYVTQQLIRAAEIRASANLAATKMSECVLGQSKRVDFCGKGYHLMSFPQSAPHGVVFLHVTYVPAQEKNFTTAPAICHEGKAHFPREGVFVSNGTHWFITQRNFYEPQIITTDNTFVSGSCDVVIGIVNNTVYDPLQPELDSFKEELDKYFKNHTSPDVDLGDISGINASVVNIQKEIDRLNEVAKNLNESLIDLQELGKYEQYIKGGSGYIPEAPRDGQAYVRKDGEWVLLSTFL

SEQ ID NO: 5767 - protein, 1233 aa, Artificial Sequence
  SARS-CoV-2/pangolin/Guangxi/P1E/2017__EPI_ISL_410539 spike protein (1-1203)(K978P_V979P) Foldon construct
MFVFLFVLPLVSSQCVNLTTRTGIQPGYTNSSTRGVYYPDKVFRSSILHLTQDLFLPFFSNVTWFNTINYQGGFKKFDNPVLPFNDGVYFASTEKSNIIRGWIFGTTLDARTQSLLIVNNATNVVIKVCEFQFCTDPFLGVYYHNNNKTWVENEFRVYSSANNCTFEYISQPFLMDLEGKQGNFKNLREFVFKNVDGYFKIYSKHTPIDLVRDLPRGFAALEPLVDLPIGINITRFQTLLALHRSYLTPGKLESGWTTGAAAYYVGYLQQRTFLLSYNQNGTITDAVDCSLDPLSETKCTLKSLTVEKGIYQTSNFRVQPTISIVRFPNITNLCPFGEVFNASKFASVYAWNRKRISNCVADYSVLYNSTSFSTFKCYGVSPTKLNDLCFTNVYADSFVVKGDEVRQIAPGQTGVIADYNYKLPDDFTGCVIAWNSVKQDALTGGNYLYRLFRKSKLKPFERDISTEIYQAGSTPCNGQVGLNCYYPLERYGFHPTTGVNYQPFRVVVLSFELLNGPATVCGPKLSTTLVKDKCVNFNFNGLTGTGVLTTSKKQFLPFQQFGRDISDTTDAVRDPQTLEILDITPCSFGGVSVITPGTNTSNQVAVLYQDVNCTEVPMAIHAEQLTPAWRVYSAGANVFQTRAGCLVGAEHVNNSYECDIPVGAGICASYHSMSSLRSVNQRSIIAYTMSLGAENSVAYSNNSIAIPTNFTISVTTEILPVSMTKTSVDCTMYICGDSIECSNLLLQYGSFCTQLNRALTGIAVEQDKNTQEVFAQVKQIYKTPPIKDFGGFNFSQILPDPSKPSKRSFIEDLLFNKVTLADAGFIKQYGDCLGDIAARDLICAQKFNGLTVLPPLLTDEMIAQYTSALLAGTITSGWTFGAGAALQIPFAMQMAYRFNGIGVTQNVLYENQKLIANQFNSAIGKIQDSLSSTASALGKLQDVVNQNAQALNTLVKQLSSNFGAISSVLNDILSRLDPPEAEVQIDRLITGRLQSLQTYVTQQLIRAAEIRASANLAATKMSECVLGQSKRVDFCGKGYHLMSFPQSAPHGVVFLHVTYVPAQEKNFTTAPAICHEGKAHFPREGVFVSNGTHWFITQRNFYEPQIITTDNTFVSGSCDVVIGIVNNTVYDPLQPELDSFKEELDKYFKNHTSPDVDLGDISGINASVVNIQKEIDRLNEVAKNLNESLIDLQELGKYEQYIKGGSGYIPEAPRDGQAYVRKDGEWVLLSTFL

SEQ ID NO: 5768 - protein, 1241 aa, Artificial Sequence
  SARS-CoV-2/Wuhan/WIV05/2019__EPI_ISL_402128 spike protein (1-1211)(K986P_V987P_T887W_A1020W) Foldon construct
MFVFLVLLPLVSSQCVNLTTRTQLPPAYTNSFTRGVYYPDKVFRSSVLHSTQDLFLPFFSNVTWFHAIHVSGTNGTKRFDNPVLPFNDGVYFASTEKSNIIRGWIFGTTLDSKTQSLLIVNNATNVVIKVCEFQFCNDPFLGVYYHKNNKSWMESEFRVYSSANNCTFEYVSQPFLMDLEGKQGNFKNLREFVFKNIDGYFKIYSKHTPINLVRDLPQGFSALEPLVDLPIGINITRFQTLLALHRSYLTPGDSSSGWTAGAAAYYVGYLQPRTFLLKYNENGTITDAVDCALDPLSETKCTLKSFTVEKGIYQTSNFRVQPTESIVRFPNITNLCPFGEVFNATRFASVYAWNRKRISNCVADYSVLYNSASFSTFKCYGVSPTKLNDLCFTNVYADSFVIRGDEVRQIAPGQTGKIADYNYKLPDDFTGCVIAWNSNNLDSKVGGNYNYLYRLFRKSNLKPFERDISTEIYQAGSTPCNGVEGFNCYFPLQSYGFQPTNGVGYQPYRVVVLSFELLHAPATVCGPKKSTNLVKNKCVNFNFNGLTGTGVLTESNKKFLPFQQFGRDIADTTDAVRDPQTLEILDITPCSFGGVSVITPGTNTSNQVAVLYQDVNCTEVPVAIHADQLTPTWRVYSTGSNVFQTRAGCLIGAEHVNNSYECDIPIGAGICASYQTQTNSPRRARSVASQSIIAYTMSLGAENSVAYSNNSIAIPTNFTISVTTEILPVSMTKTSVDCTMYICGDSTECSNLLLQYGSFCTQLNRALTGIAVEQDKNTQEVFAQVKQIYKTPPIKDFGGFNFSQILPDPSKPSKRSFIEDLLFNKVTLADAGFIKQYGDCLGDIAARDLICAQKFNGLTVLPPLLTDEMIAQYTSALLAGTITSGWWFGAGAALQIPFAMQMAYRFNGIGVTQNVLYENQKLIANQFNSAIGKIQDSLSSTASALGKLQDVVNQNAQALNTLVKQLSSNFGAISSVLNDILSRLDPPEAEVQIDRLITGRLQSLQTYVTQQLIRAAEIRWSANLAATKMSECVLGQSKRVDFCGKGYHLMSFPQSAPHGVVFLHVTYVPAQEKNFTTAPAICHDGKAHFPREGVFVSNGTHWFVTQRNFYEPQIITTDNTFVSGNCDVVIGIVNNTVYDPLQPELDSFKEELDKYFKNHTSPDVDLGDISGINASVVNIQKEIDRLNEVAKNLNESLIDLQELGKYEQYIKGGSGYIPEAPRDGQAYVRKDGEWVLLSTFL

SEQ ID NO: 5769 - protein, 1237 aa, Artificial Sequence
  SARS-CoV-2/bat/Yunnan/RaTG13/2013__EPI_ISL_402131 spike protein (1-1207)(K982P_V983P_T883W_A1016W) Foldon construct
MFVFLVLLPLVSSQCVNLTTRTQLPPAYTNSSTRGVYYPDKVFRSSVLHLTQDLFLPFFSNVTWFHAIHVSGTNGIKRFDNPVLPFNDGVYFASTEKSNIIRGWIFGTTLDSKTQSLLIVNNATNVVIKVCEFQFCNDPFLGVYYHKNNKSWMESEFRVYSSANNCTFEYVSQPFLMDLEGKQGNFKNLREFVFKNIDGYFKIYSKHTPINLVRDLPPGFSALEPLVDLPIGINITRFQTLLALHRSYLTPGDSSSGWTAGAAAYYVGYLQPRTFLLKYNENGTITDAVDCALDPLSETKCTLKSFTVEKGIYQTSNFRVQPTDSIVRFPNITNLCPFGEVFNATTFASVYAWNRKRISNCVADYSVLYNSTSFSTFKCYGVSPTKLNDLCFTNVYADSFVITGDEVRQIAPGQTGKIADYNYKLPDDFTGCVIAWNSKHIDAKEGGNFNYLYRLFRKANLKPFERDISTEIYQAGSKPCNGQTGLNCYYPLYRYGFYPTDGVGHQPYRVVVLSFELLNAPATVCGPKKSTNLVKNKCVNFNFNGLTGTGVLTESNKKFLPFQQFGRDIADTTDAVRDPQTLEILDITPCSFGGVSVITPGTNASNQVAVLYQDVNCTEVPVAIHADQLTPTWRVYSTGSNVFQTRAGCLIGAEHVNNSYECDIPIGAGICASYQTQTNSRSVASQSIIAYTMSLGAENSVAYSNNSIAIPTNFTISVTTEILPVSMTKTSVDCTMYICGDSTECSNLLLQYGSFCTQLNRALTGIAVEQDKNTQEVFAQVKQIYKTPPIKDFGGFNFSQILPDPSKPSKRSFIEDLLFNKVTLADAGFIKQYGDCLGDIAARDLICAQKFNGLTVLPPLLTDEMIAQYTSALLAGTITSGWWFGAGAALQIPFAMQMAYRFNGIGVTQNVLYENQKLIANQFNSAIGKIQDSLSSTASALGKLQDVVNQNAQALNTLVKQLSSNFGAISSVLNDILSRLDPPEAEVQIDRLITGRLQSLQTYVTQQLIRAAEIRWSANLAATKMSECVLGQSKRVDFCGKGYHLMSFPQSAPHGVVFLHVTYVPAQEKNFTTAPAICHDGKAHFPREGVFVSNGTHWFVTQRNFYEPQIITTDNTFVSGSCDVVIGIVNNTVYDPLQPELDSFKEELDKYFKNHTSPDVDLGDISGINASVVNIQKEIDRLNEVAKNLNESLIDLQELGKYEQYIKGGSGYIPEAPRDGQAYVRKDGEWVLLSTFL

SEQ ID NO: 5770 - protein, 1241 aa, Artificial Sequence
  SARS-CoV-2/Wuhan/HBCDC-HB-01/2019__EPI_ISL_402132 spike protein (1-1211)(K986P_V987P_T887W_A1020W) Foldon construct
MFVFLVLLPLVSSQCVNLTTRTQLPPAYTNSITRGVYYPDKVFRSSVLHSTQDLFLPFFSNVTWFHAIHVSGTNGTKRFDNPVLPFNDGVYFASTEKSNIIRGWIFGTTLDSKTQSLLIVNNATNVVIKVCEFQFCNDPFLGVYYHKNNKSWMESEFRVYSSANNCTFEYVSQPFLMDLEGKQGNFKNLREFVFKNIDGYFKIYSKHTPINLVRDLPQGFSALEPLVDLPIGINITRFQTLLALHRSYLTPGDSSSGWTAGAAAYYVGYLQPRTFLLKYNENGTITDAVDCALDPLSETKCTLKSFTVEKGIYQTSNFRVQPTESIVRFPNITNLCPFGEVFNATRFASVYAWNRKRISNCVADYSVLYNSASFSTFKCYGVSPTKLNDLCFTNVYADSFVIRGDEVRQIAPGQTGKIADYNYKLPDDFTGCVIAWNSNNLDSKVGGNYNYLYRLFRKSNLKPFERDISTEIYQAGSTPCNGVEGFNCYFPLQSYGFQPTNGVGYQPYRVVVLSFELLHAPATVCGPKKSTNLVKNKCVNFNFNGLTGTGVLTESNKKFLPFQQFGRDIADTTDAVRDPQTLEILDITPCSFGGVSVITPGTNTSNQVAVLYQDVNCTEVPVAIHADQLTPTWRVYSTGSNVFQTRAGCLIGAEHVNNSYECDIPIGAGICASYQTQTNSPRRARSVASQSIIAYTMSLGAENSVAYSNNSIAIPTNFTISVTTEILPVSMTKTSVDCTMYICGDSTECSNLLLQYGSFCTQLNRALTGIAVEQDKNTQEVFAQVKQIYKTPPIKDFGGFNFSQILPDPSKPSKRSFIEDLLFNKVTLADAGFIKQYGDCLGDIAARDLICAQKFNGLTVLPPLLTDEMIAQYTSALLAGTITSGWWFGAGAALQIPFAMQMAYRFNGIGVTQNVLYENQKLIANQFNSAIGKIQDSLSSTASALGKLQDVVNQNAQALNTLVKQLSSNFGAISSVLNDILSRLDPPEAEVQIDRLITGRLQSLQTYVTQQLIRAAEIRWSANLAATKMSECVLGQSKRVDFCGKGYHLMSFPQSAPHGVVFLHVTYVPAQEKNFTTAPAICHDGKAHFPREGVFVSNGTHWFVTQRNFYEPQIITTDNTFVSGNCDVVIGIVNNTVYDPLQPELDSFKEELDKYFKNHTSPDVDLGDISGINASVVNIQKEIDRLNEVAKNLNESLIDLQELGKYEQYIKGGSGYIPEAPRDGQAYVRKDGEWVLLSTFL

SEQ ID NO: 5771 - protein, 1241 aa, Artificial Sequence
  SARS-CoV-2/Guangdong/20SF028/2020__EPI_ISL_403936 spike protein (1-1211)(K986P_V987P_T887W_A1020W) Foldon construct
MFVFLVLLPLVSSQCVNLTTRTQLPPAYTNSFTRGVYYPDKVFRSSVLYSTQDLFLPFFSNVTWFHAIHVSGTNGTKRFDNPVLPFNDGVYFASTEKSNIIRGWIFGTTLDSKTQSLLIVNNATNVVIKVCEFQFCNDPFLGVYYHKNNKSWMESEFRVYSSANNCTFEYVSQPFLMDLEGKQGNFKNLREFVFKNIDGYFKIYSKHTPINLVRDLPQGFSALEPLVDLPIGINITRFQTLLALHRSYLTPGDSSSGWTAGAAAYYVGYLQPRTFLLKYNENGTITDAVDCALDPLSETKCTLKSFTVEKGIYQTSNFRVQPTESIVRFPNITNLCPFGEVFNATRFASVYAWNRKRISNCVADYSVLYNSASFSTFKCYGVSPTKLNDLCFTNVYADSFVIRGDEVRQIAPGQTGKIADYNYKLPDDFTGCVIAWNSNNLDSKVGGNYNYLYRLFRKSNLKPFERDISTEIYQAGSTPCNGVEGFNCYFPLQSYGFQPTNGVGYQPYRVVVLSFELLHAPATVCGPKKSTNLVKNKCVNFNFNGLTGTGVLTESNKKFLPFQQFGRDIADTTDAVRDPQTLEILDITPCSFGGVSVITPGTNTSNQVAVLYQDVNCTEVPVAIHADQLTPTWRVYSTGSNVFQTRAGCLIGAEHVNNSYECDIPIGAGICASYQTQTNSPRRARSVASQSIIAYTMSLGAENSVAYSNNSIAIPTNFTISVTTEILPVSMTKTSVDCTMYICGDSTECSNLLLQYGSFCTQLNRALTGIAVEQDKNTQEVFAQVKQIYKTPPIKDFGGFNFSQILPDPSKPSKRSFIEDLLFNKVTLADAGFIKQYGDCLGDIAARDLICAQKFNGLTVLPPLLTDEMIAQYTSALLAGTITSGWWFGAGAALQIPFAMQMAYRFNGIGVTQNVLYENQKLIANQFNSAIGKIQDSLSSTASALGKLQDVVNQNAQALNTLVKQLSSNFGAISSVLNDILSRLDPPEAEVQIDRLITGRLQSLQTYVTQQLIRAAEIRWSANLAATKMSECVLGQSKRVDFCGKGYHLMSFPQSAPHGVVFLHVTYVPAQEKNFTTAPAICHDGKAHFPREGVFVSNGTHWFVTQRNFYEPQIITTDNTFVSGNCDVVIGIVNNTVYDPLQPELDSFKEELDKYFKNHTSPDVDLGDISGINASVVNIQKEIDRLNEVAKNLNESLIDLQELGKYEQYIKGGSGYIPEAPRDGQAYVRKDGEWVLLSTFL

SEQ ID NO: 5772 - protein, 1241 aa, Artificial Sequence
  SARS-CoV-2/Shenzhen/SZTH-001/2020__EPI_ISL_406592 spike protein (1-1211)(K986P_V987P_T887W_A1020W) Foldon construct
MFVFLVLLPLVSSQCVNLTTRTQLPPAYTNSFTRGVYYPDKVFRSSVLHSTQDLFLPFFSNVTWFHAIHVSGTNGTKRFDNPVLPFNDGVYFASTEKSNIIRGWIFGTTLDSKTQSLLIVNNATNVVIKVCEFQFCNDPFLGVYYHKNNKSWMESEFRVYSSANNCTFEYVSQPFLMDLEGKQGNFKNLREFVFKNIDGYFKIYSKHTPINLVRDLPQGFSALEPLVDLPIGINITRFQTLLALHRSYLTPGDSSSGWTAGAAAYYVGYLQPRTFLLKYNENGTITDAVDCALDPLSETKCTLKSFTVEKGIYQTSNFRVQPTESIVRFPNITNLCPFGEVFNATRFASVYAWNRKRISNCVADYSVLYNSASFSTFKCYGVSPTKLNDLCFTNVYADSFVIRGDEVRQIAPGQTGKIADYNYKLPDDFTGCVIAWNSNNLDSKVGGNYNYLYRLFRKSNLKPFERDISTEIYQAGSTPCNGVEGFNCYFPLQSYGFQPTNGVGYQPYRVVVLSFELLHAPATVCGPKKSTNLVKNKCVNFNFNGLTGTGVLTESNKKFLPFQQFGRDIADTTDAVRDPQTLEILDITPCSFGGVSVITPGTNTSNQVAVLYQDVNCTEVPVAIHADQLTPTWRVYSTGSNVFQTRAGCLIGAEHVNNSYECDIPIGAGICASYQTQTNSPRRARSVASQSIIAYTMSLGAENSVAYSNNSIAIPTNFTISVTTEILPVSMTKTSVDCTMYICGDSTECSNLLLQYGSFCTQLNRALTGIAVEQDKNTQEVFAQVKQIYKTPPIKDFGGFNFSQILPDPSKPSKRSFIEDLLFNKVTLADAGFIKQYGDCLGDIAARDLICAQKFNGLTVLPPLLTDEMIAQYTSALLAGTITSGWWFGAGAALQIPFAMQMAYRFNGIGVTQNVLYENQKLIANQFNSAIGKIQDSLSSTASALGKLQDVVNQNAQALNTLVKQLSSNFGAISSVLNDILSRLDPPEAEVQIDRLITGRLQSLQTYVTQQLIRAAEIRWSANLAATKMSECVLGQSKRVDFCGKGYHLMSFPQSAPHGVVFLHVTYVPAQEKNFTTAPAICHDGKAHFPREGVFVSNGTHWFVTQRNFYEPQIITTDNTFVSGNCDVLIGIVNNTVYDPLQPELDSFKEELDKYFKNHTSPDVDLGDISGINASVVNIQKEIDRLNEVAKNLNESLIDLQELGKYEQYIKGGSGYIPEAPRDGQAYVRKDGEWVLLSTFL

SEQ ID NO: 5773 - protein, 1241 aa, Artificial Sequence
  SARS-CoV-2/Shenzhen/SZTH-004/2020__EPI_ISL_406595 spike protein (1-1211)(K986P_V987P_T887W_A1020W) Foldon construct
MFVFLVLLPLVSSQCVNLTTRTQLPPAYTNSFTRGVYYPDKVFRSSVLHSTQDLFLPFFSNVTWFHAIHVSGTNGTKRFDNPVLPFNDGVYFASTEKSNIIRGWIFGTTLDSKTQSLLIVNNATNVVIKVCEFQFCNDPFLGVYYHKNNKSWMESEFRVYSSANNCTFEYVSQPFLMDLEGKQGNFKNLREFVFKNIDGYFKIYSKHTPINLVRDLPQGFSALEPLVDLPIGINITRFQTLLALHRSYLTPGDSSSGWTAGAAAYYVGYLQPRTFLLKYNENGTITDAVDCALDPLSETKCTLKSFTVEKGIYQTSNFRVQPTESIVRFPNITNLCPFGEVFNATRFASVYAWDRKRISNCVAYYSVLYNSASFSTFKCYGVSPTKLNDLCFTNVYADSFVIRGDEVRQIAPGQTGKIADYNYKLPDDFTGCVIAWNSNNLDSKVGGNYNYLYRLFRKSNLKPFERDISTEIYQAGSTPCNGVEGFNCYFPLQSYGFQPTNGVGYQPYRVVVLSFELLHAPATVCGPKKSTNLVKNKCVNFNFNGLTGTGVLTESNKKFLPFQQFGRDIADTTDAVRDPQTLEILDITPCSFGGVSVITPGTNTSNQVAVLYQDVNCTEVPVAIHADQLTPTWRVYSTGSNVFQTRAGCLIGAEHVNNSYECDIPIGAGICASYQTQTNSPRRARSVASQSIIAYTMSLGAENSVAYSNNSIAIPTNFTISVTTEILPVSMTKTSVDCTMYICGDSTECSNLLLQYGSFCTQLNRALTGIAVEQDKNTQEVFAQVKQIYKTPPIKDFGGFNFSQILPDPSKPSKRSFIEDLLFNKVTLADAGFIKQYGDCLGDIAARDLICAQKFNGLTVLPPLLTDEMIAQYTSALLAGTITSGWWFGAGAALQIPFAMQMAYRFNGIGVTQNVLYENQKLIANQFNSAIGKIQDSLSSTASALGKLQDVVNQNAQALNTLVKQLSSNFGAISSVLNDILSRLDPPEAEVQIDRLITGRLQSLQTYVTQQLIRAAEIRWSANLAATKMSECVLGQSKRVDFCGKGYHLMSFPQSAPHGVVFLHVTYVPAQEKNFTTAPAICHDGKAHFPREGVFVSNGTHWFVTQRNFYEPQIITTDNTFVSGNCDVVIGIVNNTVYDPLQPELDSFKEELDKYFKNHTSPDVDLGDISGINASVVNIQKEIDRLNEVAKNLNESLIDLQELGKYEQYIKGGSGYIPEAPRDGQAYVRKDGEWVLLSTFL

SEQ ID NO: 5774 - protein, 1241 aa, Artificial Sequence
  SARS-CoV-2/France/IDF0372/2020__EPI_ISL_406596 spike protein (1-1211)(K986P_V987P_T887W_A1020W) Foldon construct
MFVFLVLLPLVSSQCVNLTTRTQLPPAYTNSFTRGVYYPDKVFRSSVLHSTQDLFLPFFSNVTWFHAIHVSGTNGTKRFDNPVLPFNDGVYFASTEKSNIIRGWIFGTTLDSKTQSLLIVNNATNVVIKVCEFQFCNDPFLGVYYHKNNKSWMESEFRVYSSANNCTFEYVSQPFLMDLEGKQGNFKNLREFVFKNIDGYFKIYSKHTPINLVRDLPQGFSALEPLVDLPIGINITRFQTLLALHRSYLTPGDSSSGWTAGAAAYYVGYLQPRTFLLKYNENGTITDAVDCALDPLSETKCTLKSFTVEKGIYQTSNFRVQPTESIVRFPNITNLCPFGEVFNATRFASVYAWNRKRISNCVADYSFLYNSASFSTFKCYGVSPTKLNDLCFTNVYADSFVIRGDEVRQIAPGQTGKIADYNYKLPDDFTGCVIAWNSNNLDSKVGGNYNYLYRLFRKSNLKPFERDISTEIYQAGSTPCNGVEGFNCYFPLQSYGFQPTNGVGYQPYRVVVLSFELLHAPATVCGPKKSTNLVKNKCVNFNFNGLTGTGVLTESNKKFLPFQQFGRDIADTTDAVRDPQTLEILDITPCSFGGVSVITPGTNTSNQVAVLYQDVNCTEVPVAIHADQLTPTWRVYSTGSNVFQTRAGCLIGAEHVNNSYECDIPIGAGICASYQTQTNSPRRARSVASQSIIAYTMSLGAENSVAYSNNSIAIPTNFTISVTTEILPVSMTKTSVDCTMYICGDSTECSNLLLQYGSFCTQLNRALTGIAVEQDKNTQEVFAQVKQIYKTPPIKDFGGFNFSQILPDPSKPSKRSFIEDLLFNKVTLADAGFIKQYGDCLGDIAARDLICAQKFNGLTVLPPLLTDEMIAQYTSALLAGTITSGWWFGAGAALQIPFAMQMAYRFNGIGVTQNVLYENQKLIANQFNSAIGKIQDSLSSTASALGKLQDVVNQNAQALNTLVKQLSSNFGAISSVLNDILSRLDPPEAEVQIDRLITGRLQSLQTYVTQQLIRAAEIRWSANLAATKMSECVLGQSKRVDFCGKGYHLMSFPQSAPHGVVFLHVTYVPAQEKNFTTAPAICHDGKAHFPREGVFVSNGTHWFVTQRNFYEPQIITTDNTFVSGNCDVVIGIVNNTVYDPLQPELDSFKEELDKYFKNHTSPDVDLGDISGINASVVNIQKEIDRLNEVAKNLNESLIDLQELGKYEQYIKGGSGYIPEAPRDGQAYVRKDGEWVLLSTFL

SEQ ID NO: 5775 - protein, 1241 aa, Artificial Sequence
  SARS-CoV-2/Australia/VIC01/2020__EPI_ISL_406844 spike protein (1-1211)(K986P_V987P_T887W_A1020W) Foldon construct
MFVFLVLLPLVSSQCVNLTTRTQLPPAYTNSFTRGVYYPDKVFRSSVLHSTQDLFLPFFSNVTWFHAIHVSGTNGTKRFDNPVLPFNDGVYFASTEKSNIIRGWIFGTTLDSKTQSLLIVNNATNVVIKVCEFQFCNDPFLGVYYHKNNKSWMESEFRVYSSANNCTFEYVSQPFLMDLEGKQGNFKNLREFVFKNIDGYFKIYSKHTPINLVRDLPQGFSALEPLVDLPIGINITRFQTLLALHRRYLTPGDSSSGWTAGAAAYYVGYLQPRTFLLKYNENGTITDAVDCALDPLSETKCTLKSFTVEKGIYQTSNFRVQPTESIVRFPNITNLCPFGEVFNATRFASVYAWNRKRISNCVADYSVLYNSASFSTFKCYGVSPTKLNDLCFTNVYADSFVIRGDEVRQIAPGQTGKIADYNYKLPDDFTGCVIAWNSNNLDSKVGGNYNYLYRLFRKSNLKPFERDISTEIYQAGSTPCNGVEGFNCYFPLQSYGFQPTNGVGYQPYRVVVLSFELLHAPATVCGPKKSTNLVKNKCVNFNFNGLTGTGVLTESNKKFLPFQQFGRDIADTTDAVRDPQTLEILDITPCSFGGVSVITPGTNTSNQVAVLYQDVNCTEVPVAIHADQLTPTWRVYSTGSNVFQTRAGCLIGAEHVNNSYECDIPIGAGICASYQTQTNSPRRARSVASQSIIAYTMSLGAENSVAYSNNSIAIPTNFTISVTTEILPVSMTKTSVDCTMYICGDSTECSNLLLQYGSFCTQLNRALTGIAVEQDKNTQEVFAQVKQIYKTPPIKDFGGFNFSQILPDPSKPSKRSFIEDLLFNKVTLADAGFIKQYGDCLGDIAARDLICAQKFNGLTVLPPLLTDEMIAQYTSALLAGTITSGWWFGAGAALQIPFAMQMAYRFNGIGVTQNVLYENQKLIANQFNSAIGKIQDSLSSTASALGKLQDVVNQNAQALNTLVKQLSSNFGAISSVLNDILSRLDPPEAEVQIDRLITGRLQSLQTYVTQQLIRAAEIRWSANLAATKMSECVLGQSKRVDFCGKGYHLMSFPQSAPHGVVFLHVTYVPAQEKNFTTAPAICHDGKAHFPREGVFVSNGTHWFVTQRNFYEPQIITTDNTFVSGNCDVVIGIVNNTVYDPLQPELDSFKEELDKYFKNHTSPDVDLGDISGINASVVNIQKEIDRLNEVAKNLNESLIDLQELGKYEQYIKGGSGYIPEAPRDGQAYVRKDGEWVLLSTFL

SEQ ID NO: 5776 - protein, 1241 aa, Artificial Sequence
  SARS-CoV-2/Germany/BavPat1/2020__EPI_ISL_406862 spike protein (1-1211)(K986P_V987P_T887W_A1020W) Foldon construct
MFVFLVLLPLVSSQCVNLTTRTQLPPAYTNSFTRGVYYPDKVFRSSVLHSTQDLFLPFFSNVTWFHAIHVSGTNGTKRFDNPVLPFNDGVYFASTEKSNIIRGWIFGTTLDSKTQSLLIVNNATNVVIKVCEFQFCNDPFLGVYYHKNNKSWMESEFRVYSSANNCTFEYVSQPFLMDLEGKQGNFKNLREFVFKNIDGYFKIYSKHTPINLVRDLPQGFSALEPLVDLPIGINITRFQTLLALHRSYLTPGDSSSGWTAGAAAYYVGYLQPRTFLLKYNENGTITDAVDCALDPLSETKCTLKSFTVEKGIYQTSNFRVQPTESIVRFPNITNLCPFGEVFNATRFASVYAWNRKRISNCVADYSVLYNSASFSTFKCYGVSPTKLNDLCFTNVYADSFVIRGDEVRQIAPGQTGKIADYNYKLPDDFTGCVIAWNSNNLDSKVGGNYNYLYRLFRKSNLKPFERDISTEIYQAGSTPCNGVEGFNCYFPLQSYGFQPTNGVGYQPYRVVVLSFELLHAPATVCGPKKSTNLVKNKCVNFNFNGLTGTGVLTESNKKFLPFQQFGRDIADTTDAVRDPQTLEILDITPCSFGGVSVITPGTNTSNQVAVLYQGVNCTEVPVAIHADQLTPTWRVYSTGSNVFQTRAGCLIGAEHVNNSYECDIPIGAGICASYQTQTNSPRRARSVASQSIIAYTMSLGAENSVAYSNNSIAIPTNFTISVTTEILPVSMTKTSVDCTMYICGDSTECSNLLLQYGSFCTQLNRALTGIAVEQDKNTQEVFAQVKQIYKTPPIKDFGGFNFSQILPDPSKPSKRSFIEDLLFNKVTLADAGFIKQYGDCLGDIAARDLICAQKFNGLTVLPPLLTDEMIAQYTSALLAGTITSGWWFGAGAALQIPFAMQMAYRFNGIGVTQNVLYENQKLIANQFNSAIGKIQDSLSSTASALGKLQDVVNQNAQALNTLVKQLSSNFGAISSVLNDILSRLDPPEAEVQIDRLITGRLQSLQTYVTQQLIRAAEIRWSANLAATKMSECVLGQSKRVDFCGKGYHLMSFPQSAPHGVVFLHVTYVPAQEKNFTTAPAICHDGKAHFPREGVFVSNGTHWFVTQRNFYEPQIITTDNTFVSGNCDVVIGIVNNTVYDPLQPELDSFKEELDKYFKNHTSPDVDLGDISGINASVVNIQKEIDRLNEVAKNLNESLIDLQELGKYEQYIKGGSGYIPEAPRDGQAYVRKDGEWVLLSTFL

SEQ ID NO: 5777 - protein, 1241 aa, Artificial Sequence
  SARS-CoV-2/Wuhan/HBCDC-HB-02/2020__EPI_ISL_412978 spike protein (1-1211)(K986P_V987P_T887W_A1020W) Foldon construct
MFVFLVLLPLVSSQCVNLTTRTQLPPAYTNSFTRGVYYPDKVFRSSVLHSTQDLFLPFFSNVTWFHAIHVSGTNGTKRFDNPVLPFNDGVYFASTEKSNIIRGWIFGTTLDSKTQSLLIVNNATNVVIKVCEFQFCNDPFLGVYYHKNNKSWMESEFRVYSSANNCTFEYVSQPFLMDLEGKQGNFKNLREFVFKNIDGYFKIYSKHTPINLVRDLPQGFSALEPLVDLPIGINITRFQTLLALHRSYLTPGDSSSGWTAGAAAYYVGYLQPRTFLLKYNENGTITDAVDCALDPLSETKCTLKSFTVEKGIYQTSNFRVQPTESIVRFPNITNLCPFGEVFNATRFASVYAWNRKRISNCVADYSVLYNSASFSTFKCYGVSPTKLNDLCFTNVYADSFVIRGDEVRQIAPGQTGKIADYNYKLPDDFTGCVIAWNSNNLDSKVGGNYNYLYRLFRKSNLKPFERDISTEIYQAGSTPCNGVEGFNCYFPLQSYGFQPTNGVGYQPYRVVVLSFELLHAPATVCGPKKSTNLVKNKCVNFNFNGLTGTGVLTESNKKFLPFQQFGRDIADTTDAVRDPQTLEILDITPCSFGGVSVITPGTNTSNQVAVLYQDVNCTEVPVAIHADQLTPTWRVYSTGSNVFQTRAGCLIGAEHVNNSYECDIPIGAGICASYQTQTNSPRRARSVASQSIIAYTMSLGAENSVAYSNNSIAIPTNFTISVTTEILPVSMTKTSVDCTMYICGDSTECSNFLLQYGSFCTQLNRALTGIAVEQDKNTQEVFAQVKQIYKTPPIKDFGGFNFSQILPDPSKPSKRSFIEDLLFNKVTLADAGFIKQYGDCLGDIAARDLICAQKFNGLTVLPPLLTDEMIAQYTSALLAGTITSGWWFGAGAALQIPFAMQMAYRFNGIGVTQNVLYENQKLIANQFNSAIGKIQDSLSSTASALGKLQDVVNQNAQALNTLVKQLSSNFGAISSVLNDILSRLDPPEAEVQIDRLITGRLQSLQTYVTQQLIRAAEIRWSANLAATKMSECVLGQSKRVDFCGKGYHLMSFPQSAPHGVVFLHVTYVPAQEKNFTTAPAICHDGKAHFPREGVFVSNGTHWFVTQRNFYEPQIITTDNTFVSGNCDVVIGIVNNTVYDPLQPELDSFKEELDKYFKNHTSPDVDLGDISGINASVVNIQKEIDRLNEVAKNLNESLIDLQELGKYEQYIKGGSGYIPEAPRDGQAYVRKDGEWVLLSTFL

SEQ ID NO: 5778 - protein, 1241 aa, Artificial Sequence
  SARS-CoV-2/Australia/QLD02/2020__EPI_ISL_407896 spike protein (1-1211)(K986P_V987P_T887W_A1020W) Foldon construct
MFVFLVLLPLVSSQCVNLTTRTQLPPAYTNSFTRGVYYPDKVFRSSVLHSTQDLFLPFFSNVTWFHAIHVSGTNGTKRFDNPVLPFNDGVYFASTEKSNIIRGWIFGTTLDSKTQSLLIVNNATNVVIKVCEFQFCNDPFLGVYYHKNNKSWMESEFRVYSSANNCTFEYVSQPFLMDLEGKQGNFKNLREFVFKNIDGYFKIYSKHTPINLVRDLPQGFSALEPLVDLPIGINITRFQTLLALHRSYLTPGDSSSGWTAGAAAYYVGYLQPRTFLLKYNENGTITDAVDCALDPLSETKCTLKSFTVEKGIYQTSNFRVQPTESIVRFPNITNLCPFGEVFNATRFASVYAWNRKRISNCVADYSVLYNSASFSTFKCYGVSPTKLNDLCFTNVYADSFVIRGDEVRQIAPGQTGKIADYNYKLPDDFTGCVIAWNSNNLDSKVGGNYNYLYRLFRKSNLKPFERDISTEIYQAGSTPCNGVEGFNCYFPLQSYGFQPTNGVGYQPYRVVVLSFELLHAPATVCGPKKSTNLVKNKCVNFNFNGLTGTGVLTESNKKFLPFQQFGRDIADTTDAVRDPQTLEILDITPCSFGGVSVITPGTNTSNQVAVLYQDVNCTEVPVAIHADQLTPTWRVYSTGSNVFQTRAGCLIGAEHVNNSYECDIPIGAGICASYQTQTNSPRRARSVASQSIIAYTMSLGAENSVAYSNNSIAIPTNFTISVTTEILPVSMTKTSVDCTMYICGDSTECSNLLLQYGSFCTQLNRALTGIAVEQDKNTQEVFAQVKQIYKTPPIKDFGGFNFSQILPDPSKPSKRSFIEDLLFNKVTLADAGFIKQYGDCLGDIAARDLICAQKFNGLTVLPPLLTDEMIAQYTSALLAGTITSGWWFGAGAALQIPFAMQMAYRFNGIGVTQNVLYENQKLIANQFNSAIGKIQDSLSSTASALGKLQDVVNQNAQALNTLVKQLSSNFGAISSVLNDILSRLDPPEAEVQIDRLITGRLQSLQTYVTQQLIRAAEIRWSANLAATKMSECVLGQSKRVDFCGKGYHLMSFPQSAPHGVVFLHVTYVPAQEKNFTTAPAICHDGKAHFPREGVFVSNGTHWFVTQRNFYEPQIITTDNTFVSGNCDVVIGIVNNTVYDPLQLELDSFKEELDKYFKNHTSPDVDLGDISGINASVVNIQKEIDRLNEVAKNLNESLIDLQELGKYEQYIKGGSGYIPEAPRDGQAYVRKDGEWVLLSTFL

SEQ ID NO: 5779 - protein, 1241 aa, Artificial Sequence
  SARS-CoV-2/India/1-31/2020__EPI_ISL_413523 spike protein (1-1211)(K986P_V987P_T887W_A1020W) Foldon construct
MFVFLVLLPLVSSQCVNLTTRTQLPPAYTNSFTRGVYYPDKVFRSSVLHSTQDLFLPFFSNVTWFHAIHVSGTNGTKRFDNPVLPFNDGVYFASTEKSNIIRGWIFGTTLDSKTQSLLIVNNATNVVIKVCEFQFCNDPFLGVYYHKNNKSWMESEFRVYSSANNCTFEYVSQPFLMDLEGKQGNFKNLREFVFKNIDGYFKIYSKHTPINLVRDLPQGFSALEPLVDLPIGINITRFQTLLALHRSYLTPGDSSSGWTAGAAAYYVGYLQPRTFLLKYNENGTITDAVDCALDPLSETKCTLKSFTVEKGIYQTSNFRVQPTESIVRFPNITNLCPFGEVFNATRFASVYAWNRKRISNCVADYSVLYNSASFSTFKCYGVSPTKLNDLCFTNVYADSFVIRGDEVRQIAPGQTGKIADYNYKLPDDFTGCVIAWNSNNLDSKVGGNYNYLYRLFRKSNLKPFERDISTEIYQAGSTPCNGVEGFNCYFPLQSYGFQPTNGVGYQPYRVVVLSFELLHAPATVCGPKKSTNLVKNKCVNFNFNGLTGTGVLTESNKKFLPFQQFGRDIADTTDAVRDPQTLEILDITPCSFGGVSVITPGTNTSNQVAVLYQDVNCTEVPVAIHADQLTPTWRVYSTGSNVFQTRAGCLIGAEHVNNSYECDIPIGAGICASYQTQTNSPRRARSVASQSIIAYTMSLGAENSVAYSNNSIAIPTNFTISVTTEILPVSMTKTSVDCTMYICGDSTECSNLLLQYGSFCTQLNRALTGIAVEQDKNTQEVFAQVKQIYKTPPIKDFGGFNFSQILPDPSKPSKRSFIEDLLFNKVTLADAGFIKQYGDCLGDIAARDLICAQKFNGLTVLPPLLTDEMIAQYTSALLAGTITSGWWFGAGAALQIPFAMQMAYRFNGIGVTQNVLYENQKLIANQFNSVIGKIQDSLSSTASALGKLQDVVNQNAQALNTLVKQLSSNFGAISSVLNDILSRLDPPEAEVQIDRLITGRLQSLQTYVTQQLIRAAEIRWSANLAATKMSECVLGQSKRVDFCGKGYHLMSFPQSAPHGVVFLHVTYVPAQEKNFTTAPAICHDGKAHFPREGVFVSNGTHWFVTQRNFYEPQIITTDNTFVSGNCDVVIGIVNNTVYDPLQPELDSFKEELDKYFKNHTSPDVDLGDISGINASVVNIQKEIDRLNEVAKNLNESLIDLQELGKYEQYIKGGSGYIPEAPRDGQAYVRKDGEWVLLSTFL

SEQ ID NO: 5780 - protein, 1241 aa, Artificial Sequence
  SARS-CoV-2/Guangdong/GD2020087-P0008/2020__EPI_ISL_413863 spike protein (1-1211)(K986P_V987P_T887W_A1020W) Foldon construct
MFVFLVLLPLVSSQCVNLTTRTQLPPAYTNSFTRGVYYPDKVFRSSVLHSTQDLFLPFFSNVTWFHAIHVSGTNGTKRFDNPVLPFNDGVYFASTEKSNIIRGWIFGTTLDSKTQSLLIVNNATNVVIKVCEFQFCNDPFLGVYYHKNNKSWMESEFRVYSSANNCTFEYVSQPFLMDLEGKQGNFKNLREFVFKNIDGYFKIYSKHTPINLVRDLPQGFSALEPLVDLPIGINITRFQTLLALHRSYLTPGDSSSGWTAGAAAYYVGYLQPRTFLLKYNENGTITDAVDCALDPLSETKCTLKSFTVEKGIYQTSNFRVQPTESIVRFPNITNLCPFGEVFNATRFASVYAWNRKRISNCVADYSVLYNSASFSTFKCYGVSPTKLNDLCFTNVYADSFVIRGDEVREIAPGQTGKIADYNYKLPDDFTGCVIAWNSNNLDSKVGGNYNYLYRLFRKSNLKPFERDISTEIYQAGSTPCNGVEGFNCYFPLQSYGFQPTNGVGYQPYRVVVLSFELLHAPATVCGPKKSTNLVKNKCVNFNFNGLTGTGVLTESNKKFLPFQQFGRDIADTTDAVRDPQTLEILDITPCSFGGVSVITPGTNTSNQVAVLYQDVNCTEVPVAIHADQLTPTWRVYSTGSNVFQTRAGCLIGAEHVNNSYECDIPIGAGICASYQTQTNSPRRARSVASQSIIAYTMSLGAENSVAYSNNSIAIPTNFTISVTTEILPVSMTKTSVDCTMYICGDSTECSNLLLQYGSFCTQLNRALTGIAVEQDKNTQEVFAQVKQIYKTPPIKDFGGFNFSQILPDPSKPSKRSFIEDLLFNKVTLADAGFIKQYGDCLGDIAARDLICAQKFNGLTVLPPLLTDEMIAQYTSALLAGTITSGWWFGAGAALQIPFAMQMAYRFNGIGVTQNVLYENQKLIANQFNSAIGKIQDSLSSTASALGKLQDVVNQNAQALNTLVKQLSSNFGAISSVLNDILSRLDPPEAEVQIDRLITGRLQSLQTYVTQQLIRAAEIRWSANLAATKMSECVLGQSKRVDFCGKGYHLMSFPQSAPHGVVFLHVTYVPAQEKNFTTAPAICHDGKAHFPREGVFVSNGTHWFVTQRNFYEPQIITTDNTFVSGNCDVVIGIVNNTVYDPLQPELDSFKEELDKYFKNHTSPDVDLGDISGINASVVNIQKEIDRLNEVAKNLNESLIDLQELGKYEQYIKGGSGYIPEAPRDGQAYVRKDGEWVLLSTFL

SEQ ID NO: 5781 - protein, 1241 aa, Artificial Sequence
  SARS-CoV-2/Sweden/01/2020__EPI_ISL_411951 spike protein (1-1211)(K986P_V987P_T887W_A1020W) Foldon construct
MFVFLVLLPLVSSQCVNLTTRTQLPPAYTNSFTRGVYYPDKVFRSSVLHSTQDLFLPFFSNVTWFHAIHVSGTNGTKRFDNPVLPFNDGVYFASTEKSNIIRGWIFGTTLDSKTQSLLIVNNATNVVIKVCEFQFCNDPFLGVYYHKNNKSWMESEFRVYSSANNCTFEYVSQPFLMDLEGKQGNFKNLREFVFKNIDGYFKIYSKHTPINLVRDLPQGFSALEPLVDLPIGINITRFQTLLALHRSYLTPGDSSSGWTAGAAAYYVGYLQPRTFLLKYNENGTITDAVDCALDPLSETKCTLKSFTVEKGIYQTSNFRVQPTESIVRFPNITNLCPFGEVFNATRFASVYAWNRKRISNCVADYSVLYNSASFSTFKCYGVSPTKLNDLCFTNVYADSFVIRGDEVRQIAPGQTGKIADYNYKLPDDFTGCVIAWNSNNLDSKVGGNYNYLYRLFRKSNLKPFERDISTEIYQAGSTPCNGVEGFNCYFPLQSYGFQPTNGVGYQPYRVVVLSFELLHAPATVCGPKKSTNLVKNKCVNFNFNGLTGTGVLTESNKKFLPFQQFGRDIADTTDAVRDPQTLEILDITPCSFGGVSVITPGTNTSNQVAVLYQDVNCTEVPVAIHADQLTPTWRVYSTGSNVFQTRAGCLIGAEHVNNSYECDIPIGAGICASYQTQTNSPRRARSVASQSIIAYTMSLGAENSVAYSNNSIAIPTNFTISVTTEILPVSMTKTSVDCTMYICGDSTECSNLLLQYGSFCTQLNRALTGIAVEQDKNTQEVFAQVKQIYKTPPIKDCGGFNFSQILPDPSKPSKRSFIEDLLFNKVTLADAGFIKQYGDCLGDIAARDLICAQKFNGLTVLPPLLTDEMIAQYTSALLAGTITSGWWFGAGAALQIPFAMQMAYRFNGIGVTQNVLYENQKLIANQFNSAIGKIQDSLSSTASALGKLQDVVNQNAQALNTLVKQLSSNFGAISSVLNDILSRLDPPEAEVQIDRLITGRLQSLQTYVTQQLIRAAEIRWSANLAATKMSECVLGQSKRVDFCGKGYHLMSFPQSAPHGVVFLHVTYVPAQEKNFTTAPAICHDGKAHFPREGVFVSNGTHWFVTQRNFYEPQIITTDNTFVSGNCDVVIGIVNNTVYDPLQPELDSFKEELDKYFKNHTSPDVDLGDISGINASVVNIQKEIDRLNEVAKNLNESLIDLQELGKYEQYIKGGSGYIPEAPRDGQAYVRKDGEWVLLSTFL

SEQ ID NO: 5782 - protein, 1241 aa, Artificial Sequence
  SARS-CoV-2/Tianmen/HBCDC-HB-07/2020__EPI_ISL_412983 spike protein (1-1211)(K986P_V987P_T887W_A1020W) Foldon construct
MFVFLVLLPLVSSQCVNLTTRTQLPPAYTNSFTRGVYYPDKVFRSSVLHSTQDLFLPFFSNVTWFHAIHVSGTNGTKRFDNPVLPFNDGVYFASTEKSNIIRGWIFGTTLDSKTQSLLIVNNATNVVIKVCEFQFCNDPFLGVYYHKNNKSWMESEFRVYSSANNCTFEYVSQPFLMDLEGKQGNFKNLREFVFKNIDGYFKIYSKHTPINLVRDLPQGFSALEPLVDLPIGINITRFQTLLALHRSYLTPGDSSSGWTAGAAAYYVGYLQPRTFLLKYNENGTITDAVDCALDPLSETKCTLKSFTVEKGIYQTSNFRVQPTESIVRFPNITNLCPFGEVFNATRFASVYAWNRKRISNCVADYSVLYNSASFSTFKCYGVSPTKLNDLCFTNVYADSFVIRGDEVRQIAPGQTGKIADYNYKLPDDFTGCVIAWNSNNLDSKVGGNYNYLYRLFRKSNLKPFERDISTEIYQAGSTPCNGVEGFNCYFPLQSYGFQPTNGVGYQPYRVVVLSFELLHAPATVCGPKKSTNLVKNKCVNFNFNGLTGTGVLTESNKKFLPFQQFGRDIADTTDAVRDPQTLEILDITPCSFGGVSVITPGTNTSNQVAVLYQDLNCTEVPVAIHADQLTPTWRVYSTGSNVFQTRAGCLIGAEHVNNSYECDIPIGAGICASYQTQTNSPRRARSVASQSIIAYTMSLGAENSVAYSNNSIAIPTNFTISVTTEILPVSMTKTSVDCTMYICGDSTECSNLLLQYGSFCTQLNRALTGIAVEQDKNTQEVFAQVKQIYKTPPIKDFGGFNFSQILPDPSKPSKRSFIEDLLFNKVTLADAGFIKQYGDCLGDIAARDLICAQKFNGLTVLPPLLTDEMIAQYTSALLAGTITSGWWFGAGAALQIPFAMQMAYRFNGIGVTQNVLYENQKLIANQFNSAIGKIQDSLSSTASALGKLQDVVNQNAQALNTLVKQLSSNFGAISSVLNDILSRLDPPEAEVQIDRLITGRLQSLQTYVTQQLIRAAEIRWSANLAATKMSECVLGQSKRVDFCGKGYHLMSFPQSAPHGVVFLHVTYVPAQEKNFTTAPAICHDGKAHFPREGVFVSNGTHWFVTQRNFYEPQIITTDNTFVSGNCDVVIGIVNNTVYDPLQPELDSFKEELDKYFKNHTSPDVDLGDISGINASVVNIQKEIDRLNEVAKNLNESLIDLQELGKYEQYIKGGSGYIPEAPRDGQAYVRKDGEWVLLSTFL

SEQ ID NO: 5783 - protein, 1241 aa, Artificial Sequence
  SARS-CoV-2/Hong Kong/case42_VM20002493/2020__EPI_ISL_414527 spike protein (1-1211)(K986P_V987P_T887W_A1020W) Foldon construct
MFVFLVLLPLVSSQCVNLTTRTQLPPAYTNSFTRGVYYPDKVFRSSVLHSTQDLFLPFFSNVTWFHAIHVSGTNGTKRFDNPVLPFNDGVYFASTEKSNIIRGWIFGTTLDSKTQSLLIVNNATNVVIKVCEFQFCNDPFLGVYYHKNNKSWMESEFRVYSSANNCTFEYVSQPFLMDLEGKQGNFKNLREFVFKNIDGYFKIYSKHTPINLVRDLPQGFSALEPLVDLPIGINITRFQTLLALHRSYLTPGDSSSGWTAGAAAYYVGYLQPRTFLLKYNENGTITDAVDCALDPLSETKCTLKSFTVEKGIYQTSNFRVQPTESIVRFPNITNLCPFGEVFNATRFASVYAWNRKRISNCVADYSVLYNSASFSTFKCYGVSPTKLNDLCFTNVYADSFVIRGDEVRQIAPGQTGKIADYNYKLPDDFTGCVIAWNSNNLDSKVGGNYNYLYRLFRKSNLKPFERDISTEIYQAGSTPCNGVEGFNCYFPLQSYGFQPTNGVGYQPYRVVVLSFELLHAPATVCGPKKSTNLVKNKCVNFNFNGLTGTGVLTESNKKFLPFQQFGRDIADTTDAVRDPQTLEILDITPCSFGGVSVITPGTNTSNQVAVLYQDVNCTEVPVAIHADQLTPTWRVYSTGSNVFQTRAGCLIGAEHVNNSYECDIPIGAGICASYQTQTNSPRRARSVASQSIIAYTMSLGAENSVAYSNNSIAIPTNFAISVTTEILPVSMTKTSVDCTMYICGDSTECSNLLLQYGSFCTQLNRALTGIAVEQDKNTQEVFAQVKQIYKTPPIKDFGGFNFSQILPDPSKPSKRSFIEDLLFNKVTLADAGFIKQYGDCLGDIAARDLICAQKFNGLTVLPPLLTDEMIAQYTSALLAGTITSGWWFGAGAALQIPFAMQMAYRFNGIGVTQNVLYENQKLIANQFNSAIGKIQDSLSSTASALGKLQDVVNQNAQALNTLVKQLSSNFGAISSVLNDILSRLDPPEAEVQIDRLITGRLQSLQTYVTQQLIRAAEIRWSANLAATKMSECVLGQSKRVDFCGKGYHLMSFPQSAPHGVVFLHVTYVPAQEKNFTTAPAICHDGKAHFPREGVFVSNGTHWFVTQRNFYEPQIITTDNTFVSGNCDVVIGIVNNTVYDPLQPELDSFKEELDKYFKNHTSPDVDLGDISGINASVVNIQKEIDRLNEVAKNLNESLIDLQELGKYEQYIKGGSGYIPEAPRDGQAYVRKDGEWVLLSTFL

SEQ ID NO: 5784 - protein, 1241 aa, Artificial Sequence
  SARS-CoV-2/USA/CruiseA-23/2020__EPI_ISL_414482 spike protein (1-1211)(K986P_V987P_T887W_A1020W) Foldon construct
MFVFLVLLPLVSSQCVNLTTRTQLPPAYTNSFTRGVYYPDKVFRSSVLHSTQDLFLPFFSNVTWFHAIHVSGTNGTKRFDNPVLPFNDGVYFASTEKSNIIRGWIFGTTLDSKTQSLLIVNNATNVVIKVCEFQFCNDPFLGVYYHKNNKSWMESEFRVYSSANNCTFEYVSQPFLMDLEVKQGNFKNLREFVFKNIDGYFKIYSKHTPINLVRDLPQGFSALEPLVDLPIGINITRFQTLLALHRSYLTPGDSSSGWTAGAAAYYVGYLQPRTFLLKYNENGTITDAVDCALDPLSETKCTLKSFTVEKGIYQTSNFRVQPTESIVRFPNITNLCPFGEVFNATRFASVYAWNRKRISNCVADYSVLYNSASFSTFKCYGVSPTKLNDLCFTNVYADSFVIRGDEVRQIAPGQTGKIADYNYKLPDDFTGCVIAWNSNNLDSKVGGNYNYLYRLFRKSNLKPFERDISTEIYQAGSTPCNGVEGFNCYFPLQSYGFQPTNGVGYQPYRVVVLSFELLHAPATVCGPKKSTNLVKNKCVNFNFNGLTGTGVLTESNKKFLPFQQFGRDIADTTDAVRDPQTLEILDITPCSFGGVSVITPGTNTSNQVAVLYQDVNCTEVPVAIHADQLTPTWRVYSTGSNVFQTRAGCLIGAEHVNNSYECDIPIGAGICASYQTQTNSPRRARSVASQSIIAYTMSLGAENSVAYSNNSIAIPTNFTISVTTEILPVSMTKTSVDCTMYICGDSTECSNLLLQYGSFCTQLNRALTGIAVEQDKNTQEVFAQVKQIYKTPPIKDFGGFNFSQILPDPSKPSKRSFIEDLLFNKVTLADAGFIKQYGDCLGDIAARDLICAQKFNGLTVLPPLLTDEMIAQYTSALLAGTITSGWWFGAGAALQIPFAMQMAYRFNGIGVTQNVLYENQKLIANQFNSAIGKIQDSLSSTASALGKLQDVVNQNAQALNTLVKQLSSNFGAISSVLNDILSRLDPPEAEVQIDRLITGRLQSLQTYVTQQLIRAAEIRWSANLAATKMSECVLGQSKRVDFCGKGYHLMSFPQSAPHGVVFLHVTYVPAQEKNFTTAPAICHDGKAHFPREGVFVSNGTHWFVTQRNFYEPQIITTDNTFVSGNCDVVIGIVNNTVYDPLQPELDSFKEELDKYFKNHTSPDVDLGDISGINASVVNIQKEIDRLNEVAKNLNESLIDLQELGKYEQYIKGGSGYIPEAPRDGQAYVRKDGEWVLLSTFL

SEQ ID NO: 5785 - protein, 1241 aa, Artificial Sequence
  SARS-CoV-2/Hong Kong/case85_VM20002868/2020__EPI_ISL_414519 spike protein (1-1211)(K986P_V987P_T887W_A1020W) Foldon construct
MFVFLVLVPLVSSQCVNLTTRTQLPPAYTNSFTRGVYYPDKVFRSSVLHSTQDLFLPFFSNVTWFHAIHVSGTNGTKRFDNPVLPFNDGVYFASTEKSNIIRGWIFGTTLDSKTQSLLIVNNATNVVIKVCEFQFCNDPFLGVYYHKNNKSWMESEFRVYSSANNCTFEYVSQPFLMDLEGKQGNFKNLREFVFKNIDGYFKIYSKHTPINLVRDLPQGFSALEPLVDLPIGINITRFQTLLALHRSYLTPGDSSSGWTAGAAAYYVGYLQPRTFLLKYNENGTITDAVDCALDPLSETKCTLKSFTVEKGIYQTSNFRVQPTESIVRFPNITNLCPFGEVFNATRFASVYAWNRKRISNCVADYSVLYNSASFSTFKCYGVSPTKLNDLCFTNVYADSFVIRGDEVRQIAPGQTGKIADYNYKLPDDFTGCVIAWNSNNLDSKVGGNYNYLYRLFRKSNLKPFERDISTEIYQAGSTPCNGVEGFNCYFPLQSYGFQPTNGVGYQPYRVVVLSFELLHAPATVCGPKKSTNLVKNKCVNFNFNGLTGTGVLTESNKKFLPFQQFGRDIADTTDAVRDPQTLEILDITPCSFGGVSVITPGTNTSNQVAVLYQDVNCTEVPVAIHADQLTPTWRVYSTGSNVFQTRAGCLIGAEHVNNSYECDIPIGAGICASYQTQTNSPRRARSVASQSIIAYTMSLGAENSVAYSNNSIAIPTNFTISVTTEILPVSMTKTSVDCTMYICGDSTECSNLLLQYGSFCTQLNRALTGIAVEQDKNTQEVFAQVKQIYKTPPIKDFGGFNFSQILPDPSKPSKRSFIEDLLFNKVTLADAGFIKQYGDCLGDIAARDLICAQKFNGLTVLPPLLTDEMIAQYTSALLAGTITSGWWFGAGAALQIPFAMQMAYRFNGIGVTQNVLYENQKLIANQFNSAIGKIQDSLSSTASALGKLQDVVNQNAQALNTLVKQLSSNFGAISSVLNDILSRLDPPEAEVQIDRLITGRLQSLQTYVTQQLIRAAEIRWSANLAATKMSECVLGQSKRVDFCGKGYHLMSFPQSAPHGVVFLHVTYVPAQEKNFTTAPAICHDGKAHFPREGVFVSNGTHWFVTQRNFYEPQIITTDNTFVSGNCDVVIGIVNNTVYDPLQPELDSFKEELDKYFKNHTSPDVDLGDISGINASVVNIQKEIDRLNEVAKNLNESLIDLQELGKYEQYIKGGSGYIPEAPRDGQAYVRKDGEWVLLSTFL

SEQ ID NO: 5786 - protein, 1241 aa, Artificial Sequence; identical to SEQ ID NO: 5776
  SARS-CoV-2/England/200990660/2020__EPI_ISL_414523 spike protein (1-1211)(K986P_V987P_T887W_A1020W) Foldon construct

SEQ ID NO: 5787 - protein, 1241 aa, Artificial Sequence
  SARS-CoV-2/Australia/NSW09/2020__EPI_ISL_413595 spike protein (1-1211)(K986P_V987P_T887W_A1020W) Foldon construct
MFVFLVLLPLVSSQCVNLTTRTQLPPAYTNSFTRGVYYPDKVFRSSVLHSTQDLFLPFFSNVTWFHAIHVSGTNGTKRFDNPVLPFNDGVYFASTEKSNIIRGWIFGTTLDSKTQSLLIVNNATNVVIKVCEFQFCNDPFLGVYYHKNNKSWMESEFRVYSSANNCTFEYVSQPFLMDLEGKQGNFKNLREFVFKNIDGYFKIYSKHTPINLVRDLPQGFSALEPLVDLPIGINITRFQTLLALHRSYLTPGDSSSGWTAGAAAYYVGYLQPRTFLLKYNENGTITDAVDCALDPLSETKCTLKSFTVEKGIYQTSNFRVQPTESIVRFPNITNLCPFGEVFNATRFASVYAWNRKRISNCVADYSVLYNSASFSTFKCYGVSPTKLNDLCFTNVYADSFVIRGDEVRQIAPGQTGKIADYNYKLPDDFTGCVIAWNSNNLDSKVGGNYNYLYRLFRKSNLKPFERDISTEIYQAGSTPCNGVEGFNCYFPLQSYGFQPTNGVGYQPYRVVVLSFELLHAPATVCGPKKSTNLVKNKCVNFNFNGLTGTGVLTESNKKFLPFQQFGRDIADTTDAVRDPQTLEILDITPCSFGGVSVITPGTNTSNQVAVLYQDVNCTEVPVAIHADQLTPTWRVYSTGSNVFQTRAGCLIGAEHVNNSYECDIPIGAGICASYQTQTNSPRRARSVASQSIIAYTMSLGAENSVAYSNNSIAIPTNFTISVTTEILPVSMTKTSVDCTMYICGDSTECSNLLLQYGSFCTQLNRALTGIAVEQDKNTQEVFAQVKQIYKTPPIKDFGGFNFSQILPDPSKPSKRSFIEDLLFNKVTLADAGFIKQYGDCLGDIAARDLICAQKFNGLTVLPPLLTDEMIAQYTSALLAGTITSGWWFGAGAALQIPFAMQMAYRFNGIGVTQNVLYENQKLIANQFNSAIGKIQDSLSFTASALGKLQDVVNQNAQALNTLVKQLSSNFGAISSVLNDILSRLDPPEAEVQIDRLITGRLQSLQTYVTQQLIRAAEIRWSANLAATKMSECVLGQSKRVDFCGKGYHLMSFPQSAPHGVVFLHVTYVPAQEKNFTTAPAICHDGKAHFPREGVFVSNGTHWFVTQRNFYEPQIITTDNTFVSGNCDVVIGIVNNTVYDPLQPELDSFKEELDKYFKNHTSPDVDLGDISGINASVVNIQKEIDRLNEVAKNLNESLIDLQELGKYEQYIKGGSGYIPEAPRDGQAYVRKDGEWVLLSTFL

SEQ ID NO: 5788 - protein, 1241 aa, Artificial Sequence; identical to SEQ ID NO: 5768
  SARS-CoV-2/Australia/NSW10/2020__EPI_ISL_413596 spike protein (1-1211)(K986P_V987P_T887W_A1020W) Foldon construct

SEQ ID NO: 5789 - protein, 1241 aa, Artificial Sequence
  SARS-CoV-2/Switzerland/1000477797/2020__EPI_ISL_413023 spike protein (1-1211)(K986P_V987P_T887W_A1020W) Foldon construct
MFVFLVLLPLVSSQCVNLTTRTQLPPAYTNSFTRGVYYPDKVFRSSVLHSTQDLFLPFFSNVTWFHAIHVSGTNGTKRFDNPVLPFNDGVYFASTEKSNIIRGWIFGTTLDSKTQSLLIVNNATNVVIKVCEFQFCNDPFLGVYYHKNNKSWMESEFRVYSSANNCTFEYVSQPFLMDLEGKQGNFKNLREFVFKNIDGYFNIYSKHTPINLVRDLPQGFSALEPLVDLPIGINITRFQTLLALHRSYLTPGDSSSGWTAGAAAYYVGYLQPRTFLLKYNENGTITDAVDCALDPLSETKCTLKSFTVEKGIYQTSNFRVQPTESIVRFPNITNLCPFGEVFNATRFASVYAWNRKRISNCVADYSVLYNSASFSTFKCYGVSPTKLNDLCFTNVYADSFVIRGDEVRQIAPGQTGKIADYNYKLPDDFTGCVIAWNSNNLDSKVGGNYNYLYRLFRKSNLKPFERDISTEIYQAGSTPCNGVEGFNCYFPLQSYGFQPTNGVGYQPYRVVVLSFELLHAPATVCGPKKSTNLVKNKCVNFNFNGLTGTGVLTESNKKFLPFQQFGRDIADTTDAVRDPQTLEILDITPCSFGGVSVITPGTNTSNQVAVLYQGVNCTEVPVAIHADQLTPTWRVYSTGSNVFQTRAGCLIGAEHVNNSYECDIPIGAGICASYQTQTNSPRRARSVASQSIIAYTMSLGAENSVAYSNNSIAIPTNFTISVTTEILPVSMTKTSVDCTMYICGDSTECSNLLLQYGSFCTQLNRALTGIAVEQDKNTQEVFAQVKQIYKTPPIKDFGGFNFSQILPDPSKPSKRSFIEDLLFNKVTLADAGFIKQYGDCLGDIAARDLICAQKFNGLTVLPPLLTDEMIAQYTSALLAGTITSGWWFGAGAALQIPFAMQMAYRFNGIGVTQNVLYENQKLIANQFNSAIGKIQDSLSSTASALGKLQDVVNQNAQALNTLVKQLSSNFGAISSVLNDILSRLDPPEAEVQIDRLITGRLQSLQTYVTQQLIRAAEIRWSANLAATKMSECVLGQSKRVDFCGKGYHLMSFPQSAPHGVVFLHVTYVPAQEKNFTTAPAICHDGKAHFPREGVFVSNGTHWFVTQRNFYEPQIITTDNTFVSGNCDVVIGIVNNTVYDPLQPELDSFKEELDKYFKNHTSPDVDLGDISGINASVVNIQKEIDRLNEVAKNLNESLIDLQELGKYEQYIKGGSGYIPEAPRDGQAYVRKDGEWVLLSTFL

SEQ ID NO: 5790 - protein, 1241 aa, Artificial Sequence
  SARS-CoV-2/Belgium/BA-02291/2020__EPI_ISL_415159 spike protein (1-1211)(K986P_V987P_T887W_A1020W) Foldon construct
MFVFLVLLPLVSSQCVNLTTRTQLPPAYTNSFTRGVYYPDKVFRSSVLHSTQDLFLPFFSNVTWFHAIHVSGTNGTKRFDNPVLPFNDGVYFASTEKSNIIRGWIFGTTLDSKTQSLLIVNNATNVVIKVCEFQFCNDPFLGVYYHKNNKSWMESEFRVYSSANNCTFEYVSQPFLMDLEGKQGNFKNLREFVFKNIDGYFKIYSKHTPINLVRDLPQGFSALEPLVDLPIGINITRFQTLLALHRSYLTPGDSSSGWTAGAAAYYVGYLQPRTFLLKYNENGTITDAVDCALDPLSETKCTLKSFTVEKGIYQTSNFRVQPTESIVRFPNITNLCPFGEVFNATRFASVYAWNRKRISNCVADYSVLYNSASFSTFKCYGVSPTKLNDLCFTNVYADSFVIRGDEVRQIAPGQTGKIADYNYKLPDDFTGCVIAWNSNNLDSKVGGNYNYLYRLFRRSNLKPFERDISTEIYQAGSTPCNGVEGFNCYFPLQSYGFQPTNGVGYQPYRVVVLSFELLPAPATVCGPKKSTNLVKNKCVNFNFNGLTGTGVLTESNKKFLPFQQFGRDIADTTDAVRDPQTLEILDITPCSFGGVSVITPGTNTSNQVAVLYQGVNCTEVPVAIHADQLTPTWRVYSTGSNVFQTRAGCLIGAEHVNNSYECDIPIGAGICASYQTQTNSPRRARSVASQSIIAYTMSLGAENSVAYSNNSIAIPTNFTISVTTEILPVSMTKTSVDCTMYICGDSTECSNLLLQYGSFCTQLNRALTGIAVEQDKNTQEVFAQVKQIYKTPPIKDFGGFNFSQILPDPSKPSKRSFIEDLLFNKVTLADAGFIKQYGDCLGDIAARDLICAQKFNGLTVLPPLLTDEMIAQYTSALLAGTITSGWWFGAGAALQIPFAMQMAYRFNGIGVTQNVLYENQKLIANQFNSAIGKIQDSLSSAAPALGKLQDVVNQNAQALNTLVKQLSSNFGAISSVLNDILSRLDPPEAEVQIDRLITGRLQSLQTYVTQQLIRAAEIRWSANLAATKMSECVLGQSKRVDFCGKGYHLMSFPQSAPHGVVFLHVTYVPAQEKNFTTAPAICHDGKAHFPREGVFVSNGTHWFVTQRNFYEPQIITTDNTFVSGNCDVVIGIVNNTVYDPLQPELDSFKEELDKYFKNHTSPDVDLGDISGINASVVNIQKEIDRLNEVAKNLNESLIDLQELGKYEQYIKGGSGYIPEAPRDGQAYVRKDGEWVLLSTFL

SEQ ID NO: 5791 - protein, 1241 aa, Artificial Sequence
  SARS-CoV-2/USA/WA8-UW5/2020__EPI_ISL_413486 spike protein (1-1211)(K986P_V987P_T887W_A1020W) Foldon construct
MFVFLVLLPLVSSQCVNLTTRTQLPPAYTNSFTRGVYYPDKVFRSSVLHSTQDLFLPFFSNVTWFHAIHVSGTNGTKRFDNPVLPFNDGVYFASTEKSNIIRGWIFGTTLDSKTQSLLIVNNATNVVIKVCEFQFCNDPFLGVYYHKNNKSWMESEFRVYSSANNCTFEYVSQPFLMDLEGKQGNFKNLREFVFKNIDGYFKIYSKHTPINLVRDLPQGFSALEPLVDLPIGINITRFQTLLALHRSYLTPGDSSSGWTAGAAAYYVGYLQPRTFLLKYNENGTITDAVDCALDPLSETKCTLKSFTVEKGIYQTSNFRVQPTESIVRFPNITNLCPFGEVFNATRFASVYAWNRKRISNCVADYSVLYNSASFSTFKCYGVSPTKLNDLCFTNVYADSFVIRGDEVRQIAPGQTGKIADYNYKLPDDFTGCVIAWNSNNLDSKVGGNYNYLYRLFRKSNLKPFERDISTEIYQAGSTPCNGVEGFNCYFPLQSYGFQPTNGVGYQPYRVVVLSFELLHAPATVCGPKKSTNLVKNKCVNFNFNGLTGTGVLTESNKKFLPFQQFGRDIADTTDAVRDPQTLEILDITPCSFGGVSVITPGTNTSNQVAVLYQDVNCTEVPVAIHADQLTPTWRVYSTGSNVFQTRAGCLIGAEYVNNSYECDIPIGAGICASYQTQTNSPRRARSVASQSIIAYTMSLGAENSVAYSNNSIAIPTNFTISVTTEILPVSMTKTSVDCTMYICGDSTECSNLLLQYGSFCTQLNRALTGIAVEQDKNTQEVFAQVKQIYKTPPIKDFGGFNFSQILPDPSKPSKRSFIEDLLFNKVTLADAGFIKQYGDCLGDIAARDLICAQKFNGLTVLPPLLTDEMIAQYTSALLAGTITSGWWFGAGAALQIPFAMQMAYRFNGIGVTQNVLYENQKLIANQFNSAIGKIQDSLSSTASALGKLQDVVNQNAQALNTLVKQLSSNFGAISSVLNDILSRLDPPEAEVQIDRLITGRLQSLQTYVTQQLIRAAEIRWSANLAATKMSECVLGQSKRVDFCGKGYHLMSFPQSAPHGVVFLHVTYVPAQEKNFTTAPAICHDGKAHFPREGVFVSNGTHWFVTQRNFYEPQIITTDNTFVSGNCDVVIGIVNNTVYDPLQPELDSFKEELDKYFKNHTSPDVDLGDISGINASVVNIQKEIDRLNEVAKNLNESLIDLQELGKYEQYIKGGSGYIPEAPRDGQAYVRKDGEWVLLSTFL

SEQ ID NO: 5792 - protein, 1241 aa, Artificial Sequence
  SARS-CoV-2/England/20102000506/2020__EPI_ISL_415147 spike protein (1-1211)(K986P_V987P_T887W_A1020W) Foldon construct
MFVFLVLLPLVSSQCVNLTTRTQLPPAYTNSFTRGVYYPDKVFRSSVLHSTQDLFLPFFSNVTWFHAIHVSGTNGTKRFDNPVLPFNDGVYFASTEKSNIIRGWIFGTTLDSKTQSLLIVNNATNVVIKVCEFQFCNDPFLGVYYHKNNKSWMESEFRVYSSANNCTFEYVSQPFLMDLEGKQGNFKNLREFVFKNIDGYFKIYSKHTPINLVRDLPQGFSALEPLVDLPIGINITRFQTLLALHRSYLTPGDSSSGWTAGAAAYYVGYLQPRTFLLKYNENGTITDAVDCALDPLSETKCTLKSFTVEKGIYQTSNFRVQPTESIVRFPNITNLCPFGEVFNATRFASVYAWNRKRISNCVADYSVLYNSASFSTFKCYGVSPTKLNDLCFTNVYADSFVIRGDEVRQIAPGQTGKIADYNYKLPDDFTGCVIAWNSNNLDSKVGGNYNYLYRLFRKSNLKPFERDISTEIYQAGSTPCNGVEGFNCYFPLQSYGFQPTNGVGYQPYRVVVLSFELLHAPATVCGPKKSTNLVKNKCVNFNFNGLTGTGVLTESNKKFLPFQQFGRDIADTTDAVRDPQTLEILDITPCSFGGVSVITPGTNTSNQVAVLYQGVNCTEVPVAIHADQLTPTWRVYSTGSNVFQTRAGCLIGAEHVNNSYECDIPIGAGICASYQTQTNSPRRARSVASQSIIAYTMSLGAENSVAYSNNSIAIPTNFTISVTTEILPVSMTKTSVDCTMYICGDSTECSNLLLQYGSFCTQLNRALTGIAVEQDKNTQEVFAQVKQIYKTPPIKDFGGFNFSQILPDPSKPSKRSFIEDLLFNKVTLADAGFIKQYGYCLGDIAARDLICAQKFNGLTVLPPLLTDEMIAQYTSALLAGTITSGWWFGAGAALQIPFAMQMAYRFNGIGVTQNVLYENQKLIANQFNSAIGKIQDSLSSTASALGKLQDVVNQNAQALNTLVKQLSSNFGAISSVLNDILSRLDPPEAEVQIDRLITGRLQSLQTYVTQQLIRAAEIRWSANLAATKMSECVLGQSKRVDFCGKGYHLMSFPQSAPHGVVFLHVTYVPAQEKNFTTAPAICHDGKAHFPREGVFVSNGTHWFVTQRNFYEPQIITTDNTFVSGNCDVVIGIVNNTVYDPLQPELDSFKEELDKYFKNHTSPDVDLGDISGINASVVNIQKEIDRLNEVAKNLNESLIDLQELGKYEQYIKGGSGYIPEAPRDGQAYVRKDGEWVLLSTFL

SEQ ID NO: 5793 - protein, 1241 aa, Artificial Sequence
  SARS-CoV-2/Belgium/VAG-03013/2020__EPI_ISL_415155 spike protein (1-1211)(K986P_V987P_T887W_A1020W) Foldon construct
MFVFLVLLPLVSSQCVNLTTRTQLPPAYTNSFTRGVYYPDKVFRSSVLHSTQDLFLPFFSNVTWFHAIHVSGTNGTKRFDNPVLPFNDGVYFASTEKSNIIRGWIFGTTLDSKTQSLLIVNNATNVVIKVCEFQFCNDPFLGVYYHKNNKSWMESEFRVYSSANNCTFEYVSQPFLMDLEGKQGNFKNLREFVFKNIDGYFKIYSKHTPINLVRDLPQGFSALEPLVDLPIGINITRFQTLLALHRSYLTPGDSSSGWTAGAAAYYVGYLQPRTFLLKYNENGTITDAVDCALDPLSETKCTLKSFTVEKGIYQTSNFRVQPTESIVRFPNITNLCPFGEVFNATRFASVYAWNRKRISNCVADYSVLYNSASFSTFKCYGVSPTKLNDLCFTNVYADSFVIRGDEVRQIAPGQTGKIADYNYKLPDDFTGCVIAWNSNNLDSKVGGNYNYLYRLFRKSNLKPFERDISTEIYQAGSTPCNGVEGFNCYFPLQSYGFQPTNGVGYQPYRVVVLSFELLHAPATVCGPKKSTNLVKNKCVNFNFNGLTGTGVLTESNKKFLPFQQFGRDIADTTDAVRDPQTLEILDITPCSFGGVSVITPGTNTSNQVAVLYQGVNCTEVPVAIHADQLTPTWRVYSTGSNVFQTRAGCLIGAEHVNNSYECDIPIGAGICASYQTQTNSPRRARSVASQSIIAYTMSLGAENSVAYSNNSIAIPTNFTISVTTEILPVSMTKTSVDCTMYICGDSTECSNLLLQYGSFCTQLNRALTGIAVEQDKNTQEVFAQVKQIYKTPPIKDFGGFNFSQILPDPSKPSKRSFIEDLLFNKVTLADAGFIKQYGDCLGDIAARDLICAQKFNGLTVLPPLLTDEMIAQYTSALLAGTITSGWWFGAGAALQIPFAMQMAYRFNGIGVTQNVLYENQKLIANQFNSAIGKIQDSLSSTATALGKLQDVVNQNAQALNTLVKQLSSNFGAISSVLNDILSRLDPPEAEVQIDRLITGRLQSLQTYVTQQLIRAAEIRWSANLAATKMSECVLGQSKRVDFCGKGYHLMSFPQSAPHGVVFLHVTYVPAQEKNFTTAPAICHDGKAHFPREGVFVSNGTHWFVTQRNFYEPQIITTDNTFVSGNCDVVIGIVNNTVYDPLQPELDSFKEELDKYFKNHTSPDVDLGDISGINASVVNIQKEIDRLNEVAKNLNESLIDLQELGKYEQYIKGGSGYIPEAPRDGQAYVRKDGEWVLLSTFL

SEQ ID NO: 5794 - protein, 1241 aa, Artificial Sequence
  SARS-CoV-2/Belgium/BC-03016/2020__EPI_ISL_415157 spike protein (1-1211)(K986P_V987P_T887W_A1020W) Foldon construct
MFVFLVLLPLVSSQCVNLTTRTQLPPAYTNSFTRGVYYPDKVFRSSVLHSTQDLFLPFFSNVTWFHAIHVSGTNGTKRFDNPVLPFNDGVYFASTEKSNIIRGWIFGTTLDSKTQSLLIVNNATNVVIKVCEFQFCNDPFLGVYYHKNNKSWMESEFRVYSSANNCTFEYVSQPFLMDLEGKQGNFKNLREFVFKNIDGYFKIYSKHTPINLVRDLPQGFSALEPLVDLPIGINITRFQTLLALHRSYLTPGDSSSGWTAGAAAYYVGYLQPRTFLLKYNENGTITDAVDCALDPLSETKCTLKSFTVEKGIYQTSNFRVQPTESIVRFPNITNLCPFGEVFNATRFASVYAWNRKRISNCVADYSVLYNSASFSTFKCYGVSPTKLNDLCFTNVYADSFVIRGDEVRQIAPGQTGKIADYNYKLPDDFTGCVIAWNSNNLDSKVGGNYNYLYRLFRKSNLKPFERDISTEIYQAGSTPCNGVEGFNCYFPLQSYGFQPTNGVGYQPYRVVVLSFELLHAPATVCGPKKSTNLVKNKCVNFNFNGLTGTGVLTESNKKFLPFQQFGRDIADTTDAVRDPQTLEILDITPCSFGGVSVITPGTNTSNQVAVLYQGVNCTEVPVAIHADQLTPTWRVYSTGSNVFQTRAGCLIGAEHVNNSYECDIPIGAGICASYQTQTNSPRRARSVASQSIIAYTMSLGAENSVAYSNNSIAIPTNFTISVTTEILPVSMTKTSVDCTMYICGDSTECSNLLLQYGSFCTQLNRALTGIAVEQDKNTQEVFAQVKQIYKTPPIKDFGGFNFSQILPDPSKPSKRSFIEDLLFNKVTLADAGFIKQYGDCLGDIAARDLICAQKFNGLTVLPPLLTDEMIAQYTSALLAGTITSGWWFGAGAALQIPFAMQMAYRFNGIGVTQNVLYENQKLIANQFNSAIGKIQDSLSSTAPALGKLQDVVNQNAQALNTLVKQLSSNFGAISSVLNDILSRLDPPEAEVQIDRLITGRLQSLQTYVTQQLIRAAEIRWSANLAATKMSECVLGQSKRVDFCGKGYHLMSFPQSAPHGVVFLHVTYVPAQEKNFTTAPAICHDGKAHFPREGVFVSNGTHWFVTQRNFYEPQIITTDNTFVSGNCDVVIGIVNNTVYDPLQPELDSFKEELDKYFKNHTSPDVDLGDISGINASVVNIQKEIDRLNEVAKNLNESLIDLQELGKYEQYIKGGSGYIPEAPRDGQAYVRKDGEWVLLSTFL

SEQ ID NO: 5795 - protein, 1241 aa, Artificial Sequence
  SARS-CoV-2/Germany/BavPat3/2020__EPI_ISL_414521 spike protein (1-1211)(K986P_V987P_T887W_A1020W) Foldon construct
MFVFLVLLPLVSSQCVNLTTRTQLPPAYTNSFTRGVYYPDKVFRSSVLHSTQDLFLPFFSNVTWFHAIHVSGTNGTKRFDNPVLPFNDGVYFASTEKSNIIRGWIFGTTLDSKTQSLLIVNNATNVVIKVCEFQFCNDPFLGVYYHKNNKSWMESEFRVYSSANNCTFEYVSQPFLMDLEGKQGNFKNLREFVFKNIDGYFKIYSKHTPINLVRDLPQGFSALEPLVDLPIGINITRFQTLLALHRSYLTPGDSSSGWTAGAAAYYVGYLQPRTFLLKYNENGTITDAVDCALDPLSETKCTLKSFTVEKGIYQTSNFRVQPTESIVRFPNITNLCPFGEVFNATRFASVYAWNRKRISNCVADYSVLYNSASFSTFKCYGVSPTKLNDLCFTNVYADSFVIRGDEVRQIAPGQTGKIADYNYKLPDDFTGCVIAWNSNNLDSKVGGNYNYLYRLFRKSNLKPFERDISTEIYQAGSTPCNGVEGFNCYFPLQSYGFQPTNGVGYQPYRVVVLSFELLHAPATVCGPKKSTNLVKNKCVNFNFNGLTGTGVLTESNKKFLPFQQFGRDIADTTDAVRDPQTLEILDITPCSFGGVSVITPGTNTSNQVAVLYQDVNCTEVPVAIHADQLTPTWRVYSTGSNVFQTRAGCLIGAEHVNNSYECDIPIGAGICASYQTQTNSPRRARSVASQSIIAYTMSLGAENSVAYSNNSIAIPTNFTISVTTEILPVSMTKTSVDCTMYICGDSTECSNLLLQYGSFCTQLNRALTGIAVEQDKNTQQVFAQVKQIYKTPPIKDFGGFNFSQILPDPSKPSKRSFIEDLLFNKVTLADAGFIKQYGDCLGDIAARDLICAQKFNGLTVLPPLLTDEMIAQYTSALLAGTITSGWWFGAGAALQIPFAMQMAYRFNGIGVTQNVLYENQKLIANQFNSAIGKIQDSLSSTASALGKLQDVVNQNAQALNTLVKQLSSNFGAISSVLNDILSRLDPPEAEVQIDRLITGRLQSLQTYVTQQLIRAAEIRWSANLAATKMSECVLGQSKRVDFCGKGYHLMSFPQSAPHGVVFLHVTYVPAQEKNFTTAPAICHDGKAHFPREGVFVSNGTHWFVTQRNFYEPQIITTDNTFVSGNCDVVIGIVNNTVYDPLQPELDSFKEELDKYFKNHTSPDVDLGDISGINASVVNIQKEIDRLNEVAKNLNESLIDLQELGKYEQYIKGGSGYIPEAPRDGQAYVRKDGEWVLLSTFL

SEQ ID NO: 5796 - protein, 1241 aa, Artificial Sequence
  SARS-CoV-2/France/HF1805/2020__EPI_ISL_414628 spike protein (1-1211)(K986P_V987P_T887W_A1020W) Foldon construct
MFVFLVLLPLVSSQCVNLTTRTQLPPAYTNSFTRGVYYPDKVFRSSVLHSTQDLFLPFFSNVTWFHAIHVSGTNGTKRFDNPVLPFNDGVYFASTEKSNIIRGWIFGTTLDSKTQSLLIVNNATNVVIKVCEFQFCNDPFLGVYYHKNNKSWMESEFRVYSSANNCTFEYVSQPFLMDLEGKQGNFKNLREFVFKNIDGYFKIYSKHTPINLVRDLPQGFSALEPLVDLPIGINITRFQTLLALHRSYLTPGDSSSGWTAGAAAYYVGYLQPRTFLLKYNENGTITDAVDCALDPLSETKCTLKSFTVEKGIYQTSNFRVQPTESIVRFPNITNLCPFGEVFNATRFASVYAWNRKRISNCVADYSVLYNSASFSTFKCYGVSPTKLNDLCFTNVYADSFVIRGDEVRQIAPGQTGKIADYNYKLPDDFTGCVIAWNSNNLDSKVGGNYNYLYRLFRKSNLKPFERDISTEIYQAGSTPCNGVEGFNCYFPLQSYGFQPTNGVGYQPYRVVVLSFELLHAPATVCGPKKSTNLVKNKCVNFNFNGLTGTGVLTESNKKFLPFQQFGRDIADTTDAVRDPQTLEILDITPCSFGGVSVITPGTNTSNQVAVLYQGVNCTEVPVAIHADQLTPTWRVYSTGSNVFQTRAGCLIGAEHVNNSYECDIPIGAGICASYQTQTNSPRRARSVASQSIIAYTMSLGAENSVAYSNNSIAIPTNFTISVTTEILPVSMTKTSVDCTMYICGDSTECSNLLLQYGSFCTQLNRALTGIAVEQDKNTQEVFAQVKQIYKTPPIKDFGGFNFSQILPDPSKPSKRSFIEDLLFNKVTLADAGFIKQYGDCLGDIAARDLICAQKFNGLTVLPPLLTDEMIAQYTSALLAGTITSGWWFGAGAALQIPFAMQMAYRFNGIGVTQNVLYENQKLIANQFNSAIGKIQDSLSSTASALGKLQDVVNQNAQALNTLVKQLSSNFGAISSVLNDILSRLDPPEAEVQIDRLITGRLQSLQTYVTQQLIRAAEIRWSANLAATKMSECVLGQSKRVDFCGKGYHLMSFPQSAPHGVVFLHVTYVPAQEKNFTTAPAICHDGKAHFPREGVFVSNGTHWFVTQRNFYEPQIITTDNTFVSGNCDVVIGVVNNTVYDPLQPELDSFKEELDKYFKNHTSPDVDLGDISGINASVVNIQKEIDRLNEVAKNLNESLIDLQELGKYEQYIKGGSGYIPEAPRDGQAYVRKDGEWVLLSTFL

SEQ ID NO: 5797 - protein, 1241 aa, Artificial Sequence
  SARS-CoV-2/Netherlands/ZuidHolland_9/2020__EPI_ISL_414445 spike protein (1-1211)(K986P_V987P_T887W_A1020W) Foldon construct
MFVFLVLLPLVSSQCVNLTTRTQLPPAYTNSFTRGVYYPDKVFRSSVLHSTQDLFLPFFSNVTWFHAIHVSGTNGTKRFDNPVLPFNDGVYFASTEKSNIIRGWIFGTTLDSKTQSLLIVNNATNVVIKVCEFQFCNDPFLGVYYHKNNKSWMESEFRVYSSANNCTFEYVSQPFLMDLEGKQGNFKNLREFVFKNIDGYFKIYSKHTPINLVRDLPQGFSALEPLVDLPIGINITRFQTLLALHRSYLTPGDSSSGWTAGAAAYYVGYLQPRTFLLKYNENGTITDAVDCALDPLSETKCTLKSFTVEKGIYQTSNFRVQPTESIVRFPNITNLCPFGEVFNATRFASVYAWNRKRISNCVADYSVLYNSASFSTFKCYGVSPTKLNDLCFTNVYADSFVIRGDEVRQIAPGQTGKIADYNYKLPDDFTGCVIAWNSNNLDSKVGGNYNYLYRLFRKSNLKPFERDISTEIYQAGSTPCNGVEGFNCYFPLQSYGFQPTNGVGYQPYRVVVLSFELLHAPATVCGPKKSTNLVKNKCVNFNFNGLTGTGVLTESNKKFLPFQQFGRDIADTTDAVRDPQTLEILDITPCSFGGVSVITPGTNTSNQVAVLYQGVNCTEVPVAIHADQLTPTWRVYSTGSNVFQTRAGCLIGAEHVNNSYECDIPIGAGICASYQTQTNSPRRARSVASQSIIAYTMSLGAENSVAYSNNSIAIPTNFTISVTTEILPVSMTKTSVDCTMYICGDSTECSNLLLQYGSFCTQLNRALTGIAVEQDKNTQEVFAQVKQIYKTPPIKDFGGFNFSQILPDPSKPSKRSFIEDLLFNKVTLADAGFIKQYGDCLGDIAARDLICVQKFNGLTVLPPLLTDEMIAQYTSALLAGTITSGWWFGAGAALQIPFAMQMAYRFNGIGVTQNVLYENQKLIANQFNSAIGKIQDSLSSTASALGKLQDVVNQNAQALNTLVKQLSSNFGAISSVLNDILSRLDPPEAEVQIDRLITGRLQSLQTYVTQQLIRAAEIRWSANLAATKMSECVLGQSKRVDFCGKGYHLMSFPQSAPHGVVFLHVTYVPAQEKNFTTAPAICHDGKAHFPREGVFVSNGTHWFVTQRNFYEPQIITTDNTFVSGNCDVVIGIVNNTVYDPLQPELDSFKEELDKYFKNHTSPDVDLGDISGINASVVNIQKEIDRLNEVAKNLNESLIDLQELGKYEQYIKGGSGYIPEAPRDGQAYVRKDGEWVLLSTFL

SEQ ID NO: 5798 - protein, 1241 aa, Artificial Sequence
  SARS-CoV-2/Finland/FIN03032020A/2020__EPI_ISL_413602 spike protein (1-1211)(K986P_V987P_T887W_A1020W) Foldon construct
MFVFLVLLPLVSSQCVNLTTRTQLPPAYTNSFTRGVYYPDKVFRSSVLHSTQDLFLPFFSNVTWFHAIHVSGTNGTKRFDNPVLPFNDGVYFASTEKSNIIRGWIFGTTLDSKTQSLLIVNNATNVVIKVCEFQFCNDPFLGVYYHKNNKSWMESEFRVYSSANNCTFEYVSQPFLMDLEGKQGNFKNLREFVFKNIDGYFKIYSKHTPINLVRDLPQGFSALEPLVDLPIGINITRFQTLLALHRSYLTPGDSSSGWTAGAAAYYVGYLQPRTFLLKYNENGTITDAVDCALDPLSETKCTLKSFTVEKGIYQTSNFRVQPTESIVRFPNITNLCPFGEVFNATRFASVYAWNRKRISNCVADYSVLYNSASFSTFKCYGVSPTKLNDLCFTNVYADSFVIRGDEVRQIAPGQTGKIADYNYKLPDDFTGCVISWNSNNLDSKVGGNYNYLYRLFRKSNLKPFERDISTEIYQAGSTPCNGVEGFNCYFPLQSYGFQPTNGVGYQPYRVVVLSFELLHAPATVCGPKKSTNLVKNKCVNFNFNGLTGTGVLTESNKKFLPFQQFGRDIADTTDAVRDPQTLEILDITPCSFGGVSVITPGTNTSNQVAVLYQGVNCTEVPVAIHADQLTPTWRVYSTGSNVFQTRAGCLIGAEHVNNSYECDIPIGAGICASYQTQTNSPRRARSVASQSIIAYTMSLGAENSVAYSNNSIAIPTNFTISVTTEILPVSMTKTSVDCTMYICGDSTECSNLLLQYGSFCTQLNRALTGIAVEQDKNTQEVFAQVKQIYKTPPIKDFGGFNFSQILPDPSKPSKRSFIEDLLFNKVTLADAGFIKQYGDCLGDIAARDLICAQKFNGLTVLPPLLTDEMIAQYTSALLAGTITSGWWFGAGAALQIPFAMQMAYRFNGIGVTQNVLYENQKLIANQFNSAIGKIQDSLSSTASALGKLQDVVNQNAQALNTLVKQLSSNFGAISSVLNDILSRLDPPEAEVQIDRLITGRLQSLQTYVTQQLIRAAEIRWSANLAATKMSECVLGQSKRVDFCGKGYHLMSFPQSAPHGVVFLHVTYVPAQEKNFTTAPAICHDGKAHFPREGVFVSNGTHWFVTQRNFYEPQIITTDNTFVSGNCDVVIGIVNNTVYDPLQPELDSFKEELDKYFKNHTSPDVDLGDISGINASVVNIQKEIDRLNEVAKNLNESLIDLQELGKYEQYIKGGSGYIPEAPRDGQAYVRKDGEWVLLSTFL

SEQ ID NO: 5799 - protein, 1241 aa, Artificial Sequence
  SARS-CoV-2/France/GE1977/2020__EPI_ISL_414632 spike protein (1-1211)(K986P_V987P_T887W_A1020W) Foldon construct
MFVFLVLLPLVSSQCVNLTTRTQLPPAYTNSFTRGVYYPDKVFRSSVLHSTQDLFLPFFSNVTWFHAIHVSGTNGTKRFDNPVLPFNDGVYFASTEKSNIIRGWIFGTTLDSKTQSLLIVNNATNVVIKVCEFQFCNDPFLGVYYHKNNKSWMESEFRVYSSANNCTFEYVSQPFLMDLEGKQGNFKNLREFVFKNIDGYFKIYSKHTPINLVRDLPQGFSALEPLVDLPIGINITRFQTLLALHRSYLTPGDSSSGWTAGAAAYYVGYLQPRTFLLKYNENGTITDAVDCALDPLSETKCTLKSFTVEKGIYQTSNFRVQPTESIVRFPNITNLCPFGEVFNATRFASVYAWNRKRISNCVADYSVLYNSASFSTFKCYGVSPTKLNDLCFTNVYADSFVIRGDEVRQIAPGQTGKIADYNYKLPDDFTGCVIAWNSNNLDSKVGGNYNYLYRLFRKSNLKPFERDISTEIYQAGSTPCNGVEGFNCYFPLQSYGFQPTNGVGYQPYRVVVLSFELLHAPATVCGPKKSTNLVKNKCVNFNFNGLTGTGVLTESNKKFLPFQQFGRDIADTTDAVRDPQTLEILDITPCSFGGVSVITPGTNTSNQVAVLYQGVNCTEVPVAIHADQLTPTWRVYSTGSNVFQTRAGCLIGAEHVNNSYECDIPIGAGICASYQTQTNSPRRARSVASQSIIAYTMSLGAENSVAYSNNSIAIPTNFTISVTTEILPVSMTKTSVDCTMYICGDSTECSNLLLQYGSFCTQLNRALTGIAVEQDKNTQEVFAQVKQIYKTPPIKDFGGFNFSQILPDPSKPSKRSFIEDLLFNKVTLADAGFIKQYGDCLGDIAARDLICAQKFNGLTVLPPLLTDEMIAQYTSALLAGTITSGWWFGAGAALQIPFAMQMAYRFNGIGVTQNVLYENQKLIANQFNSAIGKIQDSLFSTASALGKLQDVVNQNAQALNTLVKQLSSNFGAISSVLNDILSRLDPPEAEVQIDRLITGRLQSLQTYVTQQLIRAAEIRWSANLAATKMSECVLGQSKRVDFCGKGYHLMSFPQSAPHGVVFLHVTYVPAQEKNFTTAPAICHDGKAHFPREGVFVSNGTHWFVTQRNFYEPQIITTDNTFVSGNCDVVIGIVNNTVYDPLQPELDSFKEELDKYFKNHTSPDVDLGDISGINASVVNIQKEIDRLNEVAKNLNESLIDLQELGKYEQYIKGGSGYIPEAPRDGQAYVRKDGEWVLLSTFL

SEQ ID NO: 5800 - protein, 1241 aa, Artificial Sequence
  SARS-CoV-2/Finland/FIN-313/2020__EPI_ISL_414641 spike protein (1-1211)(K986P_V987P_T887W_A1020W) Foldon construct
MFVFLVLLPLVSSQCVNLTTRTQLPPAYTNSFTRGVYYPDKVFRSSVLHSTQDLFLPFFSNVTWFHAIHVSGTNGTKRFDNPVLPFNDGVYFASTEKSNIIRGWIFGTTLDSKTQSLLIVNNATNVVIKVCEFQFCNDPFLGVYYHKNNKSWMESEFRVYSSANNCTFEYVSQPFLMDLEGKQGNFKNLREFVFKNIDGYFKIYSKHTPINLVRDLPQGFSALEPLVDLPIGINITRFKTLLALHRSYLTPGDSSSGWTAGAAAYYVGYLQPRTFLLKYNENGTITDAVDCALDPLSETKCTLKSFTVEKGIYQTSNFRVQPTESIVRFPNITNLCPFGEVFNATRFASVYAWNRKRISNCVADYSVLYNSASFSTFKCYGVSPTKLNDLCFTNVYADSFVIRGDEVRQIAPGQTGKIADYNYKLPDDFTGCVIAWNSNNLDSKVGGNYNYLYRLFRKSNLKPFERDISTEIYQAGSTPCNGVEGFNCYFPLQSYGFQPTNGVGYQPYRVVVLSFELLHAPATVCGPKKSTNLVKNKCVNFNFNGLTGTGVLTESNKKFLPFQQFGRDIADTTDAVRDPQTLEILDITPCSFGGVSVITPGTNTSNQVAVLYQGVNCTEVPVAIHADQLTPTWRVYSTGSNVFQTRAGCLIGAEHVNNSYECDIPIGAGICASYQTQTNSPRRARSVASQSIIAYTMSLGAENSVAYSNNSIAIPTNFTISVTTEILPVSMTKTSVDCTMYICGDSTECSNLLLQYGSFCTQLNRALTGIAVEQDKNTQEVFAQVKQIYKTPPIKDFGGFNFSQILPDPSKPSKRSFIEDLLFNKVTLADAGFIKQYGDCLGDIAARDLICAQKFNGLTVLPPLLTDEMIAQYTSALLAGTITSGWWFGAGAALQIPFAMQMAYRFNGIGVTQNVLYENQKLIANQFNSAIGKIQDSLSSTASALGKLQDVVNQNAQALNTLVKQLSSNFGAISSVLNDILSRLDPPEAEVQIDRLITGRLQSLQTYVTQQLIRAAEIRWSANLAATKMSECVLGQSKRVDFCGKGYHLMSFPQSAPHGVVFLHVTYVPAQEKNFTTAPAICHDGKAHFPREGVFVSNGTHWFVTQRNFYEPQIITTDNTFVSGNCDVVIGIVNNTVYDPLQPELDSFKEELDKYFKNHTSPDVDLGDISGINASVVNIQKEIDRLNEVAKNLNESLIDLQELGKYEQYIKGGSGYIPEAPRDGQAYVRKDGEWVLLSTFL

SEQ ID NO: 5801 - protein, 1241 aa, Artificial Sequence
  SARS-CoV-2/Netherlands/ZuidHolland_2/2020__EPI_ISL_414556 spike protein (1-1211)(K986P_V987P_T887W_A1020W) Foldon construct
MFVFLVLLPLVSSQCVNLTTRTQLPPAYTNSFTRGVYYPDKVFRSSVLHSTQDLFLPFFSNVTWFHAIHVSGTNGTKRFDNPVLPFNDGVYFASTEKSNIIRGWIFGTTLDSKTQSLLIVNNATNVVIKVCEFQFCNDPFLGVYYHKNNKSWMESEFRVYSSANNCTFEYVSQPFLMDLEGKQGNFKNLREFVFKNIDGYFKIYSKHTPINLVRDLPQGFSALEPLVDLPIGINITRFQTLLALHRSYLTPGDSSSGWTAGAAAYYVGYLQPRTFLLKYNENGTITDAVDCALDPLSETKCTLKSFTVEKGIYQTSNFRVQPTESIVRFPNITNLCPFGEVFNATRFASVYAWNRKRISNCVADYSVLYNSASFSTFKCYGVSPTKLNDLCFTNVYADSFVIRGDEVRQIAPGQTGKIADYNYKLPDDFTGCVIAWNSNNLDSKVGGNYNYLYRLFRKSNLKPFERDISTEIYQAGSTPCNGVEGFNCYFPLQSYGFQPTNGVGYQPYRVVVLSFELLHAPATVCGPKKSTNLVKNKCVNFNFNGLTGTGVLTESNKKFLPFQQFGRDIADTTDAVRDPQTLEILDITPCSFGGVSVITPGTNTSNQVAVLYQGVNCTEVPVAIHADQLTPTWRVYSTGSNVFQTRAGCLIGAEHVNNSYECDIPIGAGICASYQTQTNSPRRARSVASQSIIAYTMSLGAENSVAYSNNSIAIPTNFTISVTTEILPVSMTKTSVDCTMYICGDSTECSNLLLQYGSFCTQLNRALTGIALEQDKNTQEVFAQVKQIYKTPPIKDFGGFNFSQILPDPSKPSKRSFIEDLLFNKVTLADAGFIKQYGDCLGDIAARDLICAQKFNGLTVLPPLLTDEMIAQYTSALLAGTITSGWWFGAGAALQIPFAMQMAYRFNGIGVTQNVLYENQKLIANQFNSAIGKIQDSLSSTASALGKLQDVVNQNAQALNTLVKQLSSNFGAISSVLNDILSRLDPPEAEVQIDRLITGRLQSLQTYVTQQLIRAAEIRWSANLAATKMSECVLGQSKRVDFCGKGYHLMSFPQSAPHGVVFLHVTYVPAQEKNFTTAPAICHDGKAHFPREGVFVSNGTHWFVTQRNFYEPQIITTDNTFVSGNCDVVIGIVNNTVYDPLQPELDSFKEELDKYFKNHTSPDVDLGDISGINASVVNIQKEIDRLNEVAKNLNESLIDLQELGKYEQYIKGGSGYIPEAPRDGQAYVRKDGEWVLLSTFL

SEQ ID NO: 5802 - protein, 1241 aa, Artificial Sequence
  SARS-CoV-2/USA/WA-UW31/2020__EPI_ISL_414618 spike protein (1-1211)(K986P_V987P_T887W_A1020W) Foldon construct
MFVFLVLLPLVSSQCVNLTTRTQLPPAYTNSFTRGVYYPDKVFRSSVLHSTQDLFLPFFSNVTWFHAIHVSGTNGTKRFDNPVLPFNDGVYFASTEKSNIIRGWIFGTTLDSKTQSLLIVNNATNVVIKVCEFQFCNDPFLGVYYHKNNKSWMESEFRVYSSANNCTFEYVSQPFLMDLEGKQGNFKNLREFVFKNIDGYFKIYSKHTPINLVRDLPQGFSALEPLVDLPIGINITRFQTLLALHRSYLTPGDSSSGWTAGAAAYYVGYLQPRTFLLKYNENGTITDAVDCALDPLSETKCTLKSFTVEKGIYQTSNFRVQPTESIVRFPNITNLCPFGEVFNATRFASVYAWNRKRISNCVADYSVLYNSASFSTFKCYGVSPTKLNDLCFTNVYADSFVIRGDEVRQIAPGQTGKIADYNYKLPDDFTGCVIAWNSNNLDSKVGGNYNYLYRLFRKSNLKPFERDISTEIYQAGSTPCNGAEGFNCYFPLQSYGFQPTNGVGYQPYRVVVLSFELLHAPATVCGPKKSTNLVKNKCVNFNFNGLTGTGVLTESNKKFLPFQQFGRDIADTTDAVRDPQTLEILDITPCSFGGVSVITPGTNTSNQVAVLYQDVNCTEVPVAIHADQLTPTWRVYSTGSNVFQTRAGCLIGAEHVNNSYECDIPIGAGICASYQTQTNSPRRARSVASQSIIAYTMSLGAENSVAYSNNSIAIPTNFTISVTTEILPVSMTKTSVDCTMYICGDSTECSNLLLQYGSFCTQLNRALTGIAVEQDKNTQEVFAQVKQIYKTPPIKDFGGFNFSQILPDPSKPSKRSFIEDLLFNKVTLADAGFIKQYGDCLGDIAARDLICAQKFNGLTVLPPLLTDEMIAQYTSALLAGTITSGWWFGAGAALQIPFAMQMAYRFNGIGVTQNVLYENQKLIANQFNSAIGKIQDSLSSTASALGKLQDVVNQNAQALNTLVKQLSSNFGAISSVLNDILSRLDPPEAEVQIDRLITGRLQSLQTYVTQQLIRAAEIRWSANLAATKMSECVLGQSKRVDFCGKGYHLMSFPQSAPHGVVFLHVTYVPAQEKNFTTAPAICHDGKAHFPREGVFVSNGTHWFVTQRNFYEPQIITTDNTFVSGNCDVVIGIVNNTVYDPLQPELDSFKEELDKYFKNHTSPDVDLGDISGINASVVNIQKEIDRLNEVAKNLNESLIDLQELGKYEQYIKGGSGYIPEAPRDGQAYVRKDGEWVLLSTFL

SEQ ID NO: 5803 - protein, 1241 aa, Artificial Sequence
  SARS-CoV-2/South Korea/SNU01/2020__EPI_ISL_411929 spike protein (1-1211)(K986P_V987P_T887W_A1020W) Foldon construct
MFVFLVLLPLVSSQCVNLTTRTQLPPAYTNSFTRGVYYPDKVFRSSVLHSTQDLFLPFFSNVTWFHAIHVSGTNGTKRFDNPVLPFNDGVYFASTEKSNIIRGWIFGTTLDSKTQSLLIVNNATNVVIKVCEFQFCNDPFLGVYYHKNNKSWMESEFRVYSSANNCTFEYVSQPFLMDLEGKQGNFKNLREFVFKNIDGYFKIYSKHTPINLVRDLPQGFWALEPLVDLPIGINITRFQTLLALHRSYLTPGDSSSGWTAGAAAYYVGYLQPRTFLLKYNENGTITDAVDCALDPLSETKCTLKSFTVEKGIYQTSNFRVQPTESIVRFPNITNLCPFGEVFNATRFASVYAWNRKRISNCVADYSVLYNSASFSTFKCYGVSPTKLNDLCFTNVYADSFVIRGDEVRQIAPGQTGKIADYNYKLPDDFTGCVIAWNSNNLDSKVGGNYNYLYRLFRKSNLKPFERDISTEIYQAGSTPCNGVEGFNCYFPLQSYGFQPTNGVGYQPYRVVVLSFELLHAPATVCGPKKSTNLVKNKCVNFNFNGLTGTGVLTESNKKFLPFQQFGRDIADTTDAVRDPQTLEILDITPCSFGGVSVITPGTNTSNQVAVLYQDVNCTEVPVAIHADQLTPTWRVYSTGSNVFQTRAGCLIGAEHVNNSYECDIPIGAGICASYQTQTNSPRRARSVASQSIIAYTMSLGAENSVAYSNNSIAIPTNFTISVTTEILPVSMTKTSVDCTMYICGDSTECSNLLLQYGSFCTQLNRALTGIAVEQDKNTQEVFAQVKQIYKTPPIKDFGGFNFSQILPDPSKPSKRSFIEDLLFNKVTLADAGFIKQYGDCLGDIAARDLICAQKFNGLTVLPPLLTDEMIAQYTSALLAGTITSGWWFGAGAALQIPFAMQMAYRFNGIGVTQNVLYENQKLIANQFNSAIGKIQDSLSSTASALGKLQDVVNQNAQALNTLVKQLSSNFGAISSVLNDILSRLDPPEAEVQIDRLITGRLQSLQTYVTQQLIRAAEIRWSANLAATKMSECVLGQSKRVDFCGKGYHLMSFPQSAPHGVVFLHVTYVPAQEKNFTTAPAICHDGKAHFPREGVFVSNGTHWFVTQRNFYEPQIITTDNTFVSGNCDVVIGIVNNTVYDPLQPELDSFKEELDKYFKNHTSPDVDLGDISGINASVVNIQKEIDRLNEVAKNLNESLIDLQELGKYEQYIKGGSGYIPEAPRDGQAYVRKDGEWVLLSTFL

SEQ ID NO: 5804 - protein, 1241 aa, Artificial Sequence
  SARS-CoV-2/China/WF0004/2020__EPI_ISL_413694 spike protein (1-1211)(K986P_V987P_T887W_A1020W) Foldon construct
MFVFLVLLPLVSSQCVNLTTRTQLPPAYTNSFTRGVYYPDKVFRSSVLHSTQDLFLPFFSNVTWFHAIHVSGTNGTKRFDNPVLPFNDGVYFASTEKSNIIRGWIFGTTLDSKTQSLLIVNNATNVVIKVCEFQFCNDPFLGVYYHKNNKSWTESEFRVYSSANNCTFEYVSQPFLMDLEGKQGNFKNLREFVFKNIDGYFKIYSKHTPINLVRDLPQGFSALEPLVDLPIGINITRFQTLLALHRSYLTPGDSSSGWTAGAAAYYVGYLQPRTFLLKYNENGTITDAVDCALDPLSETKCTLKSFTVEKGIYQTSNFRVQPTESIVRFPNITNLCPFGEVFNATRFASVYAWNRKRISNCVADYSVLYNSASFSTFKCYGVSPTKLNDLCFTNVYADSFVIRGDEVRQIAPGQTGKIADYNYKLPDDFTGCVIAWNSNNLDSKVGGNYNYLYRLFRKSNLKPFERDISTEIYQAGSTPCNGVEGFNCYFPLQSYGFQPTNGVGYQPYRVVVLSFELLHAPATVCGPKKSTNLVKNKCVNFNFNGLTGTGVLTESNKKFLPFQQFGRDIADTTDAVRDPQTLEILDITPCSFGGVSVITPGTNTSNQVAVLYQDVNCTEVPVAIHADQLTPTWRVYSTGSNVFQTRAGCLIGAEHVNNSYECDIPIGAGICASYQTQTNSPRRARSVASQSIIAYTMSLGAENSVAYSNNSIAIPTNFTISVTTEILPVSMTKTSVDCTMYICGDSTECSNLLLQYGSFCTQLNRALTGIAVEQDKNTQEVFAQVKQIYKTPPIKDFGGFNFSQILPDPSKPSKRSFIEDLLFNKVTLADAGFIKQYGDCLGDIAARDLICAQKFNGLTVLPPLLTDEMIAQYTSALLAGTITSGWWFGAGAALQIPFAMQMAYRFNGIGVTQNVLYENQKLIANQFNSAIGKIQDSLSSTASALGKLQDVVNQNAQALNTLVKQLSSNFGAISSVLNDILSRLDPPEAEVQIDRLITGRLQSLQTYVTQQLIRAAEIRWSANLAATKMSECVLGQSKRFDFCGKGYHLMSFPQSAPHGVVFLHVTYVPAQEKNFTTAPAICHDGKAHFPREGVFVSNGTHWFVTQRNFYEPQIITTDNTFVSGNCDVVIGIVNNTVYDPLQPELDSFKEELDKYFKNHTSPDVDLGDISGINASVVNIQKEIDRLNEVAKNLNESLIDLQELGKYEQYIKGGSGYIPEAPRDGQAYVRKDGEWVLLSTFL

SEQ ID NO: 5805 - protein, 1241 aa, Artificial Sequence
  SARS-CoV-2/China/WF0028/2020__EPI_ISL_413791 spike protein (1-1211)(K986P_V987P_T887W_A1020W) Foldon construct
MFVFLVLLPLVSSQCVNLTTRTQLPPAYTNSFTRGVYYPDKVFRSSVLHSTQDLFLPFFSNVTWFHAIHVSGTNGTKRFDNPVLPFNDGVYFASTEKSNIIRGWIFGTTLDSKTQSLLIVNNATNVVIKVCEFQFCNDPFLGVYYHKNNKSWMESEFRVYSSANNCTFEYVSQPFLMDLEGKQGNFKNLREFVFKNIDGYFKIYSKHTPINLVRDLPQGFSALEPLVDLPIGINITRFQTLLALHRSYLTPGDSSSGWTAGAAAYYVGYLQPRTFLLKYNENGTITDAVDCALDPLSETKCTLKSFTVEKGIYQTSNFRVQPTESIVRFPNITNLCPFGEVFNATRFASVYAWNRKRISNCVADYSVLYNSASFSTFKCYGVSPTKLNDLCFTNVYADSFVIRGDEVRQIAPGQTGKIADYNYKLPDDFTGCVIAWNSNNLDSKVGGNYNYLYRLFRKSNLKPFERDISTEIYQAGSTPCNGVEGFNCYFPLQSYGFQPTNGVGYQPYRVVVLSFELLHAPATVCGPKKSTNLVKNKCVNFNFNGLTGTGVLTESNKKFLPFQQFGRDIADTTDAVRDPQTLEILDITPCSFGGVSVITPGTNTSNQVAVLYQDVNCTEVPVAIHADQLTPTWRVYSTGSNVFQTRAGCLIGAEHVNNSYECDIPIGAGICASYQTQTNSPRRARSVASQSIIAYTMSLGAENSVAYSNNSIAIPTNFTISVTTEILPVSMTKTSVDCTMYICGDSTECSNLLLQYGSFCTQLNRALTGIAVEQDKNTQEVFAQVKQIYKTPPIKDFGGFNFSQILPDPSKPSKRSFIEDLLFNKVTLADAGFIKQYGDCLGDIAARDLICAQKFNGLTVLPPLLTDEMIAQYTSALLAGTITSGWWFGAGAALQIPFAMQMAYRFNGIGVTQNVLYENQKLIANQFNSAIGKIQDSLSSTASALGKLQDVVNQNAQALNTLVKQLSSNFGAISSVLNDILSRLDPPEAEVQIDRLITGRLQSLQTYVTQQLIRAAEIRWSANLAATKMSECVLGQSKRVDFCGKGYHLMSFPQSAPHGVVFLHVTYVPAQEKNFTTAPAICHDGKAHFPREGVFVSNGTHWFVTQRNFYEPQIITTDNTFVSGNCDVVIGIVNNTVYDPLQPELESFKEELDKYFKNHTSPDVDLGDISGINASVVNIQKEIDRLNEVAKNLNESLIDLQELGKYEQYIKGGSGYIPEAPRDGQAYVRKDGEWVLLSTFL

SEQ ID NO: 5806 - protein, 1241 aa, Artificial Sequence
  SARS-CoV-2/2019-nCoV/USA-CruiseA-18/2020__MT159716.1 spike protein (1-1211)(K986P_V987P_T887W_A1020W) Foldon construct
MFVFLVLLPLVSSQCVNLTTRTQLPPAYTNSFTRGVYYPDKVFRSSVLHSTQDLFLPFFSNVTWFHAIHVSGTNGTKRFDNPVLPFNDGVYFASTEKSNIIRGWIFGTTLDSKTQSLLIVNNATNVVIKVCEFQFCNDPFLGVYYHKNNKSWMESELRVYSSANNCTFEYVSQPFLMDLEGKQGNFKNLREFVFKNIDGYFKIYSKHTPINLVRDLPQGFSALEPLVDLPIGINITRFQTLLALHRSYLTPGDSSSGWTAGAAAYYVGYLQPRTFLLKYNENGTITDAVDCALDPLSETKCTLKSFTVEKGIYQTSNFRVQPTESIVRFPNITNLCPFGEVFNATRFASVYAWNRKRISNCVADYSVLYNSASFSTFKCYGVSPTKLNDLCFTNVYADSFVIRGDEVRQIAPGQTGKIADYNYKLPDDFTGCVIAWNSNNLDSKVGGNYNYLYRLFRKSNLKPFERDISTEIYQAGSTPCNGVEGFNCYFPLQSYGFQPTNGVGYQPYRVVVLSFELLHAPATVCGPKKSTNLVKNKCVNFNFNGLTGTGVLTESNKKFLPFQQFGRDIADTTDAVRDPQTLEILDITPCSFGGVSVITPGTNTSNQVAVLYQDVNCTEVPVAIHADQLTPTWRVYSTGSNVFQTRAGCLIGAEHVNNSYECDIPIGAGICASYQTQTNSPRRARSVASQSIIAYTMSLGAENSVAYSNNSIAIPTNFTISVTTEILPVSMTKTSVDCTMYICGDSTECSNLLLQYGSFCTQLNRALTGIAVEQDKNTQEVFAQVKQIYKTPPIKDFGGFNFSQILPDPSKPSKRSFIEDLLFNKVTLADAGFIKQYGDCLGDIAARDLICAQKFNGLTVLPPLLTDEMIAQYTSALLAGTITSGWWFGAGAALQIPFAMQMAYRFNGIGVTQNVLYENQKLIANQFNSAIGKIQDSLSSTASALGKLQDVVNQNAQALNTLVKQLSSNFGAISSVLNDILSRLDPPEAEVQIDRLITGRLQSLQTYVTQQLIRAAEIRWSANLAATKMSECVLGQSKRVDFCGKGYHLMSFPQSAPHGVVFLHVTYVPAQEKNFTTAPAICHDGKAHFPREGVFVSNGTHWFVTQRNFYEPQIITTDNTFVSGNCDVVIGIVNNTVYDPLQPELDSFKEELDKYFKNHTSPDVDLGDISGINASVVNIQKEIDRLNEVAKNLNESLIDLQELGKYEQYIKGGSGYIPEAPRDGQAYVRKDGEWVLLSTFL

SEQ ID NO: 5807 - protein, 1241 aa, Artificial Sequence
  SARS-CoV-2/SARS-CoV-2/Yunnan-01/human/2020/CHN__MT049951.1 spike protein (1-1211)(K986P_V987P_T887W_A1020W) Foldon construct
MFVFLVLLPLVSSQCVNLTTRTQLPPANTNSFTRGVYYPDKVFRSSVLHSTQDLFLPFFSNVTWFHAIHVSGTNGTKRFDNPVLPFNDGVYFASTEKSNIIRGWIFGTTLDSKTQSLLIVNNATNVVIKVCEFQFCNDPFLGVYYHKNNKSWMESEFRVYSSANNCTFEYVSQPFLMDLEGKQGNFKNLREFVFKNIDGYFKIYSKHTPINLVRDLPQGFSALEPLVDLPIGINITRFQTLLALHRSYLTPGDSSSGWTAGAAAYYVGYLQPRTFLLKYNENGTITDAVDCALDPLSETKCTLKSFTVEKGIYQTSNFRVQPTESIVRFPNITNLCPFGEVFNATRFASVYAWNRKRISNCVADYSVLYNSASFSTFKCYGVSPTKLNDLCFTNVYADSFVIRGDEVRQIAPGQTGKIADYNYKLPDDFTGCVIAWNSNNLDSKVGGNYNYLYRLFRKSNLKPFERDISTEIYQAGSTPCNGVEGFNCYFPLQSYGFQPTNGVGYQPYRVVVLSFELLHAPATVCGPKKSTNLVKNKCVNFNFNGLTGTGVLTESNKKFLPFQQFGRDIADTTDAVRDPQTLEILDITPCSFGGVSVITPGTNTSNQVAVLYQDVNCTEVPVAIHADQLTPTWRVYSTGSNVFQTRAGCLIGAEHVNNSYECDIPIGAGICASYQTQTNSPRRARSVASQSIIAYTMSLGAENSVAYSNNSIAIPTNFTISVTTEILPVSMTKTSVDCTMYICGDSTECSNLLLQYGSFCTQLNRALTGIAVEQDKNTQEVFAQVKQIYKTPPIKDFGGFNFSQILPDPSKPSKRSFIEDLLFNKVTLADAGFIKQYGDCLGDIAARDLICAQKFNGLTVLPPLLTDEMIAQYTSALLAGTITSGWWFGAGAALQIPFAMQMAYRFNGIGVTQNVLYENQKLIANQFNSAIGKIQDSLSSTASALGKLQDVVNQNAQALNTLVKQLSSNFGAISSVLNDILSRLDPPEAEVQIDRLITGRLQSLQTYVTQQLIRAAEIRWSANLAATKMSECVLGQSKRVDFCGKGYHLMSFPQSAPHGVVFLHVTYVPAQEKNFTTAPAICHDGKAHFPREGVFVSNGTHWFVTQRNFYEPQIITTDNTFVSGNCDVVIGIVNNTVYDPLQPELDSFKEELDKYFKNHTSPDVDLGDISGINASVVNIQKEIDRLNEVAKNLNESLIDLQELGKYEQYIKGGSGYIPEAPRDGQAYVRKDGEWVLLSTFL

SEQ ID NO: 5808 - protein, 1241 aa, Artificial Sequence
  SARS-CoV-2/USA/WA-UW292/2020__EPI_ISL_418077 spike protein (1-1211)(K986P_V987P_T887W_A1020W) Foldon construct
MFVFLVLLPLVSSQCVNLTTRTQLPPAYTNSFTRGVYYPDKVFRSSVLHSTQDLFLPFFSNVTWFHAIHVSGTNGTKRFDNPVLPFNDGVYFASTEKSNIIRGWIFGTTLDSKTQSLLIVNNATNVVIKVCEFQFCNDPFLGVYYHKNNKSWMESEFRVYSSANNCTFEYVSQPFLMDLEGKQGNFKNLREFVFKNIDGYFKIYSKHTPINLVRDLPQGFSALEPLVDLPIGINITRFQTLLALHRSYLTPGDSSSGWTAGAAAYYVGYLQPRTFLLKYNENGTITDAVDCALDPLSETKCTLKSFTVEKGIYQTSNFRVQPTESIVRFPNITNLCPFGEVFNATRFASVYAWNRKRISNCVADYSVLYNSASFSTFKCYGVSPTKLNDLCFTNVYADSFVIRGDEVRQIAPGQTGKIADYNYKLPDDFTGCVIAWNSNNLDSKVGGNYNYLYRLFRKSNLKPFERDISTEIYQASSTPCNGVEGFNCYFPLQSYGFQPTNGVGYQPYRVVVLSFELLHAPATVCGPKKSTNLVKNKCVNFNFNGLTGTGVLTESNKKFLPFQQFGRDIADTTDAVRDPQTLEILDITPCSFGGVSVITPGTNTSNQVAVLYQDVNCTEVPVAIHADQLTPTWRVYSTGSNVFQTRAGCLIGAEHVNNSYECDIPIGAGICASYQTQTNSPRRARSVASQSIIAYTMSLGAENSVAYSNNSIAIPTNFTISVTTEILPVSMTKTSVDCTMYICGDSTECSNLLLQYGSFCTQLNRALTGIAVEQDKNTQEVFAQVKQIYKTPPIKDFGGFNFSQILPDPSKPSKRSFIEDLLFNKVTLADAGFIKQYGDCLGDIAARDLICAQKFNGLTVLPPLLTDEMIAQYTSALLAGTITSGWWFGAGAALQIPFAMQMAYRFNGIGVTQNVLYENQKLIANQFNSAIGKIQDSLSSTASALGKLQDVVNQNAQALNTLVKQLSSNFGAISSVLNDILSRLDPPEAEVQIDRLITGRLQSLQTYVTQQLIRAAEIRWSANLAATKMSECVLGQSKRVDFCGKGYHLMSFPQSAPHGVVFLHVTYVPAQEKNFTTAPAICHDGKAHFPREGVFVSNGTHWFVTQRNFYEPQIITTDNTFVSGNCDVVIGIVNNTVYDPLQPELDSFKEELDKYFKNHTSPDVDLGDISGINASVVNIQKEIDRLNEVAKNLNESLIDLQELGKYEQYIKGGSGYIPEAPRDGQAYVRKDGEWVLLSTFL

SEQ ID NO: 5809 - protein, 1241 aa, Artificial Sequence
  SARS-CoV-2/Iceland/192/2020__EPI_ISL_417819 spike protein (1-1211)(K986P_V987P_T887W_A1020W) Foldon construct
MFVFFVLLPLVSSQCVNLTTRTQLPPAYTNSFTRGVYYPDKVFRSSVLHSTQDLFLPFFSNVTWFHAIHVSGTNGTKRFDNPVLPFNDGVYFASTEKSNIIRGWIFGTTLDSKTQSLLIVNNATNVVIKVCEFQFCNDPFLGVYYHKNNKSWMESEFRVYSSANNCTFEYVSQPFLMDLEGKQGNFKNLREFVFKNIDGYFKIYSKHTPINLVRDLPQGFSALEPLVDLPIGINITRFQTLLALHRSYLTPGDSSSGWTAGAAAYYVGYLQPRTFLLKYNENGTITDAVDCALDPLSETKCTLKSFTVEKGIYQTSNFRVQPTESIVRFPNITNLCPFGEVFNATRFASVYAWNRKRISNCVADYSVLYNSASFSTFKCYGVSPTKLNDLCFTNVYADSFVIRGDEVRQIAPGQTGKIADYNYKLPDDFTGCVIAWNSNNLDSKVGGNYNYLYRLFRKSNLKPFERDISTEIYQAGSTPCNGVEGFNCYFPLQSYGFQPTNGVGYQPYRVVVLSFELLHAPATVCGPKKSTNLVKNKCVNFNFNGLTGTGVLTESNKKFLPFQQFGRDIADTTDAVRDPQTLEILDITPCSFGGVSVITPGTNTSNQVAVLYQGVNCTEVPVAIHADQLTPTWRVYSTGSNVFQTRAGCLIGAEHVNNSYECDIPIGAGICASYQTQTNSPRRARSVASQSIIAYTMSLGAENSVAYSNNSIAIPTNFTISVTTEILPVSMTKTSVDCTMYICGDSTECSNLLLQYGSFCTQLNRALTGIAVEQDKNTQEVFAQVKQIYKTPPIKDFGGFNFSQILPDPSKPSKRSFIEDLLFNKVTLADAGFIKQYGDCLGDIAARDLICAQKFNGLTVLPPLLTDEMIAQYTSALLAGTITSGWWFGAGAALQIPFAMQMAYRFNGIGVTQNVLYENQKLIANQFNSAIGKIQDSLSSTASALGKLQDVVNQNAQALNTLVKQLSSNFGAISSVLNDILSRLDPPEAEVQIDRLITGRLQSLQTYVTQQLIRAAEIRWSANLAATKMSECVLGQSKRVDFCGKGYHLMSFPQSAPHGVVFLHVTYVPAQEKNFTTAPAICHDGKAHFPREGVFVSNGTHWFVTQRNFYEPQIITTDNTFVSGNCDVVIGIVNNTVYDPLQPELDSFKEELDKYFKNHTSPDVDLGDISGINASVVNIQKEIDRLNEVAKNLNESLIDLQELGKYEQYIKGGSGYIPEAPRDGQAYVRKDGEWVLLSTFL

SEQ ID NO: 5810 - protein, 1241 aa, Artificial Sequence
  SARS-CoV-2/Belgium/ULG-6939/2020__EPI_ISL_417020 spike protein (1-1211)(K986P_V987P_T887W_A1020W) Foldon construct
MFVFLVLLPLVSSQCVNLTTRTQLPPAYTNSFTRGVYYPDKVFRSSVLHSTQDLFLPFFSNVTWFHAIHVSGTNGTKRFDNPVLPFNDGVYFASTEKSNIIRGWIFGTTLDSKTQSLLIVNNATNVVIKVCEFQFCNDPFLGVYYHKNNKSWMESEFRVYSSANNCTFEYVSQPFLMDLEGKQGNFKNLREFVFKNIDGYFKIYSKHTPINLVRDLPQGFSALEPLVDLPIGINITRFQTLLALHRSYLTPGDSSSGWTAGAAAYYVGYLQPRTFLLKYNENGTITDAVDCALDPLSETKCTLKSFTVEKGIYQTSNFRVQPTESIVRFPNITNLCPFGEVFNATRFASVYAWNRKRISNCVADYSVLYNSASFSTFKCYGVSPTKLNDLCFTNVYADSFVIRGDEVRQIAPGQTGKIADYNYKLPDDFTGCVIAWNSNNLDSKVGGNYNYLYRLFRKSNLKPFERDISTEIYQAGSTPCNGVEGFNCYFPLQSYGFQPTNGVGYQPYRVVVLSFELLHAPATVCGPKKSTNLVKNKCVNFNFNGLTGTGVLTESNKKFLPFQQFGRDIADTTDAVRDPQTLEILDITPCSFGGVSVITPGTNTSNQVAVLYQGVNCTEVPVAIHADQLTPTWRVYSTGSNVFQTRAGCLIGAEHVNNSYECDIPIGAGICASYQTQTNSPRRARSVASQSIIAYTMSLGAENSVVYSNNSIAIPTNFTISVTTEILPVSMTKTSVDCTMYICGDSTECSNLLLQYGSFCTQLNRALTGIAVEQDKNTQEVFAQVKQIYKTPPIKDFGGFNFSQILPDPSKPSKRSFIEDLLFNKVTLADAGFIKQYGDCLGDIAARDLICAQKFNGLTVLPPLLTDEMIAQYTSALLAGTITSGWWFGAGAALQIPFAMQMAYRFNGIGVTQNVLYENQKLIANQFNSAIGKIQDSLSSTASALGKLQDVVNQNAQALNTLVKQLSSNFGAISSVLNDILSRLDPPEAEVQIDRLITGRLQSLQTYVTQQLIRAAEIRWSANLAATKMSECVLGQSKRVDFCGKGYHLMSFPQSAPHGVVFLHVTYVPAQEKNFTTAPAICHDGKAHFPREGVFVSNGTHWFVTQRNFYEPQIITTDNTFVSGNCDVVIGIVNNTVYDPLQPELDSFKEELDKYFKNHTSPDVDLGDISGINASVVNIQKEIDRLNEVAKNLNESLIDLQELGKYEQYIKGGSGYIPEAPRDGQAYVRKDGEWVLLSTFL

SEQ ID NO: 5811 - protein, 1241 aa, Artificial Sequence
  SARS-CoV-2/France/HF2496/2020__EPI_ISL_418231 spike protein (1-1211)(K986P_V987P_T887W_A1020W) Foldon construct
MFVFLVLLPLVSSQCVNLTTRTQLPPAYTNSFTRGVYYPDKVFRSSVLHSTQDLFLPFFSNVTWFHAIHVSGTNGTKRFDNPVLPFNDGVYFASTEKSNIIRGWIFGTTLDSKTQSLLIVNNATNVVIKVCEFQFCNDPFLGVYYHKNNKSWMESEFRVYSSANNCTFEYVSQPFLMDLEGKQGNFKNLREFVFKNIDGYFKIYSKHTPINLVRDLPQGFSALEPLVDLPIGINITRFQTLLALHRSYLTPGDSSSGWTAGAAAYYVGYLQPRTFLLKYNENGTITDAVDCALDPLSETKCTLKSFTVEKGIYQTSNFRVQPTESIVRFPNITNLCPFGEVFNATRFASVYAWNRKRISNCVADYSVLYNSASFSTFKCYGVSPTKLNDLCFTNVYADSFVIRGDEVRQIAPGQTGKIADYNYKLPDDFTGCVIAWNSNNLDSKVGGNYNYLYRLFRKSNLKPFERDISTEIYQAGSTPCNGVEGFNCYFPLQSYGFQPTNGVGYQPYRVVVLSFELLHAPATVCGPKKSTNLVKNKCVNFNFNGLTGTGVLTESNKKFLPFQQFGRDIADTTDAVRDPQTLEILDITPCSFGGVSVITPGTNTSNQVAVLYQGVNCTEVPVAIHADQLTPTWRVYSTGSNVFQTRAGCLIGAEHVNNSYECDIPIGAGICASYQTQTNSPRRARSVASQSIIAYTMSLGAENSVAYSNNSIAIPTNFTISVTTEILPVSMTKTSVDCTMYICGDSTECSNLLLQYGSFCTQLNRALTGIAVEQDKNTQEVFAQVKQIYKTPPIKDFGGFNFSQILPDPSKPSKRSFIEDLLFNKVTLADAGFIKQYGDCLGDIVARDLICAQKFNGLTVLPPLLTDEMIAQYTSALLAGTITSGWWFGAGAALQIPFAMQMAYRFNGIGVTQNVLYENQKLIANQFNSAIGKIQDSLSSTASALGKLQDVVNQNAQALNTLVKQLSSNFGAISSVLNDILSRLDPPEAEVQIDRLITGRLQSLQTYVTQQLIRAAEIRWSANLAATKMSECVLGQSKRVDFCGKGYHLMSFPQSAPHGVVFLHVTYVPAQEKNFTTAPAICHDGKAHFPREGVFVSNGTHWFVTQRNFYEPQIITTDNTFVSGNCDVVIGIVNNTVYDPLQPELDSFKEELDKYFKNHTSPDVDLGDISGINASVVNIQKEIDRLNEVAKNLNESLIDLQELGKYEQYIKGGSGYIPEAPRDGQAYVRKDGEWVLLSTFL

SEQ ID NO: 5812 - protein, 1241 aa, Artificial Sequence
  SARS-CoV-2/USA/WA-UW291/2020__EPI_ISL_418076 spike protein (1-1211)(K986P_V987P_T887W_A1020W) Foldon construct
MFVFLVLLPLVSSQCVNLTTRTQLPPAYTNSFTRGVYYPDKVFRSSVLHSTQDLFLPFFSNVTWFHAIHVSGTNGTKRFDNPVLPFNDGVYFASTEKSNIIRGWIFGTTLDSKTQSLLIVNNATNVVIKVCEFQFCNDPFLGVYYHKNNKSWMESEFRVYSSANNCTFEYVSQPFLMDLEGKQGNFKNLREFVFKNIDGYFKIYSKHTPINLVRDLPQGFSALEPLVDLPIGINITRFQTLLALHRSYLTPGDSSSGWTAGAAAYYVGYLQPRTFLLKYNENGTITDAVDCALDPLSETKCTLKSFTVEKGIYQTSNFRVQPTESIVRFPNITNLCPFGEVFNATRFASVYAWNRKRISNCVADYSVLYNSASFSTFKCYGVSPTKLNDLCFTNVYADSFVIRGDEVRQIAPGQTGKIADYNYKLPDDFTGCVIAWNSNNLDSKVGGNYNYLYRLFRKSNLKPFERDISTEIYQAGSTPCNGVEGFNCYFPLQSYGFQPTNGVGYQPYRVVVLSFELLHAPATVCGPKKSTNLVKNKCVNFNFNGLTGTGVLTESNKKFLPFQQFGRDIADTTDAVRDPQTLEILDITPCSFGGVSVITPGTNTSNQVAVLYQGVNCTEVPVAIHADQLTPTWRVYSTGSNVFQTRAGCLIGAEHVNNSYECDIPIGAGICASYQTQTNSPRRARSVASQSIIAYTMSLGAENSVAYSNNSIAIPTNFTISVTTEILPVSMTKTSVDCTMYICGDSTECSNLLLQYGSFCTQLNRALTGIAVEQDKNTQEVFAQVKQIYKTPPIKDFGGFNFSQILPDPSKPSKRSFIEDLLFNKVTLADAGFIKQYGDCLGDIAARDLICAQKFNGLTVLPPLLTDEMIAQYTSALLAGTITSGWWFGAGAALQIPFAMQMAYRFNGIGVTQNVLYENQKLIANQFNSAIGKIQYSLSSTASALGKLQDVVNQNAQALNTLVKQLSSNFGAISSVLNDILSRLDPPEAEVQIDRLITGRLQSLQTYVTQQLIRAAEIRWSANLAATKMSECVLGQSKRVDFCGKGYHLMSFPQSAPHGVVFLHVTYVPAQEKNFTTAPAICHDGKAHFPREGVFVSNGTHWFVTQRNFYEPQIITTDNTFVSGNCDVVIGIVNNTVYDPLQPELDSFKEELDKYFKNHTSPDVDLGDISGINASVVNIQKEIDRLNEVAKNLNESLIDLQELGKYEQYIKGGSGYIPEAPRDGQAYVRKDGEWVLLSTFL

SEQ ID NO: 5813 - protein, 1241 aa, Artificial Sequence; identical to SEQ ID NO: 5776
  SARS-CoV-2/Portugal/PT0034/2020__EPI_ISL_418019 spike protein (1-1211)(K986P_V987P_T887W_A1020W) Foldon construct

SEQ ID NO: 5814 - protein, 1241 aa, Artificial Sequence
  SARS-CoV-2/Iceland/202/2020__EPI_ISL_417750 spike protein (1-1211)(K986P_V987P_T887W_A1020W) Foldon construct
MFVFLVLLPLVSSQCVNLTTRTQLPPAYTNSFTRGVYYPDKVFRSSVLHSTQDLFLPFFSNVTWFHAIHVSGTNGTKRFDNPVLPFNDGVYFASTEKSNIIRGWIFGTTLDSKTQSLLIVNNATNVVIKVCEFQFCNDPFLGVYYHKNNKSWMESEFRVYSSANNCTFEYVSQPFLMDLEGKQGNFKNLREFVFKNIDGYFKIYSKHTPINLVRDLPQGFSALEPLVDLPIGINITRFQTLLALHRSYLTPGDSSSGWTAGAAAYYVGYLQPRTFLLKYNENGTITDAVDCALDPLSETKCTLKSFTVEKGIYQTSNFRVQPTESIVRFPNITNLCPFGEVFNATRFASVYAWNRKRISNCVADYSVLYNSASFSTFKCYGVSPTKLNDLCFTNVYADSFVIRGDEVRQIAPGQTGKIADYNYKLPDDFTGCVIAWNSNNLDSKVGGNYNYLYRLFRKSNLKPFERDISTEIYQAGSTPCNGVEGFNCYFPLQSYGFQPTNGVGYQPYRVVVLSFELLHAPATVCGPKKSTNLVKNKCVNFNFNGLTGTGVLTESNKKFLPFQQFGRDIADTTDAVRDPQTLEILDITPCSFGGVSVITPGTNTSNQVAVLYQDVNCTEVPVAIHADQLTPTWRVYSTGSNVFQTRAGCLIGAEHVNNSYECDIPIGAGICASYQTQTNSPRRARSVASQSIIAYTMSLGAENSVAYSNNSIAIPTNFTISVTTEILPVSMTKTSVDCTMYICGDSTECSNLLLQYGSFCTQLNRALTGIAVEQDKNTQEVFAQVKQIYKTPPIKDFGGFNFSQILPDPSKPSKRSFIEDLLFNKVTLADAGFIKQYGDCLGDIAARDLICAQKFNGLTVLPPLLTDEMIAQYTSALLAGTITSGWWFGAGAALQIPFAMQMAYRFNGIGVTQNVLYENQKLIANQFNSAIGKIQDSLSSTASALGKLQDVVNQNAQALNTLVKQLSSNFGAISSVLNDILSRLDPPEAEVQIDRLITGRLQSLQTYVTQQLIRAAEIRWSANLAATKMSECVLGQSKRVDFCGKGYHLMSFPQSAPHGVVFLHVTYVPAQEKNFTTAPAICHDGKAHFPREGVFVSNGTHWFVTQRNFYEPQIITTDNTFVSGNCDVVIGIVNNTVYDPLQPELDSFKEELDKYFKNHTSPDVDLGDIPGINASVVNIQKEIDRLNEVAKNLNESLIDLQELGKYEQYIKGGSGYIPEAPRDGQAYVRKDGEWVLLSTFL

SEQ ID NO: 5815 - protein, 1241 aa, Artificial Sequence
  SARS-CoV-2/USA/WA-UW261/2020__EPI_ISL_418046 spike protein (1-1211)(K986P_V987P_T887W_A1020W) Foldon construct
MFVFLVLLPLVSSQCVNLTTRTQLPPAYTNSFTRGVYYPDKVFRSSVLHSTQDLFLPFFSNVTWFHAIHVSGTNGTKRFDNPVLPFNDGVYFASTEKSNIIRGWIFGTTLDSKTQSLLIVNNATNVVIKVCEFQFCNDPFLGVYYHKNNKSWMESEFRVYSSANNCTFEYVSQPFLMDLEGKQGNFKNLREFVFKNIDGYFKIYSKHTPINLVRDLPQGFSALEPLVDLPIGINITRFQTLLALHRSYLTPGDSSSGWTAGAAAYYVGYLQPRTFLLKYNENGTITDAVDCALDPLSETKCTLKSFTVEKGIYQTSNFRVQPTESIVRFPNITNLCPFGEVFNATRFTSVYAWNRKRISNCVADYSVLYNSASFSTFKCYGVSPTKLNDLCFTNVYADSFVIRGDEVRQIAPGQTGKIADYNYKLPDDFTGCVIAWNSNNLDSKVGGNYNYLYRLFRKSNLKPFERDISTEIYQAGSTPCNGVEGFNCYFPLQSYGFQPTNGVGYQPYRVVVLSFELLHAPATVCGPKKSTNLVKNKCVNFNFNGLTGTGVLTESNKKFLPFQQFGRDIADTTDAVRDPQTLEILDITPCSFGGVSVITPGTNTSNQVAVLYQDVNCTEVPVAIHADQLTPTWRVYSTGSNVFQTRAGCLIGAEHVNNSYECDIPIGAGICASYQTQTNSPRRARSVASQSIIAYTMSLGAENSVAYSNNSIAIPTNFTISVTTEILPVSMTKTSVDCTMYICGDSTECSNLLLQYGSFCTQLNRALTGIAVEQDKNTQEVFAQVKQIYKTPPIKDFGGFNFSQILPDPSKPSKRSFIEDLLFNKVTLADAGFIKQYGDCLGDIAARDLICAQKFNGLTVLPPLLTDEMIAQYTSALLAGTITSGWWFGAGAALQIPFAMQMAYRFNGIGVTQNVLYENQKLIANQFNSAIGKIQDSLSSTASALGKLQDVVNQNAQALNTLVKQLSSNFGAISSVLNDILSRLDPPEAEVQIDRLITGRLQSLQTYVTQQLIRAAEIRWSANLAATKMSECVLGQSKRVDFCGKGYHLMSFPQSAPHGVVFLHVTYVPAQEKNFTTAPAICHDGKAHFPREGVFVSNGTHWFVTQRNFYEPQIITTDNTFVSGNCDVVIGIVNNTVYDPLQPELDSFKEELDKYFKNHTSPDVDLGDISGINASVVNIQKEIDRLNEVAKNLNESLIDLQELGKYEQYIKGGSGYIPEAPRDGQAYVRKDGEWVLLSTFL

SEQ ID NO: 5816 - protein, 1241 aa, Artificial Sequence
  SARS-CoV-2/Portugal/PT0035/2020__EPI_ISL_418020 spike protein (1-1211)(K986P_V987P_T887W_A1020W) Foldon construct
MFVFLVLLPLVSSQCVNLTTRTQLPPAYTNSFTRGVYYPDKVFRSSVLHSTQDLFLPFFSNVTWFHAIHVSGTNGTKRFDNPVLPFNDGVYFASTEKSNIIRGWIFGTTLDSKTQSLLIVNNATNVVIKVCEFQFCNDPFLGVYYHKNNKSWMESEFRVYSSANNCTFEYVSQPFLMDLEGKQGNFKNLREFVFKNIDGYFKIYSKHTPINLVRDLPQGFSALEPLVDLPIGINITRFQTLLALHRSYLTPGDSSSGWTAGAAAYYVGYLQPRTFLLKYNENGTITDAVDCALDPLSETKCTLKSFTVEKGIYQTSNFRVQPTESIVRFPNITNLCPFGEVFNATRFASVYAWNRKRISNCVADYSVLYNSASFSTFKCYGVSPTKLNDLCFTNVYADSFVIRGDEVRQIAPGQTGKIADYNYKLPDDFTGCVIAWNSNNLDSKVGGNYNYLYRLFRKSNLKPFERDISTEIYQAGSTPCNGVEGFNCYFPLQSYGFQPTNGVGYQPYRVVVLSFELLHAPATVCGPKKSTNLVKNKCVNFNFNGLTGTGVLTESNKKFLPFQQFGRDIADTTDAVRDPQTLEILDITPCSFGGVSVITPGTNTSNQVAVLYQDVNCTEVPVAIHADQLTPTWRVYSTGSNVFQTRAGCLIGAEHVNNSYECDIPIGAGICASYQTQTNSPRRARSVASQSIIAYTMSLGAENSVAYSNNSIAIPTNFTISVTTEILPVSMTKTSVDCTMYICGDSTECSNLLLQYGSFCTQLNRALTGIAVEQDKNTQEVFAQVKQIYKTPPIKDFGGFNFSQILPDPSKPSKRSFIEDLLFNKVTLADAGFIKQYGDCLGDISARDLICAQKFNGLTVLPPLLTDEMIAQYTSALLAGTITSGWWFGAGAALQIPFAMQMAYRFNGIGVTQNVLYENQKLIANQFNSAIGKIQDSLSSTASALGKLQDVVNQNAQALNTLVKQLSSNFGAISSVLNDILSRLDPPEAEVQIDRLITGRLQSLQTYVTQQLIRAAEIRWSANLAATKMSECVLGQSKRVDFCGKGYHLMSFPQSAPHGVVFLHVTYVPAQEKNFTTAPAICHDGKAHFPREGVFVSNGTHWFVTQRNFYEPQIITTDNTFVSGNCDVVIGIVNNTVYDPLQPELDSFKEELDKYFKNHTSPDVDLGDISGINASVVNIQKEIDRLNEVAKNLNESLIDLQELGKYEQYIKGGSGYIPEAPRDGQAYVRKDGEWVLLSTFL

SEQ ID NO: 5817 - protein, 1241 aa, Artificial Sequence
  SARS-CoV-2/USA/NY-NYUMC7/2020__EPI_ISL_418192 spike protein (1-1211)(K986P_V987P_T887W_A1020W) Foldon construct
MFVFLVLLPLVSSQCVNLTTRTQLPPAYTNSFTRGVYYPDKVFRSSVLHSTQDLFLPFFSNVTWFHAIHVSGTNGTKRFDNPVLPFNDGVYFASTEKSNIIRGWIFGTTLDSKTQSLLIVNNATNVVIKVCEFQFCNDPFLGVYHHKNNKSWMESEFRVYSSANNCTFEYVSQPFLMDLEGKQGNFKNLREFVFKNIDGYFKIYSKHTPINLVRDLPQGFSALEPLVDLPIGINITRFQTLLALHRSYLTPGDSSSGWTAGAAAYYVGYLQPRTFLLKYNENGTITDAVDCALDPLSETKCTLKSFTVEKGIYQTSNFRVQPTESIVRFPNITNLCPFGEVFNATRFASVYAWNRKRISNCVADYSVLYNSASFSTFKCYGVSPTKLNDLCFTNVYADSFVIRGDEVRQIAPGQTGKIADYNYKLPDDFTGCVIAWNSNNLDSKVGGNYNYLYRLFRKSNLKPFERDISTEIYQAGSTPCNGVEGFNCYFPLQSYGFQPTNGVGYQPYRVVVLSFELLHAPATVCGPKKSTNLVKNKCVNFNFNGLTGTGVLTESNKKFLPFQQFGRDIADTTDAVRDPQTLEILDITPCSFGGVSVITPGTNTSNQVAVLYQGVNCTEVPVAIHADQLTPTWRVYSTGSNVFQTRAGCLIGAEHVNNSYECDIPIGAGICASYQTQTNSPRRARSVASQSIIAYTMSLGAENSVAYSNNSIAIPTNFTISVTTEILPVSMTKTSVDCTMYICGDSTECSNLLLQYGSFCTQLNRALTGIAVEQDKNTQEVFAQVKQIYKTPPIKDFGGFNFSQILPDPSKPSKRSFIEDLLFNKVTLADAGFIKQYGDCLGDIAARDLICAQKFNGLTVLPPLLTDEMIAQYTSALLAGTITSGWWFGAGAALQIPFAMQMAYRFNGIGVTQNVLYENQKLIANQFNSAIGKIQDSLSSTASALGKLQDVVNQNAQALNTLVKQLSSNFGAISSVLNDILSRLDPPEAEVQIDRLITGRLQSLQTYVTQQLIRAAEIRWSANLAATKMSECVLGQSKRVDFCGKGYHLMSFPQSAPHGVVFLHVTYVPAQEKNFTTAPAICHDGKAHFPREGVFVSNGTHWFVTQRNFYEPQIITTDNTFVSGNCDVVIGIVNNTVYDPLQPELDSFKEELDKYFKNHTSPDVDLGDISGINASVVNIQKEIDRLNEVAKNLNESLIDLQELGKYEQYIKGGSGYIPEAPRDGQAYVRKDGEWVLLSTFL

SEQ ID NO: 5818 - protein, 1241 aa, Artificial Sequence
  SARS-CoV-2/Iceland/189/2020__EPI_ISL_417709 spike protein (1-1211)(K986P_V987P_T887W_A1020W) Foldon construct
MFVFLVLLPLVSSQCVNLTTRTQLPPAYTNSFTRGVYYPDKVFRSSVLHSTQDLFLPFFSNVTWFHAIHVSGTNGTKRFDNPVLPFNDGVYFASTEKSNIIRGWIFGTTLDSKTQSLLIVNNATNVVIKVCEFQFCNDPFLGVYYHKNNKSWMESEFRVYSSANNCTFEYVSQPFLMDLEGKQGNFKNLREFVFKNIDGYFKIYSKHTPINLVRDLPQGFSALEPLVDLPIGINITRFQTLLALHRSYLTPGDSSSGWTAGAAAYYVGYLQPRTFLLKYNENGTITDAVDCALDPLSETKCTLKSFTVEKGIYQTSNFRVQPTESIVRFPNITNLCPFGEVFNATRFASVYAWNRKRISNCVADYSVLYNSASFSTFKCYGVSPTKLNDLCFTNVYADSFVIRGDEVRQIAPGQTGKIADYNYKLPDDFTGCVIAWNSNNLDSKVGGNYNYLYRLFRKSNLKPFERDISTEIYQAGSTPCNGVEGFNCYFPLQSYGFQPTNGVGYQPYRVVVLSFELLHAPATVCGPKKSTNLVKNKCVNFNFNGLTGTGVLTESNKKFLPFQQFGRDIADTTDAVRDPQTLEILDITPCSFGGVSVITPGTNTSNQVAVLYQGVNCTEVPVAIHADQLTPTWRVYSTGSNVFQTRAGCLIGAEHVNNSYECDIPIGAGICASYQTQTNSPRRARSVASQSIIAYTMSLGAENSVAYSNNSIAIPTNFTISVTTEILPVSMTKTSVDCTMYICGDSTECSNLLLQYGSFCTQLNRALTGIAVEQDKNTQEVFAQVKQIYKTPPIKDFGGFNFSQILPDPSKPSKRSFIEDLLFNKVTLADAGFTKQYGDCLGDIAARDLICAQKFNGLTVLPPLLTDEMIAQYTSALLAGTITSGWWFGAGAALQIPFAMQMAYRFNGIGVTQNVLYENQKLIANQFNSAIGKIQDSLSSTASALGKLQDVVNQNAQALNTLVKQLSSNFGAISSVLNDILSRLDPPEAEVQIDRLITGRLQSLQTYVTQQLIRAAEIRWSANLAATKMSECVLGQSKRVDFCGKGYHLMSFPQSAPHGVVFLHVTYVPAQEKNFTTAPAICHDGKAHFPREGVFVSNGTHWFVTQRNFYEPQIITTDNTFVSGNCDVVIGIVNNTVYDPLQPELDSFKEELDKYFKNHTSPDVDLGDISGINASVVNIQKEIDRLNEVAKNLNESLIDLQELGKYEQYIKGGSGYIPEAPRDGQAYVRKDGEWVLLSTFL

SEQ ID NO: 5819 - protein, 1241 aa, Artificial Sequence
  SARS-CoV-2/Australia/NSW56/2020__EPI_ISL_417408 spike protein (1-1211)(K986P_V987P_T887W_A1020W) Foldon construct
MFVFLVLLPLVSSQCVNLTTRTQLPPAYTNSFTRGVYYPDKVFRSSVLHSTQDLFLPFFSNVTWFHAIHVSGTNGTKRFDNPVLPFNDGVYFASTEKSNIIRGWIFGTTLDSKTQSLLIVNNATNVVIKVCEFQFCNDPFLGVYYHKNNKSWMESEFRVYSSANNCTFEYVSQPFLMDLEGKQGNFKNLREFVFKNIDGYFKIYSKHTPINLVRDLPQGFSALEPLVDLPIGINITRFQTLLALHRSYLTPGDSSSGWTAGAAAYYVGYLQPRTFLLKYNENGTITDAVDCALDPLSETKCTLKSFTVEKGIYQTSNFRVQPTESIVRFPNITNLCPFGEVFNATRFASVYAWNRKRISNCVADYSVLYNSASFSTFKCYGVSPTKLNDLCFTNVYADSFVIRGDEVRQIAPGQTGKIADYNYKLPDDFTGCVIAWNSNNLDSKVGGNYNYLYRLFRKSNLKPFERDISTEIYQAGSTPCNGVEGFNCYFPLQSYGFQPTNGVGYQPYRVVVLSFELLHAPATVCGPKKSTNLVKNKCVNFNFNGLTGTGVLTESNKKFLPFQQFGRDIADTTDAVRDPQTLEILDITPCSFGGVSVITPGTNTSNQVAVLYQDVNCTEVPVAIHADQLTPTWRVYSTGSNVFQTRAGCLIGAEHVNNSYECDIPIGAGICASYQTQTNSPRRARSVASQSIIAYTMSLGAENSVAYSNNSIAIPTNFTISVTTEILPVSMTKTSVDCTMYICGDSTECSNLLLQYGSFCTQLNRALTGIAVEQDKNTQEVFAQVKQIYKTPPIKDFGGFNFSQILPDSSKPSKRSFIEDLLFNKVTLADAGFIKQYGDCLGDIAARDLICAQKFNGLTVLPPLLTDEMIAQYTSALLAGTITSGWWFGAGAALQIPFAMQMAYRFNGIGVTQNVLYENQKLIANQFNSAIGKIQDSLSSTASALGKLQDVVNQNAQALNTLVKQLSSNFGAISSVLNDILSRLDPPEAEVQIDRLITGRLQSLQTYVTQQLIRAAEIRWSANLAATKMSECVLGQSKRVDFCGKGYHLMSFPQSAPHGVVFLHVTYVPAQEKNFTTAPAICHDGKAHFPREGVFVSNGTHWFVTQRNFYEPQIITTDNTFVSGNCDVVIGIVNNTVYDPLQPELDSFKEELDKYFKNHTSPDVDLGDISGINASVVNIQKEIDRLNEVAKNLNESLIDLQELGKYEQYIKGGSGYIPEAPRDGQAYVRKDGEWVLLSTFL

SEQ ID NO: 5820 - protein, 1241 aa, Artificial Sequence
  SARS-CoV-2/Iceland/280/2020__EPI_ISL_417608 spike protein (1-1211)(K986P_V987P_T887W_A1020W) Foldon construct
MFVFLVLLPLVSSQCVNLTTRTQLPPAYTNSFTRGVYYPDKVFRSSVLHSTQDLFLPFFSNVTWFHAIHVSGTNGTKRFDNPVLPFNDGVYFASTEKSNIIRGWIFGTTLDSKTQSLLIVNNATNVVIKVCEFQFCNDPFLGVYYHKNNKSWMESEFRVYSSANNCTFEYVSQPFLMDLEGKQGNFKNLREFVFKNIDGYFKIYSKHTPINLVRDLPQGFSALEPLVDLPIGINITRFQTLLALHRSYLTPGDSSSGWTAGAAAYYVGYLQPRTFLLKYNENGTITDAVDCALDPLSETKCTLKSFTVEKGIYQTSNFRVQPTESIVRFPNITNLCPFGEVFNATRFASVYAWNRKRISNCVADYSVLYNSASFSTFKCYGVSPTKLNDLCFTNVYADSFVIRGDEVRQIAPGQTGKIADYNYKLPDDFTGCVIAWNSNNLDSKVGGNYNYLYRLFRKSNLKPFERDISTEIYQAGSTPCNGVEGFNCYFPLQSYGFQPTNGVGYQPYRVVVLSFELLHAPATVCGPKKSTNLVKNKCVNFNFNGLTGTGVLTESNKKFLPFQQFGRDIADTTDAVRDPQTLEILDITPCSFGGVSVITPGTNTSNQVAVLYQGVNCTEVPVAIHADQLTPTWRVYSTGSNVFQTRAGCLIGAEHVNNSYECDIPIGAGICASYHTQTNSPRRARSVASQSIIAYTMSLGAENSVAYSNNSIAIPTNFTISVTTEILPVSMTKTSVDCTMYICGDSTECSNLLLQYGSFCTQLNRALTGIAVEQDKNTQEVFAQVKQIYKTPPIKDFGGFNFSQILPDPSKPSKRSFIEDLLFNKVTLADAGFIKQYGDCLGDIAARDLICAQKFNGLTVLPPLLTDEMIAQYTSALLAGTITSGWWFGAGAALQIPFAMQMAYRFNGIGVTQNVLYENQKLIANQFNSAIGKIQDSLSSTASALGKLQDVVNQNAQALNTLVKQLSSNFGAISSVLNDILSRLDPPEAEVQIDRLITGRLQSLQTYVTQQLIRAAEIRWSANLAATKMSECVLGQSKRVDFCGKGYHLMSFPQSAPHGVVFLHVTYVPAQEKNFTTAPAICHDGKAHFPREGVFVSNGTHWFVTQRNFYEPQIITTDNTFVSGNCDVVIGIVNNTVYDPLQPELDSFKEELDKYFKNHTSPDVDLGDISGINASVVNIQKEIDRLNEVAKNLNESLIDLQELGKYEQYIKGGSGYIPEAPRDGQAYVRKDGEWVLLSTFL

SEQ ID NO: 5821 - protein, 1241 aa, Artificial Sequence; identical to SEQ ID NO: 5776
  SARS-CoV-2/Iceland/247/2020__EPI_ISL_417575 spike protein (1-1211)(K986P_V987P_T887W_A1020W) Foldon construct

SEQ ID NO: 5822 - protein, 1241 aa, Artificial Sequence
  SARS-CoV-2/Iceland/238/2020__EPI_ISL_417566 spike protein (1-1211)(K986P_V987P_T887W_A1020W) Foldon construct
MFVFLVLLPLVSSQCVNLTTRTQLPPAYTNSFTRGVYYPDKVFRSSVLHSTQDLFLPFFSNVTWFHAIHVSGTNGTKRFDNPVLPFNDGVYFASTEKSNIIRGWIFGTTLDSKTQSLLIVNNATNVVIKVCEFQFCNDPFLGVYYHKNNKSWMESEFRVYSSANNCTFEYVSQPFLMDLEGKQGNFKNLREFVFKNIDGYFKIYSKHTPINLVRDLPQGFSALEPLVDLPIGINITRFQTLLALHRSYLTPGDSSSGWTAGAAAYYVGYLQPRTFLLKYNENGTITDAVDCALDPLSETKCTLKSFTVEKGIYQTSNFRVQPTESIVRFPNITNLCPFGEVFNATRFASVYAWNRKRISNCVADYSVLYNSASFSTFKCYGVSPTKLNDLCFTNVYADSFVIRGDEVRQIAPGQTGKIADYNYKLPDDFTGCVIAWNSNNLDSKVGGNYNYLYRLFRKSNLKPFERDISTEIYQAGSTPCNGVEGFNCYFPLQSYGFQPTNGVGYQPYRVVVLSFELLHAPATVCGPKKSTNLVKNKCVNFNFNGLTGTGVLTESNKKFLPFQQFGRDIADTTDAVRDPQTLEILDITPCSFGGVSVITPGTNTSNQVAVLYQGVNCTEVPVAIHADQLTPTWRVYSTGSNVFQTRAGCLIGAEHVNNSYECDIPIGAGICASYQTQTNSPRRARSVASQSIIAYTMSLGAENSVAYSNNSIAIPTNFTISVTTEILPVSMTKTSVDCTMYICGDSTECSNLLLQYGSFCTQLNRALTGIAVEQDKNTQEVFAQVKQIYKTPPIKDFGGFNFSQILPDPSKPSKRSFIEDLLFNKVTLADVGFIKQYGDCLGDIAARDLICAQKFNGLTVLPPLLTDEMIAQYTSALLAGTITSGWWFGAGAALQIPFAMQMAYRFNGIGVTQNVLYENQKLIANQFNSAIGKIQDSLSSTASALGKLQDVVNQNAQALNTLVKQLSSNFGAISSVLNDILSRLDPPEAEVQIDRLITGRLQSLQTYVTQQLIRAAEIRWSANLAATKMSECVLGQSKRVDFCGKGYHLMSFPQSAPHGVVFLHVTYVPAQEKNFTTAPAICHDGKAHFPREGVFVSNGTHWFVTQRNFYEPQIITTDNTFVSGNCDVVIGIVNNTVYDPLQPELDSFKEELDKYFKNHTSPDVDLGDISGINASVVNIQKEIDRLNEVAKNLNESLIDLQELGKYEQYIKGGSGYIPEAPRDGQAYVRKDGEWVLLSTFL

SEQ ID NO: 5823 - protein, 1241 aa, Artificial Sequence
  SARS-CoV-2/Greece/16/2020__EPI_ISL_418265 spike protein (1-1211)(K986P_V987P_T887W_A1020W) Foldon construct
MFVFLVLLPLVSSQCVNLTTRTQLPPAYTNSFTRGVYYPDKVFRSSVLHSTQDLFLPFFSNVTWFHAIHVSGTNGTKRFDNPVLPFNDGVYFASTEKSNIIRGWIFGTTLDSKTQSLLIVNNATNVVIKVCEFQFCNDPFLGVYYHKNNKSWMESEFRVYSSANNCTFEYVSQPFLMDLEGKQGNFKNLREFVFKNVDGYFKIYSKHTPINLVRDLPQGFSALEPLVDLPIGINITRFQTLLALHRSYLTPGDSSSGWTAGAAAYYVGYLQPRTFLLKYNENGTITDAVDCALDPLSETKCTLKSFTVEKGIYQTSNFRVQPTESIVRFPNITNLCPFGEVFNATRFASVYAWNRKRISNCVADYSVLYNSASFSTFKCYGVSPTKLNDLCFTNVYADSFVIRGDEVRQIAPGQTGKIADYNYKLPDDFTGCVIAWNSNNLDSKVGGNYNYLYRLFRKSNLKPFERDISTEIYQAGSTPCNGVEGFNCYFPLQSYGFQPTNGVGYQPYRVVVLSFELLHAPATVCGPKKSTNLVKNKCVNFNFNGLTGTGVLTESNKKFLPFQQFGRDIADTTDAVRDPQTLEILDITPCSFGGVSVITPGTNTSNQVAVLYQDVNCTEVPVAIHADQLTPTWRVYSTGSNVFQTRAGCLIGAEHVNNSYECDIPIGAGICASYQTQTNSPRRARSVASQSIIAYTMSLGAENSVAYSNNSIAIPTNFTISVTTEILPVSMTKTSVDCTMYICGDSTECSNLLLQYGSFCTQLNRALTGIAVEQDKNTQEVFAQVKQIYKTPPIKDFGGFNFSQILPDPSKPSKRSFIEDLLFNKVTLADAGFIKQYGDCLGDIAARDLICAQKFNGLTVLPPLLTDEMIAQYTSALLAGTITSGWWFGAGAALQIPFAMQMAYRFNGIGVTQNVLYENQKLIANQFNSAIGKIQDSLSSTASALGKLQDVVNQNAQALNTLVKQLSSNFGAISSVLNDILSRLDPPEAEVQIDRLITGRLQSLQTYVTQQLIRAAEIRWSANLAATKMSECVLGQSKRVDFCGKGYHLMSFPQSAPHGVVFLHVTYVPAQEKNFTTAPAICHDGKAHFPREGVFVSNGTHWFVTQRNFYEPQIITTDNTFVSGNCDVVIGIVNNTVYDPLQPELDSFKEELDKYFKNHTSPDVDLGDISGINASVVNIQKEIDRLNEVAKNLNESLIDLQELGKYEQYIKGGSGYIPEAPRDGQAYVRKDGEWVLLSTFL

SEQ ID NO: 5824 - protein, 1241 aa, Artificial Sequence
  SARS-CoV-2/Iceland/319/2020__EPI_ISL_417648 spike protein (1-1211)(K986P_V987P_T887W_A1020W) Foldon construct
MFVFLVLLPLVSSQCVNLTTRTQLPPAYTNSFTRGVYYPDKVFRSSVLHSTQDLFLPFFSNVTWFHAIHVSGTNGTKRFDNPVLPFNDGVYFASTEKSNIIRGWIFGTTLDSKTQSLLIVNNATNVVIKVCEFQFCNDPFLGVYYHKNNKSWMESEFRVYSSANNCTFEYVSQPFLIDLEGKQGNFKNLREFVFKNIDGYFKIYSKHTPINLVRDLPQGFSALEPLVDLPIGINITRFQTLLALHRSYLTPGDSSSGWTAGAAAYYVGYLQPRTFLLKYNENGTITDAVDCALDPLSETKCTLKSFTVEKGIYQTSNFRVQPTESIVRFPNITNLCPFGEVFNATRFASVYAWNRKRISNCVADYSVLYNSASFSTFKCYGVSPTKLNDLCFTNVYADSFVIRGDEVRQIAPGQTGKIADYNYKLPDDFTGCVIAWNSNNLDSKVGGNYNYLYRLFRKSNLKPFERDISTEIYQAGSTPCNGVEGFNCYFPLQSYGFQPTNGVGYQPYRVVVLSFELLHAPATVCGPKKSTNLVKNKCVNFNFNGLTGTGVLTESNKKFLPFQQFGRDIADTTDAVRDPQTLEILDITPCSFGGVSVITPGTNTSNQVAVLYQGVNCTEVPVAIHADQLTPTWRVYSTGSNVFQTRAGCLIGAEHVNNSYECDIPIGAGICASYQTQTNSPRRARSVASQSIIAYTMSLGAENSVAYSNNSIAIPTNFTISVTTEILPVSMTKTSVDCTMYICGDSTECSNLLLQYGSFCTQLNRALTGIAVEQDKNTQEVFAQVKQIYKTPPIKDFGGFNFSQILPDPSKPSKRSFIEDLLFNKVTLADAGFIKQYGDCLGDIAARDLICAQKFNGLTVLPPLLTDEMIAQYTSALLAGTITSGWWFGAGAALQIPFAMQMAYRFNGIGVTQNVLYENQKLIANQFNSAIGKIQDSLSSTASALGKLQDVVNQNAQALNTLVKQLSSNFGAISSVLNDILSRLDPPEAEVQIDRLITGRLQSLQTYVTQQLIRAAEIRWSANLAATKMSECVLGQSKRVDFCGKGYHLMSFPQSAPHGVVFLHVTYVPAQEKNFTTAPAICHDGKAHFPREGVFVSNGTHWFVTQRNFYEPQIITTDNTFVSGNCDVVIGIVNNTVYDPLQPELDSFKEELDKYFKNHTSPDVDLGDISGINASVVNIQKEIDRLNEVAKNLNESLIDLQELGKYEQYIKGGSGYIPEAPRDGQAYVRKDGEWVLLSTFL

SEQ ID NO: 5825 - protein, 1241 aa, Artificial Sequence
  SARS-CoV-2/Congo/94/2020__EPI_ISL_417947 spike protein (1-1211)(K986P_V987P_T887W_A1020W) Foldon construct
MFVFLVLLPLVSSQCVNLTTRTQLPPAYTNSFTRGVYYPDKVFRSSVLHSTQDLFLPFFSNVTWFHAIHVSGTNGTKRFDNPVLPFNDGVYFASTEKSNIIRGWIFGTTLDSKTQSLLIVNNATNVVIKVCEFQFCNDPFLGVYYHKNNKSWMESEFRVYSSANNCTFEYVSQPFLMDLEGKQGNFKNLREFVFKNIDGYFKIYSKHTPINLVRDLPQGFSALEPLVDLPIGINITRFQTLLALHRSYLTPGDSSSGWTAGAAAYYVGYLQPRTFLLKYNENGTITDAVDCALDPLSETKCTLKSFTVEKGIYQTSNFRVQPTESIVRFPNITNLCPFGEVFNATRFASVYAWNRKRISNCVADYSVLYNSASFSTFKCYGVSPTKLNDLCFTNVYADSFVIRGDEVRQIAPGQTGKIADYNYKLPDDFTGCVIAWNSNNLDSKVGGNYNYLYRLFRKSNLKPFERDISTEIYQAGSTPCNGVEGFNCYFPLQSYGFQPTNGVGYQPYRVVVLSFELLHAPATVCGPKKSTNLVKNKCVNFNFNGLTGTGVLTESNKKFLPFQQFGRDIADTTDAVRDPQTLEILDITPCSFGGVSVITPGTNTSNQVAVLYQGVNCTEVPVAIHADQLTPTWRVYSTGSNVFQTRAGCLIGAEHVNNSYECDIPIGAGICASYQTQTNSPRRARSVASQSIIAYTMSLGAENSVAYSNNSIAIPTNFTISVTTEILPVSMTKTSVDCTMYICGDSTECSNLLLQYGSFCTQLNRALTGIAVEQDKNTQEVFAQVKQIYKTPPIKDFGGFNFSQILPDPSKPSKRSFIEDILFNKVTLADAGFIKQYGDCLGDIAARDLICAQKFNGLTVLPPLLTDEMIAQYTSALLAGTITSGWWFGAGAALQIPFAMQMAYRFNGIGVTQNVLYENQKLIANQFNSAIGKIQDSLSSTASALGKLQDVVNQNAQALNTLVKQLSSNFGAISSVLNDILSRLDPPEAEVQIDRLITGRLQSLQTYVTQQLIRAAEIRWSANLAATKMSECVLGQSKRVDFCGKGYHLMSFPQSAPHGVVFLHVTYVPAQEKNFTTAPAICHDGKAHFPREGVFVSNGTHWFVTQRNFYEPQIITTDNTFVSGNCDVVIGIVNNTVYDPLQPELDSFKEELDKYFKNHTSPDVDLGDISGINASVVNIQKEIDRLNEVAKNLNESLIDLQELGKYEQYIKGGSGYIPEAPRDGQAYVRKDGEWVLLSTFL

SEQ ID NO: 5826 - protein, 1241 aa, Artificial Sequence
  SARS-CoV-2/Congo/158/2020__EPI_ISL_417950 spike protein (1-1211)(K986P_V987P_T887W_A1020W) Foldon construct
MFVFLVLLPLVSSQCVNLTTRTQLPPAYTNSFTRGVYYPDKVFRSSVLHSTQDLFLPFFSNVTWFHAIHVSGTNGTKRFDNPVLPFNDGVYFASTEKSNIIRGWIFGTTLDSKTQSLLIVNNATNVVIKVCEFQFCNDPFLGVYYHKNNKSWMESEFRVYSSANNCTFEYVSQPFLMDLEGKQGNFKNLREFVFKNIDGYFKIYSKHTPINLVRDLPQGFSALEPLVDLPIGINITRFQTLLALHRSYLTPGDSSSGWTAGAAAYYVGYLQPRTFLLKYNENGTITDAVDCALDPLSETKCTLKSFTVEKGIYQTSNFRVQPTESIVRFPNITNLCPFGEVFNATRFASVYAWNRKRISNCVADYSVLYNSASFSTFKCYGVSPTKLNDLCFTNVYADSFVIRGDEVRQIAPGQTGKIADYNYKLPDDFTGCVIAWNSNNLDSKVGGNYNYLYRLFRKSNLKPFERDISTEIYQAGSTPCNGVEGFNCYFPLQSYGFQPTNGVGYQPYRVVVLSFELLHAPATVCGPKKSTNLVKNKCVNFNFNGLTGTGVLTESNKKFLPFQQFGRDIADTTDAVRDPQTLEILDITPCSFGGVSVITPGTNTSNQVAVLYQDVNCTEVPVAIHADQLTPTWRVYSTGSNVFQTRAGCLIGAEHVNNSYECDIPIGAGICASYQTQTNSPRRARSVASQSIIAYTMSLGAENSVAYSNNSIAIPTNFTISVTTEILPVSMTKTSVDCTMYICGDSTECSNLLLQYGSFCTQLNRALTGIAVEQDKNTQEVFAQVKQIYKTPPIKDFGGFNFSQILPDPSKPSKRSFIEDLLFNKVTLADAGFIKQYGDCLGDIAARDLICAQKFNGLTVLPPLLTDEMIAQYTSALLAGTITSGWWFGAGAALQIPFAMQMAYRFNGIGVTQNVLYENQKLIANQFNSAIGKIQDSLSSTASALGKLQDVVNQNAQALNTLVKQLSSNFGAISSVLNDILSRLDPPEAEVQIDRLITGRLQSLQTYVTQQLIRAAEIRWSANLAATKMSECVLGQSKRVDFCGKGYHLMSFPQSAPHGVVFLHVTYVPAQEKNFTTAPAICHDGKAHFPREGVFVSNGTHWFVTQRNFYEPQIITTDNTFLSGNCDVVIGIVNNTVYDPLQPELDSFKEELDKYFKNHTSPDVDLGDISGINASVVNIQKEIDRLNEVAKNLNESLIDLQELGKYEQYIKGGSGYIPEAPRDGQAYVRKDGEWVLLSTFL

SEQ ID NO: 5827 - protein, 1241 aa, Artificial Sequence
  SARS-CoV-2/USA/UT-00034/2020__EPI_ISL_417977 spike protein (1-1211)(K986P_V987P_T887W_A1020W) Foldon construct
MFVFLVLLPLVSSQCVNLTTRTQLPPAYTNSFTRGVYYPDKVFRSSVLHSTQDLFLPFFSNVTWFHAIHVSGTNGTKRFDNPVLPFNDGVYFASTEKSNIIRGWIFGTTLDSKTQSLLIVNNATNVVIKVCEFQFCNDPFLGVYYYKNNKSWMESEFRVYSSANNCTFEYVSQPFLMDLEGKQGNFKNLREFVFKNIDGYFKIYSKHTPINLVRDLPQGFSALEPLVDLPIGINITRFQTLLALHRSYLTPGDSSSGWTAGAAAYYVGYLQPRTFLLKYNENGTITDAVDCALDPLSETKCTLKSFTVEKGIYQTSNFRVQPTESIVRFPNITNLCPFGEVFNATRFASVYAWNRKRISNCVADYSVLYNSASFSTFKCYGVSPTKLNDLCFTNVYADSFVIRGDEVRQIAPGQTGKIADYNYKLPDDFTGCVIAWNSNNLDSKVGGNYNYLYRLFRKSNLKPFERDISTEIYQAGSTPCNGVEGFNCYFPLQSYGFQPTNGVGYQPYRVVVLSFELLHAPATVCGPKKSTNLVKNKCVNFNFNGLTGTGVLTESNKKFLPFQQFGRDIADTTDAVRDPQTLEILDITPCSFGGVSVITPGTNTSNQVAVLYQGVNCTEVPVAIHADQLTPTWRVYSTGSNVFQTRAGCLIGAEHVNNSYECDIPIGAGICASYQTQTNSPRRARSVASQSIIAYTMSLGAENSVAYSNNSIAIPTNFTISVTTEILPVSMTKTSVDCTMYICGDSTECSNLLLQYGSFCTQLNRALTGIAVEQDKNTQEVFAQVKQIYKTPPIKDFGGFNFSQILPDPSKPSKRSFIEDLLFNKVTLADAGFIKQYGDCLGDIAARDLICAQKFNGLTVLPPLLTDEMIAQYTSALLAGTITSGWWFGAGAALQIPFAMQMAYRFNGIGVTQNVLYENQKLIANQFNSAIGKIQDSLSSTASALGKLQDVVNQNAQALNTLVKQLSSNFGAISSVLNDILSRLDPPEAEVQIDRLITGRLQSLQTYVTQQLIRAAEIRWSANLAATKMSECVLGQSKRVDFCGKGYHLMSFPQSAPHGVVFLHVTYVPAQEKNFTTAPAICHDGKAHFPREGVFVSNGTHWFVTQRNFYEPQIITTDNTFVSGNCDVVIGIVNNTVYDPLQPELDSFKEELDKYFKNHTSPDVDLGDISGINASVVNIQKEIDRLNEVAKNLNESLIDLQELGKYEQYIKGGSGYIPEAPRDGQAYVRKDGEWVLLSTFL

SEQ ID NO: 5828 - protein, 1241 aa, Artificial Sequence
  SARS-CoV-2/USA/UT-00033/2020__EPI_ISL_417976 spike protein (1-1211)(K986P_V987P_T887W_A1020W) Foldon construct
MFVFLVLLPLVSSQCVNLTTRTQLPPAYTNSFTRGVYYPDKVFRSSVLHSTQDLFLPFFSNVTWFHAIHVSGTNGTKRFDNPVLPFNDGVYFASTEKSNIIRGWIFGTTLDSKTQSLLIVNNATNVVIKVCEFQFCNDPFLGVYYHKNNKSWMESEFRVYSSANNCTFEYVSQPFLMDLEGKQGNFKNLREFVFKNIDGYFKIYSKHTPINLVRDLPQGFSALEPLVDLPIGINITRFQTLLALHRSYLTPGDSSSGLTAGAAAYYVGYLQPRTFLLKYNENGTITDAVDCALDPLSETKCTLKSFTVEKGIYQTSNFRVQPTESIVRFPNITNLCPFGEVFNATRFASVYAWNRKRISNCVADYSVLYNSASFSTFKCYGVSPTKLNDLCFTNVYADSFVIRGDEVRQIAPGQTGKIADYNYKLPDDFTGCVIAWNSNNLDSKVGGNYNYLYRLFRKSNLKPFERDISTEIYQAGSTPCNGVEGFNCYFPLQSYGFQPTNGVGYQPYRVVVLSFELLHAPATVCGPKKSTNLVKNKCVNFNFNGLTGTGVLTESNKKFLPFQQFGRDIADTTDAVRDPQTLEILDITPCSFGGVSVITPGTNTSNQVAVLYQGVNCTEVPVAIHADQLTPTWRVYSTGSNVFQTRAGCLIGAEHVNNSYECDIPIGAGICASYQTQTNSPRRARSVASQSIIAYTMSLGAENSVAYSNNSIAIPTNFTISVTTEILPVSMTKTSVDCTMYICGDSTECSNLLLQYGSFCTQLNRALTGIAVEQDKNTQEVFAQVKQIYKTPPIKDFGGFNFSQILPDPSKPSKRSFIEDLLFNKVTLADAGFIKQYGDCLGDIAARDLICAQKFNGLTVLPPLLTDEMIAQYTSALLAGTITSGWWFGAGAALQIPFAMQMAYRFNGIGVTQNVLYENQKLIANQFNSAIGKIQDSLSSTASALGKLQDVVNQNAQALNTLVKQLSSNFGAISSVLNDILSRLDPPEAEVQIDRLITGRLQSLQTYVTQQLIRAAEIRWSANLAATKMSECVLGQSKRVDFCGKGYHLMSFPQSAPHGVVFLHVTYVPAQEKNFTTAPAICHDGKAHFPREGVFVSNGTHWFVTQRNFYEPQIITTDNTFVSGNCDVVIGIVNNTVYDPLQPELDSFKEELDKYFKNHTSPDVDLGDISGINASVVNIQKEIDRLNEVAKNLNESLIDLQELGKYEQYIKGGSGYIPEAPRDGQAYVRKDGEWVLLSTFL

SEQ ID NO: 5829 - protein, 1241 aa, Artificial Sequence
  SARS-CoV-2/USA/WI-13/2020__EPI_ISL_417516 spike protein (1-1211)(K986P_V987P_T887W_A1020W) Foldon construct
MFVFLVLLPLVSSQCVNLTTRTQLPPAYTNSFTRGVYYPDKVFRSSVLHSTQDLFLPFFSNVTWFHAIHVSGTNGTKRFDNPVLPFNDGVYFASTEKSNIIRGWIFGTTLDSKTQSLLIVNNATNVVIKVCEFQFCNDPFLGVYYHKNNKSWMESEFRVYSSANNCTFEYVSQPFLMDLEGKQGNFKNLREFVFKNIDGYFKIYSKHTPINLVRDLPQGFSALEPLVDLPIGINITRFQTLLALHRSYLTPGDSSSGWTAGAAAYYVGYLQPRTFLLKYNENGTITDAVDCALDPLSETKCTLKSFTVEKGIYQTSNFRVLPTESIVRFPNITNLCPFGEVFNATRFASVYAWNRKRISNCVADYSVLYNSASFSTFKCYGVSPTKLNDLCFTNVYADSFVIRGDEVRQIAPGQTGKIADYNYKLPDDFTGCVIAWNSNNLDSKVGGNYNYLYRLFRKSNLKPFERDISTEIYQAGSTPCNGVEGFNCYFPLQSYGFQPTNGVGYQPYRVVVLSFELLHAPATVCGPKKSTNLVKNKCVNFNFNGLTGTGVLTESNKKFLPFQQFGRDIADTTDAVRDPQTLEILDITPCSFGGVSVITPGTNTSNQVAVLYQGVNCTEVPVAIHADQLTPTWRVYSTGSNVFQTRAGCLIGAEHVNNSYECDIPIGAGICASYQTQTNSPRRARSVASQSIIAYTMSLGAENSVAYSNNSIAIPTNFTISVTTEILPVSMTKTSVDCTMYICGDSTECSNLLLQYGSFCTQLNRALTGIAVEQDKNTQEVFAQVKQIYKTPPIKDFGGFNFSQILPDPSKPSKRSFIEDLLFNKVTLADAGFIKQYGDCLGDIAARDLICAQKFNGLTVLPPLLTDEMIAQYTSALLAGTITSGWWFGAGAALQIPFAMQMAYRFNGIGVTQNVLYENQKLIANQFNSAIGKIQDSLSSTASALGKLQDVVNQNAQALNTLVKQLSSNFGAISSVLNDILSRLDPPEAEVQIDRLITGRLQSLQTYVTQQLIRAAEIRWSANLAATKMSECVLGQSKRVDFCGKGYHLMSFPQSAPHGVVFLHVTYVPAQEKNFTTAPAICHDGKAHFPREGVFVSNGTHWFVTQRNFYEPQIITTDNTFVSGNCDVVIGIVNNTVYDPLQPELDSFKEELDKYFKNHTSPDVDLGDISGINASVVNIQKEIDRLNEVAKNLNESLIDLQELGKYEQYIKGGSGYIPEAPRDGQAYVRKDGEWVLLSTFL

SEQ ID NO: 5830 - protein, 1240 aa, Artificial Sequence
  SARS-CoV-2/India/1-27/2020__EPI_ISL_413522 spike protein (1-1210)(K985P_V986P_T886W_A1019W) Foldon construct
MFVFLVLLPLVSSQCVNLTTRTQLPPAYTNSFTRGVYYPDKVFRSSVLHSTQDLFLPFFSNVTWFHAIHVSGTNGTKRFDNPVLPFNDGVYFASTEKSNIIRGWIFGTTLDSKTQSLLIVNNATNVVIKVCEFQFCNDPFLGVYHKNNKSWMESEFRVYSSANNCTFEYVSQPFLMDLEGKQGNFKNLREFVFKNIDGYFKIYSKHTPINLVRDLPQGFSALEPLVDLPIGINITRFQTLLALHRSYLTPGDSSSGWTAGAAAYYVGYLQPRTFLLKYNENGTITDAVDCALDPLSETKCTLKSFTVEKGIYQTSNFRVQPTESIVRFPNITNLCPFGEVFNATRFASVYAWNRKRISNCVADYSVLYNSASFSTFKCYGVSPTKLNDLCFTNVYADSFVIRGDEVIQIAPGQTGKIADYNYKLPDDFTGCVIAWNSNNLDSKVGGNYNYLYRLFRKSNLKPFERDISTEIYQAGSTPCNGVEGFNCYFPLQSYGFQPTNGVGYQPYRVVVLSFELLHAPATVCGPKKSTNLVKNKCVNFNFNGLTGTGVLTESNKKFLPFQQFGRDIADTTDAVRDPQTLEILDITPCSFGGVSVITPGTNTSNQVAVLYQDVNCTEVPVAIHADQLTPTWRVYSTGSNVFQTRAGCLIGAEHVNNSYECDIPIGAGICASYQTQTNSPRRARSVASQSIIAYTMSLGAENSVAYSNNSIAIPTNFTISVTTEILPVSMTKTSVDCTMYICGDSTECSNLLLQYGSFCTQLNRALTGIAVEQDKNTQEVFAQVKQIYKTPPIKDFGGFNFSQILPDPSKPSKRSFIEDLLFNKVTLADAGFIKQYGDCLGDIAARDLICAQKFNGLTVLPPLLTDEMIAQYTSALLAGTITSGWWFGAGAALQIPFAMQMAYRFNGIGVTQNVLYENQKLIANQFNSAIGKIQDSLSSTASALGKLQDVVNQNAQALNTLVKQLSSNFGAISSVLNDILSRLDPPEAEVQIDRLITGRLQSLQTYVTQQLIRAAEIRWSANLAATKMSECVLGQSKRVDFCGKGYHLMSFPQSAPHGVVFLHVTYVPAQEKNFTTAPAICHDGKAHFPREGVFVSNGTHWFVTQRNFYEPQIITTDNTFVSGNCDVVIGIVNNTVYDPLQPELDSFKEELDKYFKNHTSPDVDLGDISGINASVVNIQKEIDRLNEVAKNLNESLIDLQELGKYEQYIKGGSGYIPEAPRDGQAYVRKDGEWVLLSTFL

SEQ ID NO: 5831 - protein, 1235 aa, Artificial Sequence
  SARS-CoV-2/pangolin/Guangxi/P4L/2017__EPI_ISL_410538 spike protein (1-1205)(K980P_V981P_T881W_A1014W) Foldon construct
MFVFLFVLPLVSSQCVNLTTRTGIPPGYTNSSTRGVYYPDKVFRSSILHLTQDLFLPFFSNVTWFNTINYQGGFKKFDNPVLPFNDGVYFASTEKSNIIRGWIFGTTLDARTQSLLIVNNATNVVIKVCEFQFCTDPFLGVYYHNNNKTWVENEFRVYSSANNCTFEYISQPFLMDLEGKQGNFKNLREFVFKNVDGYFKIYSKHTPIDLVRDLPRGFAALEPLVDLPIGINITRFQTLLALHRSYLTPGNLESGWTTGAAAYYVGYLQQRTFLLSYNQNGTITDAVDCSLDPLSETKCTLKSLTVEKGIYQTSNFRVQPTISIVRFPNITNLCPFGEVFNASKFASVYAWNRKRISNCVADYSVLYNSTSFSTFKCYGVSPTKLNDLCFTNVYADSFVVKGDEVRQIAPGQTGVIADYNYKLPDDFTGCVIAWNSVKQDALTGGNYGYLYRLFRKSKLKPFERDISTEIYQAGSTPCNGQVGLNCYYPLERYGFHPTTGVNYQPFRVVVLSFELLNGPATVCGPKLSTTLVKDKCVNFNFNGLTGTGVLTTSKKQFLPFQQFGRDISDTTDAVRDPQTLEILDITPCSFGGVSVITPGTNTSNQVAVLYQDVNCTEVPMAIHAEQLTPAWRVYSAGANVFQTRAGCLVGAEHVNNSYECDIPVGAGICASYHSMSSLRSVNQRSIIAYTMSLGAENSVAYSNNSIAIPTNFTISVTTEILPVSMTKTSVDCTMYICGDSIECSNLLLQYGSFCTQLNRALTGIAVEQDKNTQEVFAQVKQIYKTPPIKDFGGFNFSQILPDPSKPSKRSFIEDLLFNKVTLADAGFIKQYGDCLGDIAARDLICAQKFNGLTVLPPLLTDEMIAQYTSALLAGTITSGWWFGAGAALQIPFAMQMAYRFNGIGVTQNVLYENQKLIANQFNSAIGKIQDSLSSTASALGKLQDVVNQNAQALNTLVKQLSSNFGAISSVLNDILSRLDPPEAEVQIDRLITGRLQSLQTYVTQQLIRAAEIRWSANLAATKMSECVLGQSKRVDFCGKGYHLMSFPQSAPHGVVFLHVTYVPAQEKNFTTAPAICHEGKAHFPREGVFVSNGTHWFITQRNFYEPQIITTDNTFVSGSCDVVIGIVNNTVYDPLQPELDSFKEELDKYFKNHTSPDVDLGDISGINASVVNIQKEIDRLNEVAKNLNESPIDLQELGKYEQYIKGGSGYIPEAPRDGQAYVRKDGEWVLLSTFL

SEQ ID NO: 5832 - protein, 1235 aa, Artificial Sequence
  SARS-CoV-2/pangolin/Guangxi/P5L/2017__EPI_ISL_410540 spike protein (1-1205)(K980P_V981P_T881W_A1014W) Foldon construct
MFVFLFVLPLVSSQCVNLTTRTGIPPGYTNSSTRGVYYPDKVFRSSILHLTQDLFLPFFSNVTWFNTINYQGGFKKFDNPVLPFNDGVYFASTEKSNIIRGWIFGTTLDARTQSLLIVNNATNVVIKVCEFQFCTDPFLGVYYHNNNKTWVENEFRVYSSANNCTFEYISQPFLMDLEGKQGNFKNLREFVFKNVDGYFKIYSKHTPIDLVRDLPRGFAALEPLVDLPIGINITRFQTLLALHRSYLTPGKLESGWTTGAAAYYVGYLQQRTFLLSYNQNGTITDAVDCSLDPLSETKCTLKSLTVEKGIYQTSNFRVQPTISIVRFPNITNLCPFGEVFNASKFASVYAWNRKRISNCVADYSVLYNSTSFSTFKCYGVSPTKLNDLCFTNVYADSFVVKGDEVRQIAPGQTGVIADYNYKLPDDFTGCVIAWNSVKQDALTGGNYGYLYRLFRKSKLKPFERDISTEIYQAGSTPCNGQVGLNCYYPLERYGFHPTTGVNYQPFRVVVLSFELLNGPATVCGPKLSTTLVKDKCVNFNFNGLTGTGVLTTSKKQFLPFQQFGRDISDTTDAVRDPQTLEILDITPCSFGGVSVITPGTNTSNQVAVLYQDVNCTEVPMAIHAEQLTPAWRVYSAGANVFQTRAGCLVGAEHVNNSYECDIPVGAGICASYHSMSSFRSVNQRSIIAYTMSLGAENSVAYSNNSIAIPTNFTISVTTEILPVSMTKTSVDCTMYICGDSIECSNLLLQYGSFCTQLNRALTGIAVEQDKNTQEVFAQVKQIYKTPPIKDFGGFNFSQILPDPSKPSKRSFIEDLLFNKVTLADAGFIKQYGDCLGDIAARDLICAQKFNGLTVLPPLLTDEMIAQYTSALLAGTITSGWWFGAGAALQIPFAMQMAYRFNGIGVTQNVLYENQKLIANQFNSAIGKIQDSLSSTASALGKLQDVVNQNAQALNTLVKQLSSNFGAISSVLNDILSRLDPPEAEVQIDRLITGRLQSLQTYVTQQLIRAAEIRWSANLAATKMSECVLGQSKRVDFCGKGYHLMSFPQSAPHGVVFLHVTYVPAQEKNFTTAPAICHEGKAHFPREGVFVSNGTHWFITQRNFYEPQIITTDNTFVSGSCDVVIGIVNNTVYDPLQPELDSFKEELDKYFKNHTSPDVDLGDISGINASVVNIQKEIDRLNEVAKNLNESLIDLQELGKYEQYIKGGSGYIPEAPRDGQAYVRKDGEWVLLSTFL

SEQ ID NO: 5833 - protein, 1235 aa, Artificial Sequence
  SARS-CoV-2/pangolin/Guangxi/P5E/2017__EPI_ISL_410541 spike protein (1-1205)(K980P_V981P_T881W_A1014W) Foldon construct
MFVFLFVLPLVSSQCVNLTTRTGIPPGYTNSSTRGVYYPDKVFRSSILHLTQDLFLPFFSNVTWFNTITYQGGSKKFDNPVLPFNDGVYFASTEKSNIIRGWIFGTTLDARTQSLLIVNNATNVVIKVCEFQFCTDPFLGVYYHNNNKTWVENEFRVYSSANNCTFEYISQPFLMDLEGKQGNFKNLREFVFKNVDGYFKIYSKHTPIDLVRDLPRGFAALEPLVDLPIGINITRFQTLLALHRSYLTPGKLESGWTTGAAAYYVGYLQQRTFLLSYNQNGTITDAVDCSLDPLSETKCTLKSLTVEKGIYQTSNFRVQPTISIVRFPNITNLCPFGEVFNASKFASVYAWNRKRISNCVADYSVLYNSTSFSTFKCYGVSPTKLNDLCFTNVYADSFVVKGDEVRQIAPGQTGVIADYNYKLPDDFTGCVIAWNSVKQDALTGDNYGYLYRLFRKSKLKPFERDISTEIYQAGSTPCNGQVGLNCYYPLERYGFHPTTGVNYQPFRVVVLSFELLNGPATVCGPKLSTTLVKDKCVNFNFNGLTGTGVLTTSKKQFLPFQQFGRDISDTTDAVRDPQTLEILDITPCSFGGVSVITPGTNTSNQVAVLYQDVNCTEVPMAIHAEQLTPAWRVYSAGANVFQTRAGCLVGAEHVNNSYECDIPVGAGICASYHSMSSFRSVNQRSIIAYTMSLGAENSVAYSNNSIAIPTNFTISVTTEILPVSMTKTSVDCTMYICGDSIECSNLLLQYGSFCTQLNRALTGIAVEQDKNTQEVFAQVKQIYKTPPIKDFGGFNFSQILPDPSKPSKRSFIEDLLFNKVTLADAGFIKQYGDCLGDIAARDLICAQKFNGLTVLPPLLTDEMIAQYTSALLAGTITSGWWFGAGAALQIPFAMQMAYRFNGIGVTQNVLYENQKLIANQFNSAIGKIQDSLSSTASALGKLQDVVNQNAQALNTLVKQLSSNFGAISSVLNDILSRLDPPEAEVQIDRLITGRLQSLQTYVTQQLIRAAEIRWSANLAATKMSECVLGQSKRVDFCGKGYHLMSFPQSAPHGVVFLHVTYVPAQEKNFTTAPAICHEGKAHFPREGVFVSNGTHWFITQRNFYEPQIITTDNTFVSGSCDVVIGIVNNTVYDPLQPELDSFKEELDKYFKNHTSPDVDLGDISGINASVVNIQKEIDRLNEVAKNLNESLIDLQELGKYEQYIKGGSGYIPEAPRDGQAYVRKDGEWVLLSTFL

SEQ ID NO: 5834 - protein, 1233 aa, Artificial Sequence
  SARS-CoV-2/pangolin/Guangxi/P1E/2017__EPI_ISL_410539 spike protein (1-1203)(K978P_V979P_T879W_A1012W) Foldon construct
MFVFLFVLPLVSSQCVNLTTRTGIQPGYTNSSTRGVYYPDKVFRSSILHLTQDLFLPFFSNVTWFNTINYQGGFKKFDNPVLPFNDGVYFASTEKSNIIRGWIFGTTLDARTQSLLIVNNATNVVIKVCEFQFCTDPFLGVYYHNNNKTWVENEFRVYSSANNCTFEYISQPFLMDLEGKQGNFKNLREFVFKNVDGYFKIYSKHTPIDLVRDLPRGFAALEPLVDLPIGINITRFQTLLALHRSYLTPGKLESGWTTGAAAYYVGYLQQRTFLLSYNQNGTITDAVDCSLDPLSETKCTLKSLTVEKGIYQTSNFRVQPTISIVRFPNITNLCPFGEVFNASKFASVYAWNRKRISNCVADYSVLYNSTSFSTFKCYGVSPTKLNDLCFTNVYADSFVVKGDEVRQIAPGQTGVIADYNYKLPDDFTGCVIAWNSVKQDALTGGNYLYRLFRKSKLKPFERDISTEIYQAGSTPCNGQVGLNCYYPLERYGFHPTTGVNYQPFRVVVLSFELLNGPATVCGPKLSTTLVKDKCVNFNFNGLTGTGVLTTSKKQFLPFQQFGRDISDTTDAVRDPQTLEILDITPCSFGGVSVITPGTNTSNQVAVLYQDVNCTEVPMAIHAEQLTPAWRVYSAGANVFQTRAGCLVGAEHVNNSYECDIPVGAGICASYHSMSSLRSVNQRSIIAYTMSLGAENSVAYSNNSIAIPTNFTISVTTEILPVSMTKTSVDCTMYICGDSIECSNLLLQYGSFCTQLNRALTGIAVEQDKNTQEVFAQVKQIYKTPPIKDFGGFNFSQILPDPSKPSKRSFIEDLLFNKVTLADAGFIKQYGDCLGDIAARDLICAQKFNGLTVLPPLLTDEMIAQYTSALLAGTITSGWWFGAGAALQIPFAMQMAYRFNGIGVTQNVLYENQKLIANQFNSAIGKIQDSLSSTASALGKLQDVVNQNAQALNTLVKQLSSNFGAISSVLNDILSRLDPPEAEVQIDRLITGRLQSLQTYVTQQLIRAAEIRWSANLAATKMSECVLGQSKRVDFCGKGYHLMSFPQSAPHGVVFLHVTYVPAQEKNFTTAPAICHEGKAHFPREGVFVSNGTHWFITQRNFYEPQIITTDNTFVSGSCDVVIGIVNNTVYDPLQPELDSFKEELDKYFKNHTSPDVDLGDISGINASVVNIQKEIDRLNEVAKNLNESLIDLQELGKYEQYIKGGSGYIPEAPRDGQAYVRKDGEWVLLSTFL

SEQ ID NO: 5835 - protein, 1241 aa, Artificial Sequence
  SARS-CoV-2/Wuhan/WIV05/2019__EPI_ISL_402128 spike protein (1-1211)(K986P_V987P_P1069F) Foldon construct
MFVFLVLLPLVSSQCVNLTTRTQLPPAYTNSFTRGVYYPDKVFRSSVLHSTQDLFLPFFSNVTWFHAIHVSGTNGTKRFDNPVLPFNDGVYFASTEKSNIIRGWIFGTTLDSKTQSLLIVNNATNVVIKVCEFQFCNDPFLGVYYHKNNKSWMESEFRVYSSANNCTFEYVSQPFLMDLEGKQGNFKNLREFVFKNIDGYFKIYSKHTPINLVRDLPQGFSALEPLVDLPIGINITRFQTLLALHRSYLTPGDSSSGWTAGAAAYYVGYLQPRTFLLKYNENGTITDAVDCALDPLSETKCTLKSFTVEKGIYQTSNFRVQPTESIVRFPNITNLCPFGEVFNATRFASVYAWNRKRISNCVADYSVLYNSASFSTFKCYGVSPTKLNDLCFTNVYADSFVIRGDEVRQIAPGQTGKIADYNYKLPDDFTGCVIAWNSNNLDSKVGGNYNYLYRLFRKSNLKPFERDISTEIYQAGSTPCNGVEGFNCYFPLQSYGFQPTNGVGYQPYRVVVLSFELLHAPATVCGPKKSTNLVKNKCVNFNFNGLTGTGVLTESNKKFLPFQQFGRDIADTTDAVRDPQTLEILDITPCSFGGVSVITPGTNTSNQVAVLYQDVNCTEVPVAIHADQLTPTWRVYSTGSNVFQTRAGCLIGAEHVNNSYECDIPIGAGICASYQTQTNSPRRARSVASQSIIAYTMSLGAENSVAYSNNSIAIPTNFTISVTTEILPVSMTKTSVDCTMYICGDSTECSNLLLQYGSFCTQLNRALTGIAVEQDKNTQEVFAQVKQIYKTPPIKDFGGFNFSQILPDPSKPSKRSFIEDLLFNKVTLADAGFIKQYGDCLGDIAARDLICAQKFNGLTVLPPLLTDEMIAQYTSALLAGTITSGWTFGAGAALQIPFAMQMAYRFNGIGVTQNVLYENQKLIANQFNSAIGKIQDSLSSTASALGKLQDVVNQNAQALNTLVKQLSSNFGAISSVLNDILSRLDPPEAEVQIDRLITGRLQSLQTYVTQQLIRAAEIRASANLAATKMSECVLGQSKRVDFCGKGYHLMSFPQSAPHGVVFLHVTYVFAQEKNFTTAPAICHDGKAHFPREGVFVSNGTHWFVTQRNFYEPQIITTDNTFVSGNCDVVIGIVNNTVYDPLQPELDSFKEELDKYFKNHTSPDVDLGDISGINASVVNIQKEIDRLNEVAKNLNESLIDLQELGKYEQYIKGGSGYIPEAPRDGQAYVRKDGEWVLLSTFL

SEQ ID NO: 5836 - protein, 1237 aa, Artificial Sequence
  SARS-CoV-2/bat/Yunnan/RaTG13/2013__EPI_ISL_402131 spike protein (1-1207)(K982P_V983P_P1065F) Foldon construct
MFVFLVLLPLVSSQCVNLTTRTQLPPAYTNSSTRGVYYPDKVFRSSVLHLTQDLFLPFFSNVTWFHAIHVSGTNGIKRFDNPVLPFNDGVYFASTEKSNIIRGWIFGTTLDSKTQSLLIVNNATNVVIKVCEFQFCNDPFLGVYYHKNNKSWMESEFRVYSSANNCTFEYVSQPFLMDLEGKQGNFKNLREFVFKNIDGYFKIYSKHTPINLVRDLPPGFSALEPLVDLPIGINITRFQTLLALHRSYLTPGDSSSGWTAGAAAYYVGYLQPRTFLLKYNENGTITDAVDCALDPLSETKCTLKSFTVEKGIYQTSNFRVQPTDSIVRFPNITNLCPFGEVFNATTFASVYAWNRKRISNCVADYSVLYNSTSFSTFKCYGVSPTKLNDLCFTNVYADSFVITGDEVRQIAPGQTGKIADYNYKLPDDFTGCVIAWNSKHIDAKEGGNFNYLYRLFRKANLKPFERDISTEIYQAGSKPCNGQTGLNCYYPLYRYGFYPTDGVGHQPYRVVVLSFELLNAPATVCGPKKSTNLVKNKCVNFNFNGLTGTGVLTESNKKFLPFQQFGRDIADTTDAVRDPQTLEILDITPCSFGGVSVITPGTNASNQVAVLYQDVNCTEVPVAIHADQLTPTWRVYSTGSNVFQTRAGCLIGAEHVNNSYECDIPIGAGICASYQTQTNSRSVASQSIIAYTMSLGAENSVAYSNNSIAIPTNFTISVTTEILPVSMTKTSVDCTMYICGDSTECSNLLLQYGSFCTQLNRALTGIAVEQDKNTQEVFAQVKQIYKTPPIKDFGGFNFSQILPDPSKPSKRSFIEDLLFNKVTLADAGFIKQYGDCLGDIAARDLICAQKFNGLTVLPPLLTDEMIAQYTSALLAGTITSGWTFGAGAALQIPFAMQMAYRFNGIGVTQNVLYENQKLIANQFNSAIGKIQDSLSSTASALGKLQDVVNQNAQALNTLVKQLSSNFGAISSVLNDILSRLDPPEAEVQIDRLITGRLQSLQTYVTQQLIRAAEIRASANLAATKMSECVLGQSKRVDFCGKGYHLMSFPQSAPHGVVFLHVTYVFAQEKNFTTAPAICHDGKAHFPREGVFVSNGTHWFVTQRNFYEPQIITTDNTFVSGSCDVVIGIVNNTVYDPLQPELDSFKEELDKYFKNHTSPDVDLGDISGINASVVNIQKEIDRLNEVAKNLNESLIDLQELGKYEQYIKGGSGYIPEAPRDGQAYVRKDGEWVLLSTFL

SEQ ID NO: 5837 - protein, 1241 aa, Artificial Sequence
  SARS-CoV-2/Wuhan/HBCDC-HB-01/2019__EPI_ISL_402132 spike protein (1-1211)(K986P_V987P_P1069F) Foldon construct
MFVFLVLLPLVSSQCVNLTTRTQLPPAYTNSITRGVYYPDKVFRSSVLHSTQDLFLPFFSNVTWFHAIHVSGTNGTKRFDNPVLPFNDGVYFASTEKSNIIRGWIFGTTLDSKTQSLLIVNNATNVVIKVCEFQFCNDPFLGVYYHKNNKSWMESEFRVYSSANNCTFEYVSQPFLMDLEGKQGNFKNLREFVFKNIDGYFKIYSKHTPINLVRDLPQGFSALEPLVDLPIGINITRFQTLLALHRSYLTPGDSSSGWTAGAAAYYVGYLQPRTFLLKYNENGTITDAVDCALDPLSETKCTLKSFTVEKGIYQTSNFRVQPTESIVRFPNITNLCPFGEVFNATRFASVYAWNRKRISNCVADYSVLYNSASFSTFKCYGVSPTKLNDLCFTNVYADSFVIRGDEVRQIAPGQTGKIADYNYKLPDDFTGCVIAWNSNNLDSKVGGNYNYLYRLFRKSNLKPFERDISTEIYQAGSTPCNGVEGFNCYFPLQSYGFQPTNGVGYQPYRVVVLSFELLHAPATVCGPKKSTNLVKNKCVNFNFNGLTGTGVLTESNKKFLPFQQFGRDIADTTDAVRDPQTLEILDITPCSFGGVSVITPGTNTSNQVAVLYQDVNCTEVPVAIHADQLTPTWRVYSTGSNVFQTRAGCLIGAEHVNNSYECDIPIGAGICASYQTQTNSPRRARSVASQSIIAYTMSLGAENSVAYSNNSIAIPTNFTISVTTEILPVSMTKTSVDCTMYICGDSTECSNLLLQYGSFCTQLNRALTGIAVEQDKNTQEVFAQVKQIYKTPPIKDFGGFNFSQILPDPSKPSKRSFIEDLLFNKVTLADAGFIKQYGDCLGDIAARDLICAQKFNGLTVLPPLLTDEMIAQYTSALLAGTITSGWTFGAGAALQIPFAMQMAYRFNGIGVTQNVLYENQKLIANQFNSAIGKIQDSLSSTASALGKLQDVVNQNAQALNTLVKQLSSNFGAISSVLNDILSRLDPPEAEVQIDRLITGRLQSLQTYVTQQLIRAAEIRASANLAATKMSECVLGQSKRVDFCGKGYHLMSFPQSAPHGVVFLHVTYVFAQEKNFTTAPAICHDGKAHFPREGVFVSNGTHWFVTQRNFYEPQIITTDNTFVSGNCDVVIGIVNNTVYDPLQPELDSFKEELDKYFKNHTSPDVDLGDISGINASVVNIQKEIDRLNEVAKNLNESLIDLQELGKYEQYIKGGSGYIPEAPRDGQAYVRKDGEWVLLSTFL

SEQ ID NO: 5838 - protein, 1241 aa, Artificial Sequence
  SARS-CoV-2/Guangdong/20SF028/2020__EPI_ISL_403936 spike protein (1-1211)(K986P_V987P_P1069F) Foldon construct
MFVFLVLLPLVSSQCVNLTTRTQLPPAYTNSFTRGVYYPDKVFRSSVLYSTQDLFLPFFSNVTWFHAIHVSGTNGTKRFDNPVLPFNDGVYFASTEKSNIIRGWIFGTTLDSKTQSLLIVNNATNVVIKVCEFQFCNDPFLGVYYHKNNKSWMESEFRVYSSANNCTFEYVSQPFLMDLEGKQGNFKNLREFVFKNIDGYFKIYSKHTPINLVRDLPQGFSALEPLVDLPIGINITRFQTLLALHRSYLTPGDSSSGWTAGAAAYYVGYLQPRTFLLKYNENGTITDAVDCALDPLSETKCTLKSFTVEKGIYQTSNFRVQPTESIVRFPNITNLCPFGEVFNATRFASVYAWNRKRISNCVADYSVLYNSASFSTFKCYGVSPTKLNDLCFTNVYADSFVIRGDEVRQIAPGQTGKIADYNYKLPDDFTGCVIAWNSNNLDSKVGGNYNYLYRLFRKSNLKPFERDISTEIYQAGSTPCNGVEGFNCYFPLQSYGFQPTNGVGYQPYRVVVLSFELLHAPATVCGPKKSTNLVKNKCVNFNFNGLTGTGVLTESNKKFLPFQQFGRDIADTTDAVRDPQTLEILDITPCSFGGVSVITPGTNTSNQVAVLYQDVNCTEVPVAIHADQLTPTWRVYSTGSNVFQTRAGCLIGAEHVNNSYECDIPIGAGICASYQTQTNSPRRARSVASQSIIAYTMSLGAENSVAYSNNSIAIPTNFTISVTTEILPVSMTKTSVDCTMYICGDSTECSNLLLQYGSFCTQLNRALTGIAVEQDKNTQEVFAQVKQIYKTPPIKDFGGFNFSQILPDPSKPSKRSFIEDLLFNKVTLADAGFIKQYGDCLGDIAARDLICAQKFNGLTVLPPLLTDEMIAQYTSALLAGTITSGWTFGAGAALQIPFAMQMAYRFNGIGVTQNVLYENQKLIANQFNSAIGKIQDSLSSTASALGKLQDVVNQNAQALNTLVKQLSSNFGAISSVLNDILSRLDPPEAEVQIDRLITGRLQSLQTYVTQQLIRAAEIRASANLAATKMSECVLGQSKRVDFCGKGYHLMSFPQSAPHGVVFLHVTYVFAQEKNFTTAPAICHDGKAHFPREGVFVSNGTHWFVTQRNFYEPQIITTDNTFVSGNCDVVIGIVNNTVYDPLQPELDSFKEELDKYFKNHTSPDVDLGDISGINASVVNIQKEIDRLNEVAKNLNESLIDLQELGKYEQYIKGGSGYIPEAPRDGQAYVRKDGEWVLLSTFL

SEQ ID NO: 5839 - protein, 1241 aa, Artificial Sequence
  SARS-CoV-2/Shenzhen/SZTH-001/2020__EPI_ISL_406592 spike protein (1-1211)(K986P_V987P_P1069F) Foldon construct
MFVFLVLLPLVSSQCVNLTTRTQLPPAYTNSFTRGVYYPDKVFRSSVLHSTQDLFLPFFSNVTWFHAIHVSGTNGTKRFDNPVLPFNDGVYFASTEKSNIIRGWIFGTTLDSKTQSLLIVNNATNVVIKVCEFQFCNDPFLGVYYHKNNKSWMESEFRVYSSANNCTFEYVSQPFLMDLEGKQGNFKNLREFVFKNIDGYFKIYSKHTPINLVRDLPQGFSALEPLVDLPIGINITRFQTLLALHRSYLTPGDSSSGWTAGAAAYYVGYLQPRTFLLKYNENGTITDAVDCALDPLSETKCTLKSFTVEKGIYQTSNFRVQPTESIVRFPNITNLCPFGEVFNATRFASVYAWNRKRISNCVADYSVLYNSASFSTFKCYGVSPTKLNDLCFTNVYADSFVIRGDEVRQIAPGQTGKIADYNYKLPDDFTGCVIAWNSNNLDSKVGGNYNYLYRLFRKSNLKPFERDISTEIYQAGSTPCNGVEGFNCYFPLQSYGFQPTNGVGYQPYRVVVLSFELLHAPATVCGPKKSTNLVKNKCVNFNFNGLTGTGVLTESNKKFLPFQQFGRDIADTTDAVRDPQTLEILDITPCSFGGVSVITPGTNTSNQVAVLYQDVNCTEVPVAIHADQLTPTWRVYSTGSNVFQTRAGCLIGAEHVNNSYECDIPIGAGICASYQTQTNSPRRARSVASQSIIAYTMSLGAENSVAYSNNSIAIPTNFTISVTTEILPVSMTKTSVDCTMYICGDSTECSNLLLQYGSFCTQLNRALTGIAVEQDKNTQEVFAQVKQIYKTPPIKDFGGFNFSQILPDPSKPSKRSFIEDLLFNKVTLADAGFIKQYGDCLGDIAARDLICAQKFNGLTVLPPLLTDEMIAQYTSALLAGTITSGWTFGAGAALQIPFAMQMAYRFNGIGVTQNVLYENQKLIANQFNSAIGKIQDSLSSTASALGKLQDVVNQNAQALNTLVKQLSSNFGAISSVLNDILSRLDPPEAEVQIDRLITGRLQSLQTYVTQQLIRAAEIRASANLAATKMSECVLGQSKRVDFCGKGYHLMSFPQSAPHGVVFLHVTYVFAQEKNFTTAPAICHDGKAHFPREGVFVSNGTHWFVTQRNFYEPQIITTDNTFVSGNCDVLIGIVNNTVYDPLQPELDSFKEELDKYFKNHTSPDVDLGDISGINASVVNIQKEIDRLNEVAKNLNESLIDLQELGKYEQYIKGGSGYIPEAPRDGQAYVRKDGEWVLLSTFL

SEQ ID NO: 5840 - protein, 1241 aa, Artificial Sequence
  SARS-CoV-2/Shenzhen/SZTH-004/2020__EPI_ISL_406595 spike protein (1-1211)(K986P_V987P_P1069F) Foldon construct
MFVFLVLLPLVSSQCVNLTTRTQLPPAYTNSFTRGVYYPDKVFRSSVLHSTQDLFLPFFSNVTWFHAIHVSGTNGTKRFDNPVLPFNDGVYFASTEKSNIIRGWIFGTTLDSKTQSLLIVNNATNVVIKVCEFQFCNDPFLGVYYHKNNKSWMESEFRVYSSANNCTFEYVSQPFLMDLEGKQGNFKNLREFVFKNIDGYFKIYSKHTPINLVRDLPQGFSALEPLVDLPIGINITRFQTLLALHRSYLTPGDSSSGWTAGAAAYYVGYLQPRTFLLKYNENGTITDAVDCALDPLSETKCTLKSFTVEKGIYQTSNFRVQPTESIVRFPNITNLCPFGEVFNATRFASVYAWDRKRISNCVAYYSVLYNSASFSTFKCYGVSPTKLNDLCFTNVYADSFVIRGDEVRQIAPGQTGKIADYNYKLPDDFTGCVIAWNSNNLDSKVGGNYNYLYRLFRKSNLKPFERDISTEIYQAGSTPCNGVEGFNCYFPLQSYGFQPTNGVGYQPYRVVVLSFELLHAPATVCGPKKSTNLVKNKCVNFNFNGLTGTGVLTESNKKFLPFQQFGRDIADTTDAVRDPQTLEILDITPCSFGGVSVITPGTNTSNQVAVLYQDVNCTEVPVAIHADQLTPTWRVYSTGSNVFQTRAGCLIGAEHVNNSYECDIPIGAGICASYQTQTNSPRRARSVASQSIIAYTMSLGAENSVAYSNNSIAIPTNFTISVTTEILPVSMTKTSVDCTMYICGDSTECSNLLLQYGSFCTQLNRALTGIAVEQDKNTQEVFAQVKQIYKTPPIKDFGGFNFSQILPDPSKPSKRSFIEDLLFNKVTLADAGFIKQYGDCLGDIAARDLICAQKFNGLTVLPPLLTDEMIAQYTSALLAGTITSGWTFGAGAALQIPFAMQMAYRFNGIGVTQNVLYENQKLIANQFNSAIGKIQDSLSSTASALGKLQDVVNQNAQALNTLVKQLSSNFGAISSVLNDILSRLDPPEAEVQIDRLITGRLQSLQTYVTQQLIRAAEIRASANLAATKMSECVLGQSKRVDFCGKGYHLMSFPQSAPHGVVFLHVTYVFAQEKNFTTAPAICHDGKAHFPREGVFVSNGTHWFVTQRNFYEPQIITTDNTFVSGNCDVVIGIVNNTVYDPLQPELDSFKEELDKYFKNHTSPDVDLGDISGINASVVNIQKEIDRLNEVAKNLNESLIDLQELGKYEQYIKGGSGYIPEAPRDGQAYVRKDGEWVLLSTFL

SEQ ID NO: 5841 - protein, 1241 aa, Artificial Sequence
  SARS-CoV-2/France/IDF0372/2020__EPI_ISL_406596 spike protein (1-1211)(K986P_V987P_P1069F) Foldon construct
MFVFLVLLPLVSSQCVNLTTRTQLPPAYTNSFTRGVYYPDKVFRSSVLHSTQDLFLPFFSNVTWFHAIHVSGTNGTKRFDNPVLPFNDGVYFASTEKSNIIRGWIFGTTLDSKTQSLLIVNNATNVVIKVCEFQFCNDPFLGVYYHKNNKSWMESEFRVYSSANNCTFEYVSQPFLMDLEGKQGNFKNLREFVFKNIDGYFKIYSKHTPINLVRDLPQGFSALEPLVDLPIGINITRFQTLLALHRSYLTPGDSSSGWTAGAAAYYVGYLQPRTFLLKYNENGTITDAVDCALDPLSETKCTLKSFTVEKGIYQTSNFRVQPTESIVRFPNITNLCPFGEVFNATRFASVYAWNRKRISNCVADYSFLYNSASFSTFKCYGVSPTKLNDLCFTNVYADSFVIRGDEVRQIAPGQTGKIADYNYKLPDDFTGCVIAWNSNNLDSKVGGNYNYLYRLFRKSNLKPFERDISTEIYQAGSTPCNGVEGFNCYFPLQSYGFQPTNGVGYQPYRVVVLSFELLHAPATVCGPKKSTNLVKNKCVNFNFNGLTGTGVLTESNKKFLPFQQFGRDIADTTDAVRDPQTLEILDITPCSFGGVSVITPGTNTSNQVAVLYQDVNCTEVPVAIHADQLTPTWRVYSTGSNVFQTRAGCLIGAEHVNNSYECDIPIGAGICASYQTQTNSPRRARSVASQSIIAYTMSLGAENSVAYSNNSIAIPTNFTISVTTEILPVSMTKTSVDCTMYICGDSTECSNLLLQYGSFCTQLNRALTGIAVEQDKNTQEVFAQVKQIYKTPPIKDFGGFNFSQILPDPSKPSKRSFIEDLLFNKVTLADAGFIKQYGDCLGDIAARDLICAQKFNGLTVLPPLLTDEMIAQYTSALLAGTITSGWTFGAGAALQIPFAMQMAYRFNGIGVTQNVLYENQKLIANQFNSAIGKIQDSLSSTASALGKLQDVVNQNAQALNTLVKQLSSNFGAISSVLNDILSRLDPPEAEVQIDRLITGRLQSLQTYVTQQLIRAAEIRASANLAATKMSECVLGQSKRVDFCGKGYHLMSFPQSAPHGVVFLHVTYVFAQEKNFTTAPAICHDGKAHFPREGVFVSNGTHWFVTQRNFYEPQIITTDNTFVSGNCDVVIGIVNNTVYDPLQPELDSFKEELDKYFKNHTSPDVDLGDISGINASVVNIQKEIDRLNEVAKNLNESLIDLQELGKYEQYIKGGSGYIPEAPRDGQAYVRKDGEWVLLSTFL

SEQ ID NO: 5842 - protein, 1241 aa, Artificial Sequence
  SARS-CoV-2/Australia/VIC01/2020__EPI_ISL_406844 spike protein (1-1211)(K986P_V987P_P1069F) Foldon construct
MFVFLVLLPLVSSQCVNLTTRTQLPPAYTNSFTRGVYYPDKVFRSSVLHSTQDLFLPFFSNVTWFHAIHVSGTNGTKRFDNPVLPFNDGVYFASTEKSNIIRGWIFGTTLDSKTQSLLIVNNATNVVIKVCEFQFCNDPFLGVYYHKNNKSWMESEFRVYSSANNCTFEYVSQPFLMDLEGKQGNFKNLREFVFKNIDGYFKIYSKHTPINLVRDLPQGFSALEPLVDLPIGINITRFQTLLALHRRYLTPGDSSSGWTAGAAAYYVGYLQPRTFLLKYNENGTITDAVDCALDPLSETKCTLKSFTVEKGIYQTSNFRVQPTESIVRFPNITNLCPFGEVFNATRFASVYAWNRKRISNCVADYSVLYNSASFSTFKCYGVSPTKLNDLCFTNVYADSFVIRGDEVRQIAPGQTGKIADYNYKLPDDFTGCVIAWNSNNLDSKVGGNYNYLYRLFRKSNLKPFERDISTEIYQAGSTPCNGVEGFNCYFPLQSYGFQPTNGVGYQPYRVVVLSFELLHAPATVCGPKKSTNLVKNKCVNFNFNGLTGTGVLTESNKKFLPFQQFGRDIADTTDAVRDPQTLEILDITPCSFGGVSVITPGTNTSNQVAVLYQDVNCTEVPVAIHADQLTPTWRVYSTGSNVFQTRAGCLIGAEHVNNSYECDIPIGAGICASYQTQTNSPRRARSVASQSIIAYTMSLGAENSVAYSNNSIAIPTNFTISVTTEILPVSMTKTSVDCTMYICGDSTECSNLLLQYGSFCTQLNRALTGIAVEQDKNTQEVFAQVKQIYKTPPIKDFGGFNFSQILPDPSKPSKRSFIEDLLFNKVTLADAGFIKQYGDCLGDIAARDLICAQKFNGLTVLPPLLTDEMIAQYTSALLAGTITSGWTFGAGAALQIPFAMQMAYRFNGIGVTQNVLYENQKLIANQFNSAIGKIQDSLSSTASALGKLQDVVNQNAQALNTLVKQLSSNFGAISSVLNDILSRLDPPEAEVQIDRLITGRLQSLQTYVTQQLIRAAEIRASANLAATKMSECVLGQSKRVDFCGKGYHLMSFPQSAPHGVVFLHVTYVFAQEKNFTTAPAICHDGKAHFPREGVFVSNGTHWFVTQRNFYEPQIITTDNTFVSGNCDVVIGIVNNTVYDPLQPELDSFKEELDKYFKNHTSPDVDLGDISGINASVVNIQKEIDRLNEVAKNLNESLIDLQELGKYEQYIKGGSGYIPEAPRDGQAYVRKDGEWVLLSTFL

SEQ ID NO: 5843 - protein, 1241 aa, Artificial Sequence
  SARS-CoV-2/Germany/BavPat1/2020__EPI_ISL_406862 spike protein (1-1211)(K986P_V987P_P1069F) Foldon construct
MFVFLVLLPLVSSQCVNLTTRTQLPPAYTNSFTRGVYYPDKVFRSSVLHSTQDLFLPFFSNVTWFHAIHVSGTNGTKRFDNPVLPFNDGVYFASTEKSNIIRGWIFGTTLDSKTQSLLIVNNATNVVIKVCEFQFCNDPFLGVYYHKNNKSWMESEFRVYSSANNCTFEYVSQPFLMDLEGKQGNFKNLREFVFKNIDGYFKIYSKHTPINLVRDLPQGFSALEPLVDLPIGINITRFQTLLALHRSYLTPGDSSSGWTAGAAAYYVGYLQPRTFLLKYNENGTITDAVDCALDPLSETKCTLKSFTVEKGIYQTSNFRVQPTESIVRFPNITNLCPFGEVFNATRFASVYAWNRKRISNCVADYSVLYNSASFSTFKCYGVSPTKLNDLCFTNVYADSFVIRGDEVRQIAPGQTGKIADYNYKLPDDFTGCVIAWNSNNLDSKVGGNYNYLYRLFRKSNLKPFERDISTEIYQAGSTPCNGVEGFNCYFPLQSYGFQPTNGVGYQPYRVVVLSFELLHAPATVCGPKKSTNLVKNKCVNFNFNGLTGTGVLTESNKKFLPFQQFGRDIADTTDAVRDPQTLEILDITPCSFGGVSVITPGTNTSNQVAVLYQGVNCTEVPVAIHADQLTPTWRVYSTGSNVFQTRAGCLIGAEHVNNSYECDIPIGAGICASYQTQTNSPRRARSVASQSIIAYTMSLGAENSVAYSNNSIAIPTNFTISVTTEILPVSMTKTSVDCTMYICGDSTECSNLLLQYGSFCTQLNRALTGIAVEQDKNTQEVFAQVKQIYKTPPIKDFGGFNFSQILPDPSKPSKRSFIEDLLFNKVTLADAGFIKQYGDCLGDIAARDLICAQKFNGLTVLPPLLTDEMIAQYTSALLAGTITSGWTFGAGAALQIPFAMQMAYRFNGIGVTQNVLYENQKLIANQFNSAIGKIQDSLSSTASALGKLQDVVNQNAQALNTLVKQLSSNFGAISSVLNDILSRLDPPEAEVQIDRLITGRLQSLQTYVTQQLIRAAEIRASANLAATKMSECVLGQSKRVDFCGKGYHLMSFPQSAPHGVVFLHVTYVFAQEKNFTTAPAICHDGKAHFPREGVFVSNGTHWFVTQRNFYEPQIITTDNTFVSGNCDVVIGIVNNTVYDPLQPELDSFKEELDKYFKNHTSPDVDLGDISGINASVVNIQKEIDRLNEVAKNLNESLIDLQELGKYEQYIKGGSGYIPEAPRDGQAYVRKDGEWVLLSTFL

SEQ ID NO: 5844 - protein, 1241 aa, Artificial Sequence
  SARS-CoV-2/Wuhan/HBCDC-HB-02/2020__EPI_ISL_412978 spike protein (1-1211)(K986P_V987P_P1069F) Foldon construct
MFVFLVLLPLVSSQCVNLTTRTQLPPAYTNSFTRGVYYPDKVFRSSVLHSTQDLFLPFFSNVTWFHAIHVSGTNGTKRFDNPVLPFNDGVYFASTEKSNIIRGWIFGTTLDSKTQSLLIVNNATNVVIKVCEFQFCNDPFLGVYYHKNNKSWMESEFRVYSSANNCTFEYVSQPFLMDLEGKQGNFKNLREFVFKNIDGYFKIYSKHTPINLVRDLPQGFSALEPLVDLPIGINITRFQTLLALHRSYLTPGDSSSGWTAGAAAYYVGYLQPRTFLLKYNENGTITDAVDCALDPLSETKCTLKSFTVEKGIYQTSNFRVQPTESIVRFPNITNLCPFGEVFNATRFASVYAWNRKRISNCVADYSVLYNSASFSTFKCYGVSPTKLNDLCFTNVYADSFVIRGDEVRQIAPGQTGKIADYNYKLPDDFTGCVIAWNSNNLDSKVGGNYNYLYRLFRKSNLKPFERDISTEIYQAGSTPCNGVEGFNCYFPLQSYGFQPTNGVGYQPYRVVVLSFELLHAPATVCGPKKSTNLVKNKCVNFNFNGLTGTGVLTESNKKFLPFQQFGRDIADTTDAVRDPQTLEILDITPCSFGGVSVITPGTNTSNQVAVLYQDVNCTEVPVAIHADQLTPTWRVYSTGSNVFQTRAGCLIGAEHVNNSYECDIPIGAGICASYQTQTNSPRRARSVASQSIIAYTMSLGAENSVAYSNNSIAIPTNFTISVTTEILPVSMTKTSVDCTMYICGDSTECSNFLLQYGSFCTQLNRALTGIAVEQDKNTQEVFAQVKQIYKTPPIKDFGGFNFSQILPDPSKPSKRSFIEDLLFNKVTLADAGFIKQYGDCLGDIAARDLICAQKFNGLTVLPPLLTDEMIAQYTSALLAGTITSGWTFGAGAALQIPFAMQMAYRFNGIGVTQNVLYENQKLIANQFNSAIGKIQDSLSSTASALGKLQDVVNQNAQALNTLVKQLSSNFGAISSVLNDILSRLDPPEAEVQIDRLITGRLQSLQTYVTQQLIRAAEIRASANLAATKMSECVLGQSKRVDFCGKGYHLMSFPQSAPHGVVFLHVTYVFAQEKNFTTAPAICHDGKAHFPREGVFVSNGTHWFVTQRNFYEPQIITTDNTFVSGNCDVVIGIVNNTVYDPLQPELDSFKEELDKYFKNHTSPDVDLGDISGINASVVNIQKEIDRLNEVAKNLNESLIDLQELGKYEQYIKGGSGYIPEAPRDGQAYVRKDGEWVLLSTFL

SEQ ID NO: 5845 - protein, 1241 aa, Artificial Sequence
  SARS-CoV-2/Australia/QLD02/2020__EPI_ISL_407896 spike protein (1-1211)(K986P_V987P_P1069F) Foldon construct
MFVFLVLLPLVSSQCVNLTTRTQLPPAYTNSFTRGVYYPDKVFRSSVLHSTQDLFLPFFSNVTWFHAIHVSGTNGTKRFDNPVLPFNDGVYFASTEKSNIIRGWIFGTTLDSKTQSLLIVNNATNVVIKVCEFQFCNDPFLGVYYHKNNKSWMESEFRVYSSANNCTFEYVSQPFLMDLEGKQGNFKNLREFVFKNIDGYFKIYSKHTPINLVRDLPQGFSALEPLVDLPIGINITRFQTLLALHRSYLTPGDSSSGWTAGAAAYYVGYLQPRTFLLKYNENGTITDAVDCALDPLSETKCTLKSFTVEKGIYQTSNFRVQPTESIVRFPNITNLCPFGEVFNATRFASVYAWNRKRISNCVADYSVLYNSASFSTFKCYGVSPTKLNDLCFTNVYADSFVIRGDEVRQIAPGQTGKIADYNYKLPDDFTGCVIAWNSNNLDSKVGGNYNYLYRLFRKSNLKPFERDISTEIYQAGSTPCNGVEGFNCYFPLQSYGFQPTNGVGYQPYRVVVLSFELLHAPATVCGPKKSTNLVKNKCVNFNFNGLTGTGVLTESNKKFLPFQQFGRDIADTTDAVRDPQTLEILDITPCSFGGVSVITPGTNTSNQVAVLYQDVNCTEVPVAIHADQLTPTWRVYSTGSNVFQTRAGCLIGAEHVNNSYECDIPIGAGICASYQTQTNSPRRARSVASQSIIAYTMSLGAENSVAYSNNSIAIPTNFTISVTTEILPVSMTKTSVDCTMYICGDSTECSNLLLQYGSFCTQLNRALTGIAVEQDKNTQEVFAQVKQIYKTPPIKDFGGFNFSQILPDPSKPSKRSFIEDLLFNKVTLADAGFIKQYGDCLGDIAARDLICAQKFNGLTVLPPLLTDEMIAQYTSALLAGTITSGWTFGAGAALQIPFAMQMAYRFNGIGVTQNVLYENQKLIANQFNSAIGKIQDSLSSTASALGKLQDVVNQNAQALNTLVKQLSSNFGAISSVLNDILSRLDPPEAEVQIDRLITGRLQSLQTYVTQQLIRAAEIRASANLAATKMSECVLGQSKRVDFCGKGYHLMSFPQSAPHGVVFLHVTYVFAQEKNFTTAPAICHDGKAHFPREGVFVSNGTHWFVTQRNFYEPQIITTDNTFVSGNCDVVIGIVNNTVYDPLQLELDSFKEELDKYFKNHTSPDVDLGDISGINASVVNIQKEIDRLNEVAKNLNESLIDLQELGKYEQYIKGGSGYIPEAPRDGQAYVRKDGEWVLLSTFL

SEQ ID NO: 5846 - protein, 1241 aa, Artificial Sequence
  SARS-CoV-2/India/1-31/2020__EPI_ISL_413523 spike protein (1-1211)(K986P_V987P_P1069F) Foldon construct
MFVFLVLLPLVSSQCVNLTTRTQLPPAYTNSFTRGVYYPDKVFRSSVLHSTQDLFLPFFSNVTWFHAIHVSGTNGTKRFDNPVLPFNDGVYFASTEKSNIIRGWIFGTTLDSKTQSLLIVNNATNVVIKVCEFQFCNDPFLGVYYHKNNKSWMESEFRVYSSANNCTFEYVSQPFLMDLEGKQGNFKNLREFVFKNIDGYFKIYSKHTPINLVRDLPQGFSALEPLVDLPIGINITRFQTLLALHRSYLTPGDSSSGWTAGAAAYYVGYLQPRTFLLKYNENGTITDAVDCALDPLSETKCTLKSFTVEKGIYQTSNFRVQPTESIVRFPNITNLCPFGEVFNATRFASVYAWNRKRISNCVADYSVLYNSASFSTFKCYGVSPTKLNDLCFTNVYADSFVIRGDEVRQIAPGQTGKIADYNYKLPDDFTGCVIAWNSNNLDSKVGGNYNYLYRLFRKSNLKPFERDISTEIYQAGSTPCNGVEGFNCYFPLQSYGFQPTNGVGYQPYRVVVLSFELLHAPATVCGPKKSTNLVKNKCVNFNFNGLTGTGVLTESNKKFLPFQQFGRDIADTTDAVRDPQTLEILDITPCSFGGVSVITPGTNTSNQVAVLYQDVNCTEVPVAIHADQLTPTWRVYSTGSNVFQTRAGCLIGAEHVNNSYECDIPIGAGICASYQTQTNSPRRARSVASQSIIAYTMSLGAENSVAYSNNSIAIPTNFTISVTTEILPVSMTKTSVDCTMYICGDSTECSNLLLQYGSFCTQLNRALTGIAVEQDKNTQEVFAQVKQIYKTPPIKDFGGFNFSQILPDPSKPSKRSFIEDLLFNKVTLADAGFIKQYGDCLGDIAARDLICAQKFNGLTVLPPLLTDEMIAQYTSALLAGTITSGWTFGAGAALQIPFAMQMAYRFNGIGVTQNVLYENQKLIANQFNSVIGKIQDSLSSTASALGKLQDVVNQNAQALNTLVKQLSSNFGAISSVLNDILSRLDPPEAEVQIDRLITGRLQSLQTYVTQQLIRAAEIRASANLAATKMSECVLGQSKRVDFCGKGYHLMSFPQSAPHGVVFLHVTYVFAQEKNFTTAPAICHDGKAHFPREGVFVSNGTHWFVTQRNFYEPQIITTDNTFVSGNCDVVIGIVNNTVYDPLQPELDSFKEELDKYFKNHTSPDVDLGDISGINASVVNIQKEIDRLNEVAKNLNESLIDLQELGKYEQYIKGGSGYIPEAPRDGQAYVRKDGEWVLLSTFL

SEQ ID NO: 5847 - protein, 1241 aa, Artificial Sequence
  SARS-CoV-2/Guangdong/GD2020087-P0008/2020__EPI_ISL_413863 spike protein (1-1211)(K986P_V987P_P1069F) Foldon construct
MFVFLVLLPLVSSQCVNLTTRTQLPPAYTNSFTRGVYYPDKVFRSSVLHSTQDLFLPFFSNVTWFHAIHVSGTNGTKRFDNPVLPFNDGVYFASTEKSNIIRGWIFGTTLDSKTQSLLIVNNATNVVIKVCEFQFCNDPFLGVYYHKNNKSWMESEFRVYSSANNCTFEYVSQPFLMDLEGKQGNFKNLREFVFKNIDGYFKIYSKHTPINLVRDLPQGFSALEPLVDLPIGINITRFQTLLALHRSYLTPGDSSSGWTAGAAAYYVGYLQPRTFLLKYNENGTITDAVDCALDPLSETKCTLKSFTVEKGIYQTSNFRVQPTESIVRFPNITNLCPFGEVFNATRFASVYAWNRKRISNCVADYSVLYNSASFSTFKCYGVSPTKLNDLCFTNVYADSFVIRGDEVREIAPGQTGKIADYNYKLPDDFTGCVIAWNSNNLDSKVGGNYNYLYRLFRKSNLKPFERDISTEIYQAGSTPCNGVEGFNCYFPLQSYGFQPTNGVGYQPYRVVVLSFELLHAPATVCGPKKSTNLVKNKCVNFNFNGLTGTGVLTESNKKFLPFQQFGRDIADTTDAVRDPQTLEILDITPCSFGGVSVITPGTNTSNQVAVLYQDVNCTEVPVAIHADQLTPTWRVYSTGSNVFQTRAGCLIGAEHVNNSYECDIPIGAGICASYQTQTNSPRRARSVASQSIIAYTMSLGAENSVAYSNNSIAIPTNFTISVTTEILPVSMTKTSVDCTMYICGDSTECSNLLLQYGSFCTQLNRALTGIAVEQDKNTQEVFAQVKQIYKTPPIKDFGGFNFSQILPDPSKPSKRSFIEDLLFNKVTLADAGFIKQYGDCLGDIAARDLICAQKFNGLTVLPPLLTDEMIAQYTSALLAGTITSGWTFGAGAALQIPFAMQMAYRFNGIGVTQNVLYENQKLIANQFNSAIGKIQDSLSSTASALGKLQDVVNQNAQALNTLVKQLSSNFGAISSVLNDILSRLDPPEAEVQIDRLITGRLQSLQTYVTQQLIRAAEIRASANLAATKMSECVLGQSKRVDFCGKGYHLMSFPQSAPHGVVFLHVTYVFAQEKNFTTAPAICHDGKAHFPREGVFVSNGTHWFVTQRNFYEPQIITTDNTFVSGNCDVVIGIVNNTVYDPLQPELDSFKEELDKYFKNHTSPDVDLGDISGINASVVNIQKEIDRLNEVAKNLNESLIDLQELGKYEQYIKGGSGYIPEAPRDGQAYVRKDGEWVLLSTFL

SEQ ID NO: 5848 - protein, 1241 aa, Artificial Sequence
  SARS-CoV-2/Sweden/01/2020__EPI_ISL_411951 spike protein (1-1211)(K986P_V987P_P1069F) Foldon construct
MFVFLVLLPLVSSQCVNLTTRTQLPPAYTNSFTRGVYYPDKVFRSSVLHSTQDLFLPFFSNVTWFHAIHVSGTNGTKRFDNPVLPFNDGVYFASTEKSNIIRGWIFGTTLDSKTQSLLIVNNATNVVIKVCEFQFCNDPFLGVYYHKNNKSWMESEFRVYSSANNCTFEYVSQPFLMDLEGKQGNFKNLREFVFKNIDGYFKIYSKHTPINLVRDLPQGFSALEPLVDLPIGINITRFQTLLALHRSYLTPGDSSSGWTAGAAAYYVGYLQPRTFLLKYNENGTITDAVDCALDPLSETKCTLKSFTVEKGIYQTSNFRVQPTESIVRFPNITNLCPFGEVFNATRFASVYAWNRKRISNCVADYSVLYNSASFSTFKCYGVSPTKLNDLCFTNVYADSFVIRGDEVRQIAPGQTGKIADYNYKLPDDFTGCVIAWNSNNLDSKVGGNYNYLYRLFRKSNLKPFERDISTEIYQAGSTPCNGVEGFNCYFPLQSYGFQPTNGVGYQPYRVVVLSFELLHAPATVCGPKKSTNLVKNKCVNFNFNGLTGTGVLTESNKKFLPFQQFGRDIADTTDAVRDPQTLEILDITPCSFGGVSVITPGTNTSNQVAVLYQDVNCTEVPVAIHADQLTPTWRVYSTGSNVFQTRAGCLIGAEHVNNSYECDIPIGAGICASYQTQTNSPRRARSVASQSIIAYTMSLGAENSVAYSNNSIAIPTNFTISVTTEILPVSMTKTSVDCTMYICGDSTECSNLLLQYGSFCTQLNRALTGIAVEQDKNTQEVFAQVKQIYKTPPIKDCGGFNFSQILPDPSKPSKRSFIEDLLFNKVTLADAGFIKQYGDCLGDIAARDLICAQKFNGLTVLPPLLTDEMIAQYTSALLAGTITSGWTFGAGAALQIPFAMQMAYRFNGIGVTQNVLYENQKLIANQFNSAIGKIQDSLSSTASALGKLQDVVNQNAQALNTLVKQLSSNFGAISSVLNDILSRLDPPEAEVQIDRLITGRLQSLQTYVTQQLIRAAEIRASANLAATKMSECVLGQSKRVDFCGKGYHLMSFPQSAPHGVVFLHVTYVFAQEKNFTTAPAICHDGKAHFPREGVFVSNGTHWFVTQRNFYEPQIITTDNTFVSGNCDVVIGIVNNTVYDPLQPELDSFKEELDKYFKNHTSPDVDLGDISGINASVVNIQKEIDRLNEVAKNLNESLIDLQELGKYEQYIKGGSGYIPEAPRDGQAYVRKDGEWVLLSTFL

SEQ ID NO: 5849 - protein, 1241 aa, Artificial Sequence
  SARS-CoV-2/Tianmen/HBCDC-HB-07/2020__EPI_ISL_412983 spike protein (1-1211)(K986P_V987P_P1069F) Foldon construct
MFVFLVLLPLVSSQCVNLTTRTQLPPAYTNSFTRGVYYPDKVFRSSVLHSTQDLFLPFFSNVTWFHAIHVSGTNGTKRFDNPVLPFNDGVYFASTEKSNIIRGWIFGTTLDSKTQSLLIVNNATNVVIKVCEFQFCNDPFLGVYYHKNNKSWMESEFRVYSSANNCTFEYVSQPFLMDLEGKQGNFKNLREFVFKNIDGYFKIYSKHTPINLVRDLPQGFSALEPLVDLPIGINITRFQTLLALHRSYLTPGDSSSGWTAGAAAYYVGYLQPRTFLLKYNENGTITDAVDCALDPLSETKCTLKSFTVEKGIYQTSNFRVQPTESIVRFPNITNLCPFGEVFNATRFASVYAWNRKRISNCVADYSVLYNSASFSTFKCYGVSPTKLNDLCFTNVYADSFVIRGDEVRQIAPGQTGKIADYNYKLPDDFTGCVIAWNSNNLDSKVGGNYNYLYRLFRKSNLKPFERDISTEIYQAGSTPCNGVEGFNCYFPLQSYGFQPTNGVGYQPYRVVVLSFELLHAPATVCGPKKSTNLVKNKCVNFNFNGLTGTGVLTESNKKFLPFQQFGRDIADTTDAVRDPQTLEILDITPCSFGGVSVITPGTNTSNQVAVLYQDLNCTEVPVAIHADQLTPTWRVYSTGSNVFQTRAGCLIGAEHVNNSYECDIPIGAGICASYQTQTNSPRRARSVASQSIIAYTMSLGAENSVAYSNNSIAIPTNFTISVTTEILPVSMTKTSVDCTMYICGDSTECSNLLLQYGSFCTQLNRALTGIAVEQDKNTQEVFAQVKQIYKTPPIKDFGGFNFSQILPDPSKPSKRSFIEDLLFNKVTLADAGFIKQYGDCLGDIAARDLICAQKFNGLTVLPPLLTDEMIAQYTSALLAGTITSGWTFGAGAALQIPFAMQMAYRFNGIGVTQNVLYENQKLIANQFNSAIGKIQDSLSSTASALGKLQDVVNQNAQALNTLVKQLSSNFGAISSVLNDILSRLDPPEAEVQIDRLITGRLQSLQTYVTQQLIRAAEIRASANLAATKMSECVLGQSKRVDFCGKGYHLMSFPQSAPHGVVFLHVTYVFAQEKNFTTAPAICHDGKAHFPREGVFVSNGTHWFVTQRNFYEPQIITTDNTFVSGNCDVVIGIVNNTVYDPLQPELDSFKEELDKYFKNHTSPDVDLGDISGINASVVNIQKEIDRLNEVAKNLNESLIDLQELGKYEQYIKGGSGYIPEAPRDGQAYVRKDGEWVLLSTFL

SEQ ID NO: 5850 - protein, 1241 aa, Artificial Sequence
  SARS-CoV-2/Hong Kong/case42_VM20002493/2020__EPI_ISL_414527 spike protein (1-1211)(K986P_V987P_P1069F) Foldon construct
MFVFLVLLPLVSSQCVNLTTRTQLPPAYTNSFTRGVYYPDKVFRSSVLHSTQDLFLPFFSNVTWFHAIHVSGTNGTKRFDNPVLPFNDGVYFASTEKSNIIRGWIFGTTLDSKTQSLLIVNNATNVVIKVCEFQFCNDPFLGVYYHKNNKSWMESEFRVYSSANNCTFEYVSQPFLMDLEGKQGNFKNLREFVFKNIDGYFKIYSKHTPINLVRDLPQGFSALEPLVDLPIGINITRFQTLLALHRSYLTPGDSSSGWTAGAAAYYVGYLQPRTFLLKYNENGTITDAVDCALDPLSETKCTLKSFTVEKGIYQTSNFRVQPTESIVRFPNITNLCPFGEVFNATRFASVYAWNRKRISNCVADYSVLYNSASFSTFKCYGVSPTKLNDLCFTNVYADSFVIRGDEVRQIAPGQTGKIADYNYKLPDDFTGCVIAWNSNNLDSKVGGNYNYLYRLFRKSNLKPFERDISTEIYQAGSTPCNGVEGFNCYFPLQSYGFQPTNGVGYQPYRVVVLSFELLHAPATVCGPKKSTNLVKNKCVNFNFNGLTGTGVLTESNKKFLPFQQFGRDIADTTDAVRDPQTLEILDITPCSFGGVSVITPGTNTSNQVAVLYQDVNCTEVPVAIHADQLTPTWRVYSTGSNVFQTRAGCLIGAEHVNNSYECDIPIGAGICASYQTQTNSPRRARSVASQSIIAYTMSLGAENSVAYSNNSIAIPTNFAISVTTEILPVSMTKTSVDCTMYICGDSTECSNLLLQYGSFCTQLNRALTGIAVEQDKNTQEVFAQVKQIYKTPPIKDFGGFNFSQILPDPSKPSKRSFIEDLLFNKVTLADAGFIKQYGDCLGDIAARDLICAQKFNGLTVLPPLLTDEMIAQYTSALLAGTITSGWTFGAGAALQIPFAMQMAYRFNGIGVTQNVLYENQKLIANQFNSAIGKIQDSLSSTASALGKLQDVVNQNAQALNTLVKQLSSNFGAISSVLNDILSRLDPPEAEVQIDRLITGRLQSLQTYVTQQLIRAAEIRASANLAATKMSECVLGQSKRVDFCGKGYHLMSFPQSAPHGVVFLHVTYVFAQEKNFTTAPAICHDGKAHFPREGVFVSNGTHWFVTQRNFYEPQIITTDNTFVSGNCDVVIGIVNNTVYDPLQPELDSFKEELDKYFKNHTSPDVDLGDISGINASVVNIQKEIDRLNEVAKNLNESLIDLQELGKYEQYIKGGSGYIPEAPRDGQAYVRKDGEWVLLSTFL

SEQ ID NO: 5851 - protein, 1241 aa, Artificial Sequence
  SARS-CoV-2/USA/CruiseA-23/2020__EPI_ISL_414482 spike protein (1-1211)(K986P_V987P_P1069F) Foldon construct
MFVFLVLLPLVSSQCVNLTTRTQLPPAYTNSFTRGVYYPDKVFRSSVLHSTQDLFLPFFSNVTWFHAIHVSGTNGTKRFDNPVLPFNDGVYFASTEKSNIIRGWIFGTTLDSKTQSLLIVNNATNVVIKVCEFQFCNDPFLGVYYHKNNKSWMESEFRVYSSANNCTFEYVSQPFLMDLEVKQGNFKNLREFVFKNIDGYFKIYSKHTPINLVRDLPQGFSALEPLVDLPIGINITRFQTLLALHRSYLTPGDSSSGWTAGAAAYYVGYLQPRTFLLKYNENGTITDAVDCALDPLSETKCTLKSFTVEKGIYQTSNFRVQPTESIVRFPNITNLCPFGEVFNATRFASVYAWNRKRISNCVADYSVLYNSASFSTFKCYGVSPTKLNDLCFTNVYADSFVIRGDEVRQIAPGQTGKIADYNYKLPDDFTGCVIAWNSNNLDSKVGGNYNYLYRLFRKSNLKPFERDISTEIYQAGSTPCNGVEGFNCYFPLQSYGFQPTNGVGYQPYRVVVLSFELLHAPATVCGPKKSTNLVKNKCVNFNFNGLTGTGVLTESNKKFLPFQQFGRDIADTTDAVRDPQTLEILDITPCSFGGVSVITPGTNTSNQVAVLYQDVNCTEVPVAIHADQLTPTWRVYSTGSNVFQTRAGCLIGAEHVNNSYECDIPIGAGICASYQTQTNSPRRARSVASQSIIAYTMSLGAENSVAYSNNSIAIPTNFTISVTTEILPVSMTKTSVDCTMYICGDSTECSNLLLQYGSFCTQLNRALTGIAVEQDKNTQEVFAQVKQIYKTPPIKDFGGFNFSQILPDPSKPSKRSFIEDLLFNKVTLADAGFIKQYGDCLGDIAARDLICAQKFNGLTVLPPLLTDEMIAQYTSALLAGTITSGWTFGAGAALQIPFAMQMAYRFNGIGVTQNVLYENQKLIANQFNSAIGKIQDSLSSTASALGKLQDVVNQNAQALNTLVKQLSSNFGAISSVLNDILSRLDPPEAEVQIDRLITGRLQSLQTYVTQQLIRAAEIRASANLAATKMSECVLGQSKRVDFCGKGYHLMSFPQSAPHGVVFLHVTYVFAQEKNFTTAPAICHDGKAHFPREGVFVSNGTHWFVTQRNFYEPQIITTDNTFVSGNCDVVIGIVNNTVYDPLQPELDSFKEELDKYFKNHTSPDVDLGDISGINASVVNIQKEIDRLNEVAKNLNESLIDLQELGKYEQYIKGGSGYIPEAPRDGQAYVRKDGEWVLLSTFL

SEQ ID NO: 5852 - protein, 1241 aa, Artificial Sequence
  SARS-CoV-2/Hong Kong/case85_VM20002868/2020__EPI_ISL_414519 spike protein (1-1211)(K986P_V987P_P1069F) Foldon construct
MFVFLVLVPLVSSQCVNLTTRTQLPPAYTNSFTRGVYYPDKVFRSSVLHSTQDLFLPFFSNVTWFHAIHVSGTNGTKRFDNPVLPFNDGVYFASTEKSNIIRGWIFGTTLDSKTQSLLIVNNATNVVIKVCEFQFCNDPFLGVYYHKNNKSWMESEFRVYSSANNCTFEYVSQPFLMDLEGKQGNFKNLREFVFKNIDGYFKIYSKHTPINLVRDLPQGFSALEPLVDLPIGINITRFQTLLALHRSYLTPGDSSSGWTAGAAAYYVGYLQPRTFLLKYNENGTITDAVDCALDPLSETKCTLKSFTVEKGIYQTSNFRVQPTESIVRFPNITNLCPFGEVFNATRFASVYAWNRKRISNCVADYSVLYNSASFSTFKCYGVSPTKLNDLCFTNVYADSFVIRGDEVRQIAPGQTGKIADYNYKLPDDFTGCVIAWNSNNLDSKVGGNYNYLYRLFRKSNLKPFERDISTEIYQAGSTPCNGVEGFNCYFPLQSYGFQPTNGVGYQPYRVVVLSFELLHAPATVCGPKKSTNLVKNKCVNFNFNGLTGTGVLTESNKKFLPFQQFGRDIADTTDAVRDPQTLEILDITPCSFGGVSVITPGTNTSNQVAVLYQDVNCTEVPVAIHADQLTPTWRVYSTGSNVFQTRAGCLIGAEHVNNSYECDIPIGAGICASYQTQTNSPRRARSVASQSIIAYTMSLGAENSVAYSNNSIAIPTNFTISVTTEILPVSMTKTSVDCTMYICGDSTECSNLLLQYGSFCTQLNRALTGIAVEQDKNTQEVFAQVKQIYKTPPIKDFGGFNFSQILPDPSKPSKRSFIEDLLFNKVTLADAGFIKQYGDCLGDIAARDLICAQKFNGLTVLPPLLTDEMIAQYTSALLAGTITSGWTFGAGAALQIPFAMQMAYRFNGIGVTQNVLYENQKLIANQFNSAIGKIQDSLSSTASALGKLQDVVNQNAQALNTLVKQLSSNFGAISSVLNDILSRLDPPEAEVQIDRLITGRLQSLQTYVTQQLIRAAEIRASANLAATKMSECVLGQSKRVDFCGKGYHLMSFPQSAPHGVVFLHVTYVFAQEKNFTTAPAICHDGKAHFPREGVFVSNGTHWFVTQRNFYEPQIITTDNTFVSGNCDVVIGIVNNTVYDPLQPELDSFKEELDKYFKNHTSPDVDLGDISGINASVVNIQKEIDRLNEVAKNLNESLIDLQELGKYEQYIKGGSGYIPEAPRDGQAYVRKDGEWVLLSTFL

SEQ ID NO: 5853 - protein, 1241 aa, Artificial Sequence; identical to SEQ ID NO: 5843
  SARS-CoV-2/England/200990660/2020__EPI_ISL_414523 spike protein (1-1211)(K986P_V987P_P1069F) Foldon construct

SEQ ID NO: 5854 - protein, 1241 aa, Artificial Sequence
  SARS-CoV-2/Australia/NSW09/2020__EPI_ISL_413595 spike protein (1-1211)(K986P_V987P_P1069F) Foldon construct
MFVFLVLLPLVSSQCVNLTTRTQLPPAYTNSFTRGVYYPDKVFRSSVLHSTQDLFLPFFSNVTWFHAIHVSGTNGTKRFDNPVLPFNDGVYFASTEKSNIIRGWIFGTTLDSKTQSLLIVNNATNVVIKVCEFQFCNDPFLGVYYHKNNKSWMESEFRVYSSANNCTFEYVSQPFLMDLEGKQGNFKNLREFVFKNIDGYFKIYSKHTPINLVRDLPQGFSALEPLVDLPIGINITRFQTLLALHRSYLTPGDSSSGWTAGAAAYYVGYLQPRTFLLKYNENGTITDAVDCALDPLSETKCTLKSFTVEKGIYQTSNFRVQPTESIVRFPNITNLCPFGEVFNATRFASVYAWNRKRISNCVADYSVLYNSASFSTFKCYGVSPTKLNDLCFTNVYADSFVIRGDEVRQIAPGQTGKIADYNYKLPDDFTGCVIAWNSNNLDSKVGGNYNYLYRLFRKSNLKPFERDISTEIYQAGSTPCNGVEGFNCYFPLQSYGFQPTNGVGYQPYRVVVLSFELLHAPATVCGPKKSTNLVKNKCVNFNFNGLTGTGVLTESNKKFLPFQQFGRDIADTTDAVRDPQTLEILDITPCSFGGVSVITPGTNTSNQVAVLYQDVNCTEVPVAIHADQLTPTWRVYSTGSNVFQTRAGCLIGAEHVNNSYECDIPIGAGICASYQTQTNSPRRARSVASQSIIAYTMSLGAENSVAYSNNSIAIPTNFTISVTTEILPVSMTKTSVDCTMYICGDSTECSNLLLQYGSFCTQLNRALTGIAVEQDKNTQEVFAQVKQIYKTPPIKDFGGFNFSQILPDPSKPSKRSFIEDLLFNKVTLADAGFIKQYGDCLGDIAARDLICAQKFNGLTVLPPLLTDEMIAQYTSALLAGTITSGWTFGAGAALQIPFAMQMAYRFNGIGVTQNVLYENQKLIANQFNSAIGKIQDSLSFTASALGKLQDVVNQNAQALNTLVKQLSSNFGAISSVLNDILSRLDPPEAEVQIDRLITGRLQSLQTYVTQQLIRAAEIRASANLAATKMSECVLGQSKRVDFCGKGYHLMSFPQSAPHGVVFLHVTYVFAQEKNFTTAPAICHDGKAHFPREGVFVSNGTHWFVTQRNFYEPQIITTDNTFVSGNCDVVIGIVNNTVYDPLQPELDSFKEELDKYFKNHTSPDVDLGDISGINASVVNIQKEIDRLNEVAKNLNESLIDLQELGKYEQYIKGGSGYIPEAPRDGQAYVRKDGEWVLLSTFL

SEQ ID NO: 5855 - protein, 1241 aa, Artificial Sequence; identical to SEQ ID NO: 5835
  SARS-CoV-2/Australia/NSW10/2020__EPI_ISL_413596 spike protein (1-1211)(K986P_V987P_P1069F) Foldon construct

SEQ ID NO: 5856 - protein, 1241 aa, Artificial Sequence
  SARS-CoV-2/Switzerland/1000477797/2020__EPI_ISL_413023 spike protein (1-1211)(K986P_V987P_P1069F) Foldon construct
MFVFLVLLPLVSSQCVNLTTRTQLPPAYTNSFTRGVYYPDKVFRSSVLHSTQDLFLPFFSNVTWFHAIHVSGTNGTKRFDNPVLPFNDGVYFASTEKSNIIRGWIFGTTLDSKTQSLLIVNNATNVVIKVCEFQFCNDPFLGVYYHKNNKSWMESEFRVYSSANNCTFEYVSQPFLMDLEGKQGNFKNLREFVFKNIDGYFNIYSKHTPINLVRDLPQGFSALEPLVDLPIGINITRFQTLLALHRSYLTPGDSSSGWTAGAAAYYVGYLQPRTFLLKYNENGTITDAVDCALDPLSETKCTLKSFTVEKGIYQTSNFRVQPTESIVRFPNITNLCPFGEVFNATRFASVYAWNRKRISNCVADYSVLYNSASFSTFKCYGVSPTKLNDLCFTNVYADSFVIRGDEVRQIAPGQTGKIADYNYKLPDDFTGCVIAWNSNNLDSKVGGNYNYLYRLFRKSNLKPFERDISTEIYQAGSTPCNGVEGFNCYFPLQSYGFQPTNGVGYQPYRVVVLSFELLHAPATVCGPKKSTNLVKNKCVNFNFNGLTGTGVLTESNKKFLPFQQFGRDIADTTDAVRDPQTLEILDITPCSFGGVSVITPGTNTSNQVAVLYQGVNCTEVPVAIHADQLTPTWRVYSTGSNVFQTRAGCLIGAEHVNNSYECDIPIGAGICASYQTQTNSPRRARSVASQSIIAYTMSLGAENSVAYSNNSIAIPTNFTISVTTEILPVSMTKTSVDCTMYICGDSTECSNLLLQYGSFCTQLNRALTGIAVEQDKNTQEVFAQVKQIYKTPPIKDFGGFNFSQILPDPSKPSKRSFIEDLLFNKVTLADAGFIKQYGDCLGDIAARDLICAQKFNGLTVLPPLLTDEMIAQYTSALLAGTITSGWTFGAGAALQIPFAMQMAYRFNGIGVTQNVLYENQKLIANQFNSAIGKIQDSLSSTASALGKLQDVVNQNAQALNTLVKQLSSNFGAISSVLNDILSRLDPPEAEVQIDRLITGRLQSLQTYVTQQLIRAAEIRASANLAATKMSECVLGQSKRVDFCGKGYHLMSFPQSAPHGVVFLHVTYVFAQEKNFTTAPAICHDGKAHFPREGVFVSNGTHWFVTQRNFYEPQIITTDNTFVSGNCDVVIGIVNNTVYDPLQPELDSFKEELDKYFKNHTSPDVDLGDISGINASVVNIQKEIDRLNEVAKNLNESLIDLQELGKYEQYIKGGSGYIPEAPRDGQAYVRKDGEWVLLSTFL

SEQ ID NO: 5857 - protein, 1241 aa, Artificial Sequence
  SARS-CoV-2/Belgium/BA-02291/2020__EPI_ISL_415159 spike protein (1-1211)(K986P_V987P_P1069F) Foldon construct
MFVFLVLLPLVSSQCVNLTTRTQLPPAYTNSFTRGVYYPDKVFRSSVLHSTQDLFLPFFSNVTWFHAIHVSGTNGTKRFDNPVLPFNDGVYFASTEKSNIIRGWIFGTTLDSKTQSLLIVNNATNVVIKVCEFQFCNDPFLGVYYHKNNKSWMESEFRVYSSANNCTFEYVSQPFLMDLEGKQGNFKNLREFVFKNIDGYFKIYSKHTPINLVRDLPQGFSALEPLVDLPIGINITRFQTLLALHRSYLTPGDSSSGWTAGAAAYYVGYLQPRTFLLKYNENGTITDAVDCALDPLSETKCTLKSFTVEKGIYQTSNFRVQPTESIVRFPNITNLCPFGEVFNATRFASVYAWNRKRISNCVADYSVLYNSASFSTFKCYGVSPTKLNDLCFTNVYADSFVIRGDEVRQIAPGQTGKIADYNYKLPDDFTGCVIAWNSNNLDSKVGGNYNYLYRLFRRSNLKPFERDISTEIYQAGSTPCNGVEGFNCYFPLQSYGFQPTNGVGYQPYRVVVLSFELLPAPATVCGPKKSTNLVKNKCVNFNFNGLTGTGVLTESNKKFLPFQQFGRDIADTTDAVRDPQTLEILDITPCSFGGVSVITPGTNTSNQVAVLYQGVNCTEVPVAIHADQLTPTWRVYSTGSNVFQTRAGCLIGAEHVNNSYECDIPIGAGICASYQTQTNSPRRARSVASQSIIAYTMSLGAENSVAYSNNSIAIPTNFTISVTTEILPVSMTKTSVDCTMYICGDSTECSNLLLQYGSFCTQLNRALTGIAVEQDKNTQEVFAQVKQIYKTPPIKDFGGFNFSQILPDPSKPSKRSFIEDLLFNKVTLADAGFIKQYGDCLGDIAARDLICAQKFNGLTVLPPLLTDEMIAQYTSALLAGTITSGWTFGAGAALQIPFAMQMAYRFNGIGVTQNVLYENQKLIANQFNSAIGKIQDSLSSAAPALGKLQDVVNQNAQALNTLVKQLSSNFGAISSVLNDILSRLDPPEAEVQIDRLITGRLQSLQTYVTQQLIRAAEIRASANLAATKMSECVLGQSKRVDFCGKGYHLMSFPQSAPHGVVFLHVTYVFAQEKNFTTAPAICHDGKAHFPREGVFVSNGTHWFVTQRNFYEPQIITTDNTFVSGNCDVVIGIVNNTVYDPLQPELDSFKEELDKYFKNHTSPDVDLGDISGINASVVNIQKEIDRLNEVAKNLNESLIDLQELGKYEQYIKGGSGYIPEAPRDGQAYVRKDGEWVLLSTFL

SEQ ID NO: 5858 - protein, 1241 aa, Artificial Sequence
  SARS-CoV-2/USA/WA8-UW5/2020__EPI_ISL_413486 spike protein (1-1211)(K986P_V987P_P1069F) Foldon construct
MFVFLVLLPLVSSQCVNLTTRTQLPPAYTNSFTRGVYYPDKVFRSSVLHSTQDLFLPFFSNVTWFHAIHVSGTNGTKRFDNPVLPFNDGVYFASTEKSNIIRGWIFGTTLDSKTQSLLIVNNATNVVIKVCEFQFCNDPFLGVYYHKNNKSWMESEFRVYSSANNCTFEYVSQPFLMDLEGKQGNFKNLREFVFKNIDGYFKIYSKHTPINLVRDLPQGFSALEPLVDLPIGINITRFQTLLALHRSYLTPGDSSSGWTAGAAAYYVGYLQPRTFLLKYNENGTITDAVDCALDPLSETKCTLKSFTVEKGIYQTSNFRVQPTESIVRFPNITNLCPFGEVFNATRFASVYAWNRKRISNCVADYSVLYNSASFSTFKCYGVSPTKLNDLCFTNVYADSFVIRGDEVRQIAPGQTGKIADYNYKLPDDFTGCVIAWNSNNLDSKVGGNYNYLYRLFRKSNLKPFERDISTEIYQAGSTPCNGVEGFNCYFPLQSYGFQPTNGVGYQPYRVVVLSFELLHAPATVCGPKKSTNLVKNKCVNFNFNGLTGTGVLTESNKKFLPFQQFGRDIADTTDAVRDPQTLEILDITPCSFGGVSVITPGTNTSNQVAVLYQDVNCTEVPVAIHADQLTPTWRVYSTGSNVFQTRAGCLIGAEYVNNSYECDIPIGAGICASYQTQTNSPRRARSVASQSIIAYTMSLGAENSVAYSNNSIAIPTNFTISVTTEILPVSMTKTSVDCTMYICGDSTECSNLLLQYGSFCTQLNRALTGIAVEQDKNTQEVFAQVKQIYKTPPIKDFGGFNFSQILPDPSKPSKRSFIEDLLFNKVTLADAGFIKQYGDCLGDIAARDLICAQKFNGLTVLPPLLTDEMIAQYTSALLAGTITSGWTFGAGAALQIPFAMQMAYRFNGIGVTQNVLYENQKLIANQFNSAIGKIQDSLSSTASALGKLQDVVNQNAQALNTLVKQLSSNFGAISSVLNDILSRLDPPEAEVQIDRLITGRLQSLQTYVTQQLIRAAEIRASANLAATKMSECVLGQSKRVDFCGKGYHLMSFPQSAPHGVVFLHVTYVFAQEKNFTTAPAICHDGKAHFPREGVFVSNGTHWFVTQRNFYEPQIITTDNTFVSGNCDVVIGIVNNTVYDPLQPELDSFKEELDKYFKNHTSPDVDLGDISGINASVVNIQKEIDRLNEVAKNLNESLIDLQELGKYEQYIKGGSGYIPEAPRDGQAYVRKDGEWVLLSTFL

SEQ ID NO: 5859 - protein, 1241 aa, Artificial Sequence
  SARS-CoV-2/England/20102000506/2020__EPI_ISL_415147 spike protein (1-1211)(K986P_V987P_P1069F) Foldon construct
MFVFLVLLPLVSSQCVNLTTRTQLPPAYTNSFTRGVYYPDKVFRSSVLHSTQDLFLPFFSNVTWFHAIHVSGTNGTKRFDNPVLPFNDGVYFASTEKSNIIRGWIFGTTLDSKTQSLLIVNNATNVVIKVCEFQFCNDPFLGVYYHKNNKSWMESEFRVYSSANNCTFEYVSQPFLMDLEGKQGNFKNLREFVFKNIDGYFKIYSKHTPINLVRDLPQGFSALEPLVDLPIGINITRFQTLLALHRSYLTPGDSSSGWTAGAAAYYVGYLQPRTFLLKYNENGTITDAVDCALDPLSETKCTLKSFTVEKGIYQTSNFRVQPTESIVRFPNITNLCPFGEVFNATRFASVYAWNRKRISNCVADYSVLYNSASFSTFKCYGVSPTKLNDLCFTNVYADSFVIRGDEVRQIAPGQTGKIADYNYKLPDDFTGCVIAWNSNNLDSKVGGNYNYLYRLFRKSNLKPFERDISTEIYQAGSTPCNGVEGFNCYFPLQSYGFQPTNGVGYQPYRVVVLSFELLHAPATVCGPKKSTNLVKNKCVNFNFNGLTGTGVLTESNKKFLPFQQFGRDIADTTDAVRDPQTLEILDITPCSFGGVSVITPGTNTSNQVAVLYQGVNCTEVPVAIHADQLTPTWRVYSTGSNVFQTRAGCLIGAEHVNNSYECDIPIGAGICASYQTQTNSPRRARSVASQSIIAYTMSLGAENSVAYSNNSIAIPTNFTISVTTEILPVSMTKTSVDCTMYICGDSTECSNLLLQYGSFCTQLNRALTGIAVEQDKNTQEVFAQVKQIYKTPPIKDFGGFNFSQILPDPSKPSKRSFIEDLLFNKVTLADAGFIKQYGYCLGDIAARDLICAQKFNGLTVLPPLLTDEMIAQYTSALLAGTITSGWTFGAGAALQIPFAMQMAYRFNGIGVTQNVLYENQKLIANQFNSAIGKIQDSLSSTASALGKLQDVVNQNAQALNTLVKQLSSNFGAISSVLNDILSRLDPPEAEVQIDRLITGRLQSLQTYVTQQLIRAAEIRASANLAATKMSECVLGQSKRVDFCGKGYHLMSFPQSAPHGVVFLHVTYVFAQEKNFTTAPAICHDGKAHFPREGVFVSNGTHWFVTQRNFYEPQIITTDNTFVSGNCDVVIGIVNNTVYDPLQPELDSFKEELDKYFKNHTSPDVDLGDISGINASVVNIQKEIDRLNEVAKNLNESLIDLQELGKYEQYIKGGSGYIPEAPRDGQAYVRKDGEWVLLSTFL

SEQ ID NO: 5860 - protein, 1241 aa, Artificial Sequence
  SARS-CoV-2/Belgium/VAG-03013/2020__EPI_ISL_415155 spike protein (1-1211)(K986P_V987P_P1069F) Foldon construct
MFVFLVLLPLVSSQCVNLTTRTQLPPAYTNSFTRGVYYPDKVFRSSVLHSTQDLFLPFFSNVTWFHAIHVSGTNGTKRFDNPVLPFNDGVYFASTEKSNIIRGWIFGTTLDSKTQSLLIVNNATNVVIKVCEFQFCNDPFLGVYYHKNNKSWMESEFRVYSSANNCTFEYVSQPFLMDLEGKQGNFKNLREFVFKNIDGYFKIYSKHTPINLVRDLPQGFSALEPLVDLPIGINITRFQTLLALHRSYLTPGDSSSGWTAGAAAYYVGYLQPRTFLLKYNENGTITDAVDCALDPLSETKCTLKSFTVEKGIYQTSNFRVQPTESIVRFPNITNLCPFGEVFNATRFASVYAWNRKRISNCVADYSVLYNSASFSTFKCYGVSPTKLNDLCFTNVYADSFVIRGDEVRQIAPGQTGKIADYNYKLPDDFTGCVIAWNSNNLDSKVGGNYNYLYRLFRKSNLKPFERDISTEIYQAGSTPCNGVEGFNCYFPLQSYGFQPTNGVGYQPYRVVVLSFELLHAPATVCGPKKSTNLVKNKCVNFNFNGLTGTGVLTESNKKFLPFQQFGRDIADTTDAVRDPQTLEILDITPCSFGGVSVITPGTNTSNQVAVLYQGVNCTEVPVAIHADQLTPTWRVYSTGSNVFQTRAGCLIGAEHVNNSYECDIPIGAGICASYQTQTNSPRRARSVASQSIIAYTMSLGAENSVAYSNNSIAIPTNFTISVTTEILPVSMTKTSVDCTMYICGDSTECSNLLLQYGSFCTQLNRALTGIAVEQDKNTQEVFAQVKQIYKTPPIKDFGGFNFSQILPDPSKPSKRSFIEDLLFNKVTLADAGFIKQYGDCLGDIAARDLICAQKFNGLTVLPPLLTDEMIAQYTSALLAGTITSGWTFGAGAALQIPFAMQMAYRFNGIGVTQNVLYENQKLIANQFNSAIGKIQDSLSSTATALGKLQDVVNQNAQALNTLVKQLSSNFGAISSVLNDILSRLDPPEAEVQIDRLITGRLQSLQTYVTQQLIRAAEIRASANLAATKMSECVLGQSKRVDFCGKGYHLMSFPQSAPHGVVFLHVTYVFAQEKNFTTAPAICHDGKAHFPREGVFVSNGTHWFVTQRNFYEPQIITTDNTFVSGNCDVVIGIVNNTVYDPLQPELDSFKEELDKYFKNHTSPDVDLGDISGINASVVNIQKEIDRLNEVAKNLNESLIDLQELGKYEQYIKGGSGYIPEAPRDGQAYVRKDGEWVLLSTFL

SEQ ID NO: 5861 - protein, 1241 aa, Artificial Sequence
  SARS-CoV-2/Belgium/BC-03016/2020__EPI_ISL_415157 spike protein (1-1211)(K986P_V987P_P1069F) Foldon construct
MFVFLVLLPLVSSQCVNLTTRTQLPPAYTNSFTRGVYYPDKVFRSSVLHSTQDLFLPFFSNVTWFHAIHVSGTNGTKRFDNPVLPFNDGVYFASTEKSNIIRGWIFGTTLDSKTQSLLIVNNATNVVIKVCEFQFCNDPFLGVYYHKNNKSWMESEFRVYSSANNCTFEYVSQPFLMDLEGKQGNFKNLREFVFKNIDGYFKIYSKHTPINLVRDLPQGFSALEPLVDLPIGINITRFQTLLALHRSYLTPGDSSSGWTAGAAAYYVGYLQPRTFLLKYNENGTITDAVDCALDPLSETKCTLKSFTVEKGIYQTSNFRVQPTESIVRFPNITNLCPFGEVFNATRFASVYAWNRKRISNCVADYSVLYNSASFSTFKCYGVSPTKLNDLCFTNVYADSFVIRGDEVRQIAPGQTGKIADYNYKLPDDFTGCVIAWNSNNLDSKVGGNYNYLYRLFRKSNLKPFERDISTEIYQAGSTPCNGVEGFNCYFPLQSYGFQPTNGVGYQPYRVVVLSFELLHAPATVCGPKKSTNLVKNKCVNFNFNGLTGTGVLTESNKKFLPFQQFGRDIADTTDAVRDPQTLEILDITPCSFGGVSVITPGTNTSNQVAVLYQGVNCTEVPVAIHADQLTPTWRVYSTGSNVFQTRAGCLIGAEHVNNSYECDIPIGAGICASYQTQTNSPRRARSVASQSIIAYTMSLGAENSVAYSNNSIAIPTNFTISVTTEILPVSMTKTSVDCTMYICGDSTECSNLLLQYGSFCTQLNRALTGIAVEQDKNTQEVFAQVKQIYKTPPIKDFGGFNFSQILPDPSKPSKRSFIEDLLFNKVTLADAGFIKQYGDCLGDIAARDLICAQKFNGLTVLPPLLTDEMIAQYTSALLAGTITSGWTFGAGAALQIPFAMQMAYRFNGIGVTQNVLYENQKLIANQFNSAIGKIQDSLSSTAPALGKLQDVVNQNAQALNTLVKQLSSNFGAISSVLNDILSRLDPPEAEVQIDRLITGRLQSLQTYVTQQLIRAAEIRASANLAATKMSECVLGQSKRVDFCGKGYHLMSFPQSAPHGVVFLHVTYVFAQEKNFTTAPAICHDGKAHFPREGVFVSNGTHWFVTQRNFYEPQIITTDNTFVSGNCDVVIGIVNNTVYDPLQPELDSFKEELDKYFKNHTSPDVDLGDISGINASVVNIQKEIDRLNEVAKNLNESLIDLQELGKYEQYIKGGSGYIPEAPRDGQAYVRKDGEWVLLSTFL

SEQ ID NO: 5862 - protein, 1241 aa, Artificial Sequence
  SARS-CoV-2/Germany/BavPat3/2020__EPI_ISL_414521 spike protein (1-1211)(K986P_V987P_P1069F) Foldon construct
MFVFLVLLPLVSSQCVNLTTRTQLPPAYTNSFTRGVYYPDKVFRSSVLHSTQDLFLPFFSNVTWFHAIHVSGTNGTKRFDNPVLPFNDGVYFASTEKSNIIRGWIFGTTLDSKTQSLLIVNNATNVVIKVCEFQFCNDPFLGVYYHKNNKSWMESEFRVYSSANNCTFEYVSQPFLMDLEGKQGNFKNLREFVFKNIDGYFKIYSKHTPINLVRDLPQGFSALEPLVDLPIGINITRFQTLLALHRSYLTPGDSSSGWTAGAAAYYVGYLQPRTFLLKYNENGTITDAVDCALDPLSETKCTLKSFTVEKGIYQTSNFRVQPTESIVRFPNITNLCPFGEVFNATRFASVYAWNRKRISNCVADYSVLYNSASFSTFKCYGVSPTKLNDLCFTNVYADSFVIRGDEVRQIAPGQTGKIADYNYKLPDDFTGCVIAWNSNNLDSKVGGNYNYLYRLFRKSNLKPFERDISTEIYQAGSTPCNGVEGFNCYFPLQSYGFQPTNGVGYQPYRVVVLSFELLHAPATVCGPKKSTNLVKNKCVNFNFNGLTGTGVLTESNKKFLPFQQFGRDIADTTDAVRDPQTLEILDITPCSFGGVSVITPGTNTSNQVAVLYQDVNCTEVPVAIHADQLTPTWRVYSTGSNVFQTRAGCLIGAEHVNNSYECDIPIGAGICASYQTQTNSPRRARSVASQSIIAYTMSLGAENSVAYSNNSIAIPTNFTISVTTEILPVSMTKTSVDCTMYICGDSTECSNLLLQYGSFCTQLNRALTGIAVEQDKNTQQVFAQVKQIYKTPPIKDFGGFNFSQILPDPSKPSKRSFIEDLLFNKVTLADAGFIKQYGDCLGDIAARDLICAQKFNGLTVLPPLLTDEMIAQYTSALLAGTITSGWTFGAGAALQIPFAMQMAYRFNGIGVTQNVLYENQKLIANQFNSAIGKIQDSLSSTASALGKLQDVVNQNAQALNTLVKQLSSNFGAISSVLNDILSRLDPPEAEVQIDRLITGRLQSLQTYVTQQLIRAAEIRASANLAATKMSECVLGQSKRVDFCGKGYHLMSFPQSAPHGVVFLHVTYVFAQEKNFTTAPAICHDGKAHFPREGVFVSNGTHWFVTQRNFYEPQIITTDNTFVSGNCDVVIGIVNNTVYDPLQPELDSFKEELDKYFKNHTSPDVDLGDISGINASVVNIQKEIDRLNEVAKNLNESLIDLQELGKYEQYIKGGSGYIPEAPRDGQAYVRKDGEWVLLSTFL

SEQ ID NO: 5863 - protein, 1241 aa, Artificial Sequence
  SARS-CoV-2/France/HF1805/2020__EPI_ISL_414628 spike protein (1-1211)(K986P_V987P_P1069F) Foldon construct
MFVFLVLLPLVSSQCVNLTTRTQLPPAYTNSFTRGVYYPDKVFRSSVLHSTQDLFLPFFSNVTWFHAIHVSGTNGTKRFDNPVLPFNDGVYFASTEKSNIIRGWIFGTTLDSKTQSLLIVNNATNVVIKVCEFQFCNDPFLGVYYHKNNKSWMESEFRVYSSANNCTFEYVSQPFLMDLEGKQGNFKNLREFVFKNIDGYFKIYSKHTPINLVRDLPQGFSALEPLVDLPIGINITRFQTLLALHRSYLTPGDSSSGWTAGAAAYYVGYLQPRTFLLKYNENGTITDAVDCALDPLSETKCTLKSFTVEKGIYQTSNFRVQPTESIVRFPNITNLCPFGEVFNATRFASVYAWNRKRISNCVADYSVLYNSASFSTFKCYGVSPTKLNDLCFTNVYADSFVIRGDEVRQIAPGQTGKIADYNYKLPDDFTGCVIAWNSNNLDSKVGGNYNYLYRLFRKSNLKPFERDISTEIYQAGSTPCNGVEGFNCYFPLQSYGFQPTNGVGYQPYRVVVLSFELLHAPATVCGPKKSTNLVKNKCVNFNFNGLTGTGVLTESNKKFLPFQQFGRDIADTTDAVRDPQTLEILDITPCSFGGVSVITPGTNTSNQVAVLYQGVNCTEVPVAIHADQLTPTWRVYSTGSNVFQTRAGCLIGAEHVNNSYECDIPIGAGICASYQTQTNSPRRARSVASQSIIAYTMSLGAENSVAYSNNSIAIPTNFTISVTTEILPVSMTKTSVDCTMYICGDSTECSNLLLQYGSFCTQLNRALTGIAVEQDKNTQEVFAQVKQIYKTPPIKDFGGFNFSQILPDPSKPSKRSFIEDLLFNKVTLADAGFIKQYGDCLGDIAARDLICAQKFNGLTVLPPLLTDEMIAQYTSALLAGTITSGWTFGAGAALQIPFAMQMAYRFNGIGVTQNVLYENQKLIANQFNSAIGKIQDSLSSTASALGKLQDVVNQNAQALNTLVKQLSSNFGAISSVLNDILSRLDPPEAEVQIDRLITGRLQSLQTYVTQQLIRAAEIRASANLAATKMSECVLGQSKRVDFCGKGYHLMSFPQSAPHGVVFLHVTYVFAQEKNFTTAPAICHDGKAHFPREGVFVSNGTHWFVTQRNFYEPQIITTDNTFVSGNCDVVIGVVNNTVYDPLQPELDSFKEELDKYFKNHTSPDVDLGDISGINASVVNIQKEIDRLNEVAKNLNESLIDLQELGKYEQYIKGGSGYIPEAPRDGQAYVRKDGEWVLLSTFL

SEQ ID NO: 5864 - protein, 1241 aa, Artificial Sequence
  SARS-CoV-2/Netherlands/ZuidHolland_9/2020__EPI_ISL_414445 spike protein (1-1211)(K986P_V987P_P1069F) Foldon construct
MFVFLVLLPLVSSQCVNLTTRTQLPPAYTNSFTRGVYYPDKVFRSSVLHSTQDLFLPFFSNVTWFHAIHVSGTNGTKRFDNPVLPFNDGVYFASTEKSNIIRGWIFGTTLDSKTQSLLIVNNATNVVIKVCEFQFCNDPFLGVYYHKNNKSWMESEFRVYSSANNCTFEYVSQPFLMDLEGKQGNFKNLREFVFKNIDGYFKIYSKHTPINLVRDLPQGFSALEPLVDLPIGINITRFQTLLALHRSYLTPGDSSSGWTAGAAAYYVGYLQPRTFLLKYNENGTITDAVDCALDPLSETKCTLKSFTVEKGIYQTSNFRVQPTESIVRFPNITNLCPFGEVFNATRFASVYAWNRKRISNCVADYSVLYNSASFSTFKCYGVSPTKLNDLCFTNVYADSFVIRGDEVRQIAPGQTGKIADYNYKLPDDFTGCVIAWNSNNLDSKVGGNYNYLYRLFRKSNLKPFERDISTEIYQAGSTPCNGVEGFNCYFPLQSYGFQPTNGVGYQPYRVVVLSFELLHAPATVCGPKKSTNLVKNKCVNFNFNGLTGTGVLTESNKKFLPFQQFGRDIADTTDAVRDPQTLEILDITPCSFGGVSVITPGTNTSNQVAVLYQGVNCTEVPVAIHADQLTPTWRVYSTGSNVFQTRAGCLIGAEHVNNSYECDIPIGAGICASYQTQTNSPRRARSVASQSIIAYTMSLGAENSVAYSNNSIAIPTNFTISVTTEILPVSMTKTSVDCTMYICGDSTECSNLLLQYGSFCTQLNRALTGIAVEQDKNTQEVFAQVKQIYKTPPIKDFGGFNFSQILPDPSKPSKRSFIEDLLFNKVTLADAGFIKQYGDCLGDIAARDLICVQKFNGLTVLPPLLTDEMIAQYTSALLAGTITSGWTFGAGAALQIPFAMQMAYRFNGIGVTQNVLYENQKLIANQFNSAIGKIQDSLSSTASALGKLQDVVNQNAQALNTLVKQLSSNFGAISSVLNDILSRLDPPEAEVQIDRLITGRLQSLQTYVTQQLIRAAEIRASANLAATKMSECVLGQSKRVDFCGKGYHLMSFPQSAPHGVVFLHVTYVFAQEKNFTTAPAICHDGKAHFPREGVFVSNGTHWFVTQRNFYEPQIITTDNTFVSGNCDVVIGIVNNTVYDPLQPELDSFKEELDKYFKNHTSPDVDLGDISGINASVVNIQKEIDRLNEVAKNLNESLIDLQELGKYEQYIKGGSGYIPEAPRDGQAYVRKDGEWVLLSTFL

SEQ ID NO: 5865 - protein, 1241 aa, Artificial Sequence
  SARS-CoV-2/Finland/FIN03032020A/2020__EPI_ISL_413602 spike protein (1-1211)(K986P_V987P_P1069F) Foldon construct
MFVFLVLLPLVSSQCVNLTTRTQLPPAYTNSFTRGVYYPDKVFRSSVLHSTQDLFLPFFSNVTWFHAIHVSGTNGTKRFDNPVLPFNDGVYFASTEKSNIIRGWIFGTTLDSKTQSLLIVNNATNVVIKVCEFQFCNDPFLGVYYHKNNKSWMESEFRVYSSANNCTFEYVSQPFLMDLEGKQGNFKNLREFVFKNIDGYFKIYSKHTPINLVRDLPQGFSALEPLVDLPIGINITRFQTLLALHRSYLTPGDSSSGWTAGAAAYYVGYLQPRTFLLKYNENGTITDAVDCALDPLSETKCTLKSFTVEKGIYQTSNFRVQPTESIVRFPNITNLCPFGEVFNATRFASVYAWNRKRISNCVADYSVLYNSASFSTFKCYGVSPTKLNDLCFTNVYADSFVIRGDEVRQIAPGQTGKIADYNYKLPDDFTGCVISWNSNNLDSKVGGNYNYLYRLFRKSNLKPFERDISTEIYQAGSTPCNGVEGFNCYFPLQSYGFQPTNGVGYQPYRVVVLSFELLHAPATVCGPKKSTNLVKNKCVNFNFNGLTGTGVLTESNKKFLPFQQFGRDIADTTDAVRDPQTLEILDITPCSFGGVSVITPGTNTSNQVAVLYQGVNCTEVPVAIHADQLTPTWRVYSTGSNVFQTRAGCLIGAEHVNNSYECDIPIGAGICASYQTQTNSPRRARSVASQSIIAYTMSLGAENSVAYSNNSIAIPTNFTISVTTEILPVSMTKTSVDCTMYICGDSTECSNLLLQYGSFCTQLNRALTGIAVEQDKNTQEVFAQVKQIYKTPPIKDFGGFNFSQILPDPSKPSKRSFIEDLLFNKVTLADAGFIKQYGDCLGDIAARDLICAQKFNGLTVLPPLLTDEMIAQYTSALLAGTITSGWTFGAGAALQIPFAMQMAYRFNGIGVTQNVLYENQKLIANQFNSAIGKIQDSLSSTASALGKLQDVVNQNAQALNTLVKQLSSNFGAISSVLNDILSRLDPPEAEVQIDRLITGRLQSLQTYVTQQLIRAAEIRASANLAATKMSECVLGQSKRVDFCGKGYHLMSFPQSAPHGVVFLHVTYVFAQEKNFTTAPAICHDGKAHFPREGVFVSNGTHWFVTQRNFYEPQIITTDNTFVSGNCDVVIGIVNNTVYDPLQPELDSFKEELDKYFKNHTSPDVDLGDISGINASVVNIQKEIDRLNEVAKNLNESLIDLQELGKYEQYIKGGSGYIPEAPRDGQAYVRKDGEWVLLSTFL

SEQ ID NO: 5866 - protein, 1241 aa, Artificial Sequence
  SARS-CoV-2/France/GE1977/2020__EPI_ISL_414632 spike protein (1-1211)(K986P_V987P_P1069F) Foldon construct
MFVFLVLLPLVSSQCVNLTTRTQLPPAYTNSFTRGVYYPDKVFRSSVLHSTQDLFLPFFSNVTWFHAIHVSGTNGTKRFDNPVLPFNDGVYFASTEKSNIIRGWIFGTTLDSKTQSLLIVNNATNVVIKVCEFQFCNDPFLGVYYHKNNKSWMESEFRVYSSANNCTFEYVSQPFLMDLEGKQGNFKNLREFVFKNIDGYFKIYSKHTPINLVRDLPQGFSALEPLVDLPIGINITRFQTLLALHRSYLTPGDSSSGWTAGAAAYYVGYLQPRTFLLKYNENGTITDAVDCALDPLSETKCTLKSFTVEKGIYQTSNFRVQPTESIVRFPNITNLCPFGEVFNATRFASVYAWNRKRISNCVADYSVLYNSASFSTFKCYGVSPTKLNDLCFTNVYADSFVIRGDEVRQIAPGQTGKIADYNYKLPDDFTGCVIAWNSNNLDSKVGGNYNYLYRLFRKSNLKPFERDISTEIYQAGSTPCNGVEGFNCYFPLQSYGFQPTNGVGYQPYRVVVLSFELLHAPATVCGPKKSTNLVKNKCVNFNFNGLTGTGVLTESNKKFLPFQQFGRDIADTTDAVRDPQTLEILDITPCSFGGVSVITPGTNTSNQVAVLYQGVNCTEVPVAIHADQLTPTWRVYSTGSNVFQTRAGCLIGAEHVNNSYECDIPIGAGICASYQTQTNSPRRARSVASQSIIAYTMSLGAENSVAYSNNSIAIPTNFTISVTTEILPVSMTKTSVDCTMYICGDSTECSNLLLQYGSFCTQLNRALTGIAVEQDKNTQEVFAQVKQIYKTPPIKDFGGFNFSQILPDPSKPSKRSFIEDLLFNKVTLADAGFIKQYGDCLGDIAARDLICAQKFNGLTVLPPLLTDEMIAQYTSALLAGTITSGWTFGAGAALQIPFAMQMAYRFNGIGVTQNVLYENQKLIANQFNSAIGKIQDSLFSTASALGKLQDVVNQNAQALNTLVKQLSSNFGAISSVLNDILSRLDPPEAEVQIDRLITGRLQSLQTYVTQQLIRAAEIRASANLAATKMSECVLGQSKRVDFCGKGYHLMSFPQSAPHGVVFLHVTYVFAQEKNFTTAPAICHDGKAHFPREGVFVSNGTHWFVTQRNFYEPQIITTDNTFVSGNCDVVIGIVNNTVYDPLQPELDSFKEELDKYFKNHTSPDVDLGDISGINASVVNIQKEIDRLNEVAKNLNESLIDLQELGKYEQYIKGGSGYIPEAPRDGQAYVRKDGEWVLLSTFL

SEQ ID NO: 5867 - protein, 1241 aa, Artificial Sequence
  SARS-CoV-2/Finland/FIN-313/2020__EPI_ISL_414641 spike protein (1-1211)(K986P_V987P_P1069F) Foldon construct
MFVFLVLLPLVSSQCVNLTTRTQLPPAYTNSFTRGVYYPDKVFRSSVLHSTQDLFLPFFSNVTWFHAIHVSGTNGTKRFDNPVLPFNDGVYFASTEKSNIIRGWIFGTTLDSKTQSLLIVNNATNVVIKVCEFQFCNDPFLGVYYHKNNKSWMESEFRVYSSANNCTFEYVSQPFLMDLEGKQGNFKNLREFVFKNIDGYFKIYSKHTPINLVRDLPQGFSALEPLVDLPIGINITRFKTLLALHRSYLTPGDSSSGWTAGAAAYYVGYLQPRTFLLKYNENGTITDAVDCALDPLSETKCTLKSFTVEKGIYQTSNFRVQPTESIVRFPNITNLCPFGEVFNATRFASVYAWNRKRISNCVADYSVLYNSASFSTFKCYGVSPTKLNDLCFTNVYADSFVIRGDEVRQIAPGQTGKIADYNYKLPDDFTGCVIAWNSNNLDSKVGGNYNYLYRLFRKSNLKPFERDISTEIYQAGSTPCNGVEGFNCYFPLQSYGFQPTNGVGYQPYRVVVLSFELLHAPATVCGPKKSTNLVKNKCVNFNFNGLTGTGVLTESNKKFLPFQQFGRDIADTTDAVRDPQTLEILDITPCSFGGVSVITPGTNTSNQVAVLYQGVNCTEVPVAIHADQLTPTWRVYSTGSNVFQTRAGCLIGAEHVNNSYECDIPIGAGICASYQTQTNSPRRARSVASQSIIAYTMSLGAENSVAYSNNSIAIPTNFTISVTTEILPVSMTKTSVDCTMYICGDSTECSNLLLQYGSFCTQLNRALTGIAVEQDKNTQEVFAQVKQIYKTPPIKDFGGFNFSQILPDPSKPSKRSFIEDLLFNKVTLADAGFIKQYGDCLGDIAARDLICAQKFNGLTVLPPLLTDEMIAQYTSALLAGTITSGWTFGAGAALQIPFAMQMAYRFNGIGVTQNVLYENQKLIANQFNSAIGKIQDSLSSTASALGKLQDVVNQNAQALNTLVKQLSSNFGAISSVLNDILSRLDPPEAEVQIDRLITGRLQSLQTYVTQQLIRAAEIRASANLAATKMSECVLGQSKRVDFCGKGYHLMSFPQSAPHGVVFLHVTYVFAQEKNFTTAPAICHDGKAHFPREGVFVSNGTHWFVTQRNFYEPQIITTDNTFVSGNCDVVIGIVNNTVYDPLQPELDSFKEELDKYFKNHTSPDVDLGDISGINASVVNIQKEIDRLNEVAKNLNESLIDLQELGKYEQYIKGGSGYIPEAPRDGQAYVRKDGEWVLLSTFL

SEQ ID NO: 5868 - protein, 1241 aa, Artificial Sequence
  SARS-CoV-2/Netherlands/ZuidHolland_2/2020__EPI_ISL_414556 spike protein (1-1211)(K986P_V987P_P1069F) Foldon construct
MFVFLVLLPLVSSQCVNLTTRTQLPPAYTNSFTRGVYYPDKVFRSSVLHSTQDLFLPFFSNVTWFHAIHVSGTNGTKRFDNPVLPFNDGVYFASTEKSNIIRGWIFGTTLDSKTQSLLIVNNATNVVIKVCEFQFCNDPFLGVYYHKNNKSWMESEFRVYSSANNCTFEYVSQPFLMDLEGKQGNFKNLREFVFKNIDGYFKIYSKHTPINLVRDLPQGFSALEPLVDLPIGINITRFQTLLALHRSYLTPGDSSSGWTAGAAAYYVGYLQPRTFLLKYNENGTITDAVDCALDPLSETKCTLKSFTVEKGIYQTSNFRVQPTESIVRFPNITNLCPFGEVFNATRFASVYAWNRKRISNCVADYSVLYNSASFSTFKCYGVSPTKLNDLCFTNVYADSFVIRGDEVRQIAPGQTGKIADYNYKLPDDFTGCVIAWNSNNLDSKVGGNYNYLYRLFRKSNLKPFERDISTEIYQAGSTPCNGVEGFNCYFPLQSYGFQPTNGVGYQPYRVVVLSFELLHAPATVCGPKKSTNLVKNKCVNFNFNGLTGTGVLTESNKKFLPFQQFGRDIADTTDAVRDPQTLEILDITPCSFGGVSVITPGTNTSNQVAVLYQGVNCTEVPVAIHADQLTPTWRVYSTGSNVFQTRAGCLIGAEHVNNSYECDIPIGAGICASYQTQTNSPRRARSVASQSIIAYTMSLGAENSVAYSNNSIAIPTNFTISVTTEILPVSMTKTSVDCTMYICGDSTECSNLLLQYGSFCTQLNRALTGIALEQDKNTQEVFAQVKQIYKTPPIKDFGGFNFSQILPDPSKPSKRSFIEDLLFNKVTLADAGFIKQYGDCLGDIAARDLICAQKFNGLTVLPPLLTDEMIAQYTSALLAGTITSGWTFGAGAALQIPFAMQMAYRFNGIGVTQNVLYENQKLIANQFNSAIGKIQDSLSSTASALGKLQDVVNQNAQALNTLVKQLSSNFGAISSVLNDILSRLDPPEAEVQIDRLITGRLQSLQTYVTQQLIRAAEIRASANLAATKMSECVLGQSKRVDFCGKGYHLMSFPQSAPHGVVFLHVTYVFAQEKNFTTAPAICHDGKAHFPREGVFVSNGTHWFVTQRNFYEPQIITTDNTFVSGNCDVVIGIVNNTVYDPLQPELDSFKEELDKYFKNHTSPDVDLGDISGINASVVNIQKEIDRLNEVAKNLNESLIDLQELGKYEQYIKGGSGYIPEAPRDGQAYVRKDGEWVLLSTFL

SEQ ID NO: 5869 - protein, 1241 aa, Artificial Sequence
  SARS-CoV-2/USA/WA-UW31/2020__EPI_ISL_414618 spike protein (1-1211)(K986P_V987P_P1069F) Foldon construct
MFVFLVLLPLVSSQCVNLTTRTQLPPAYTNSFTRGVYYPDKVFRSSVLHSTQDLFLPFFSNVTWFHAIHVSGTNGTKRFDNPVLPFNDGVYFASTEKSNIIRGWIFGTTLDSKTQSLLIVNNATNVVIKVCEFQFCNDPFLGVYYHKNNKSWMESEFRVYSSANNCTFEYVSQPFLMDLEGKQGNFKNLREFVFKNIDGYFKIYSKHTPINLVRDLPQGFSALEPLVDLPIGINITRFQTLLALHRSYLTPGDSSSGWTAGAAAYYVGYLQPRTFLLKYNENGTITDAVDCALDPLSETKCTLKSFTVEKGIYQTSNFRVQPTESIVRFPNITNLCPFGEVFNATRFASVYAWNRKRISNCVADYSVLYNSASFSTFKCYGVSPTKLNDLCFTNVYADSFVIRGDEVRQIAPGQTGKIADYNYKLPDDFTGCVIAWNSNNLDSKVGGNYNYLYRLFRKSNLKPFERDISTEIYQAGSTPCNGAEGFNCYFPLQSYGFQPTNGVGYQPYRVVVLSFELLHAPATVCGPKKSTNLVKNKCVNFNFNGLTGTGVLTESNKKFLPFQQFGRDIADTTDAVRDPQTLEILDITPCSFGGVSVITPGTNTSNQVAVLYQDVNCTEVPVAIHADQLTPTWRVYSTGSNVFQTRAGCLIGAEHVNNSYECDIPIGAGICASYQTQTNSPRRARSVASQSIIAYTMSLGAENSVAYSNNSIAIPTNFTISVTTEILPVSMTKTSVDCTMYICGDSTECSNLLLQYGSFCTQLNRALTGIAVEQDKNTQEVFAQVKQIYKTPPIKDFGGFNFSQILPDPSKPSKRSFIEDLLFNKVTLADAGFIKQYGDCLGDIAARDLICAQKFNGLTVLPPLLTDEMIAQYTSALLAGTITSGWTFGAGAALQIPFAMQMAYRFNGIGVTQNVLYENQKLIANQFNSAIGKIQDSLSSTASALGKLQDVVNQNAQALNTLVKQLSSNFGAISSVLNDILSRLDPPEAEVQIDRLITGRLQSLQTYVTQQLIRAAEIRASANLAATKMSECVLGQSKRVDFCGKGYHLMSFPQSAPHGVVFLHVTYVFAQEKNFTTAPAICHDGKAHFPREGVFVSNGTHWFVTQRNFYEPQIITTDNTFVSGNCDVVIGIVNNTVYDPLQPELDSFKEELDKYFKNHTSPDVDLGDISGINASVVNIQKEIDRLNEVAKNLNESLIDLQELGKYEQYIKGGSGYIPEAPRDGQAYVRKDGEWVLLSTFL

SEQ ID NO: 5870 - protein, 1241 aa, Artificial Sequence
  SARS-CoV-2/South Korea/SNU01/2020__EPI_ISL_411929 spike protein (1-1211)(K986P_V987P_P1069F) Foldon construct
MFVFLVLLPLVSSQCVNLTTRTQLPPAYTNSFTRGVYYPDKVFRSSVLHSTQDLFLPFFSNVTWFHAIHVSGTNGTKRFDNPVLPFNDGVYFASTEKSNIIRGWIFGTTLDSKTQSLLIVNNATNVVIKVCEFQFCNDPFLGVYYHKNNKSWMESEFRVYSSANNCTFEYVSQPFLMDLEGKQGNFKNLREFVFKNIDGYFKIYSKHTPINLVRDLPQGFWALEPLVDLPIGINITRFQTLLALHRSYLTPGDSSSGWTAGAAAYYVGYLQPRTFLLKYNENGTITDAVDCALDPLSETKCTLKSFTVEKGIYQTSNFRVQPTESIVRFPNITNLCPFGEVFNATRFASVYAWNRKRISNCVADYSVLYNSASFSTFKCYGVSPTKLNDLCFTNVYADSFVIRGDEVRQIAPGQTGKIADYNYKLPDDFTGCVIAWNSNNLDSKVGGNYNYLYRLFRKSNLKPFERDISTEIYQAGSTPCNGVEGFNCYFPLQSYGFQPTNGVGYQPYRVVVLSFELLHAPATVCGPKKSTNLVKNKCVNFNFNGLTGTGVLTESNKKFLPFQQFGRDIADTTDAVRDPQTLEILDITPCSFGGVSVITPGTNTSNQVAVLYQDVNCTEVPVAIHADQLTPTWRVYSTGSNVFQTRAGCLIGAEHVNNSYECDIPIGAGICASYQTQTNSPRRARSVASQSIIAYTMSLGAENSVAYSNNSIAIPTNFTISVTTEILPVSMTKTSVDCTMYICGDSTECSNLLLQYGSFCTQLNRALTGIAVEQDKNTQEVFAQVKQIYKTPPIKDFGGFNFSQILPDPSKPSKRSFIEDLLFNKVTLADAGFIKQYGDCLGDIAARDLICAQKFNGLTVLPPLLTDEMIAQYTSALLAGTITSGWTFGAGAALQIPFAMQMAYRFNGIGVTQNVLYENQKLIANQFNSAIGKIQDSLSSTASALGKLQDVVNQNAQALNTLVKQLSSNFGAISSVLNDILSRLDPPEAEVQIDRLITGRLQSLQTYVTQQLIRAAEIRASANLAATKMSECVLGQSKRVDFCGKGYHLMSFPQSAPHGVVFLHVTYVFAQEKNFTTAPAICHDGKAHFPREGVFVSNGTHWFVTQRNFYEPQIITTDNTFVSGNCDVVIGIVNNTVYDPLQPELDSFKEELDKYFKNHTSPDVDLGDISGINASVVNIQKEIDRLNEVAKNLNESLIDLQELGKYEQYIKGGSGYIPEAPRDGQAYVRKDGEWVLLSTFL

SEQ ID NO: 5871 - protein, 1241 aa, Artificial Sequence
  SARS-CoV-2/China/WF0004/2020__EPI_ISL_413694 spike protein (1-1211)(K986P_V987P_P1069F) Foldon construct
MFVFLVLLPLVSSQCVNLTTRTQLPPAYTNSFTRGVYYPDKVFRSSVLHSTQDLFLPFFSNVTWFHAIHVSGTNGTKRFDNPVLPFNDGVYFASTEKSNIIRGWIFGTTLDSKTQSLLIVNNATNVVIKVCEFQFCNDPFLGVYYHKNNKSWTESEFRVYSSANNCTFEYVSQPFLMDLEGKQGNFKNLREFVFKNIDGYFKIYSKHTPINLVRDLPQGFSALEPLVDLPIGINITRFQTLLALHRSYLTPGDSSSGWTAGAAAYYVGYLQPRTFLLKYNENGTITDAVDCALDPLSETKCTLKSFTVEKGIYQTSNFRVQPTESIVRFPNITNLCPFGEVFNATRFASVYAWNRKRISNCVADYSVLYNSASFSTFKCYGVSPTKLNDLCFTNVYADSFVIRGDEVRQIAPGQTGKIADYNYKLPDDFTGCVIAWNSNNLDSKVGGNYNYLYRLFRKSNLKPFERDISTEIYQAGSTPCNGVEGFNCYFPLQSYGFQPTNGVGYQPYRVVVLSFELLHAPATVCGPKKSTNLVKNKCVNFNFNGLTGTGVLTESNKKFLPFQQFGRDIADTTDAVRDPQTLEILDITPCSFGGVSVITPGTNTSNQVAVLYQDVNCTEVPVAIHADQLTPTWRVYSTGSNVFQTRAGCLIGAEHVNNSYECDIPIGAGICASYQTQTNSPRRARSVASQSIIAYTMSLGAENSVAYSNNSIAIPTNFTISVTTEILPVSMTKTSVDCTMYICGDSTECSNLLLQYGSFCTQLNRALTGIAVEQDKNTQEVFAQVKQIYKTPPIKDFGGFNFSQILPDPSKPSKRSFIEDLLFNKVTLADAGFIKQYGDCLGDIAARDLICAQKFNGLTVLPPLLTDEMIAQYTSALLAGTITSGWTFGAGAALQIPFAMQMAYRFNGIGVTQNVLYENQKLIANQFNSAIGKIQDSLSSTASALGKLQDVVNQNAQALNTLVKQLSSNFGAISSVLNDILSRLDPPEAEVQIDRLITGRLQSLQTYVTQQLIRAAEIRASANLAATKMSECVLGQSKRFDFCGKGYHLMSFPQSAPHGVVFLHVTYVFAQEKNFTTAPAICHDGKAHFPREGVFVSNGTHWFVTQRNFYEPQIITTDNTFVSGNCDVVIGIVNNTVYDPLQPELDSFKEELDKYFKNHTSPDVDLGDISGINASVVNIQKEIDRLNEVAKNLNESLIDLQELGKYEQYIKGGSGYIPEAPRDGQAYVRKDGEWVLLSTFL

SEQ ID NO: 5872 - protein, 1241 aa, Artificial Sequence
  SARS-CoV-2/China/WF0028/2020__EPI_ISL_413791 spike protein (1-1211)(K986P_V987P_P1069F) Foldon construct
MFVFLVLLPLVSSQCVNLTTRTQLPPAYTNSFTRGVYYPDKVFRSSVLHSTQDLFLPFFSNVTWFHAIHVSGTNGTKRFDNPVLPFNDGVYFASTEKSNIIRGWIFGTTLDSKTQSLLIVNNATNVVIKVCEFQFCNDPFLGVYYHKNNKSWMESEFRVYSSANNCTFEYVSQPFLMDLEGKQGNFKNLREFVFKNIDGYFKIYSKHTPINLVRDLPQGFSALEPLVDLPIGINITRFQTLLALHRSYLTPGDSSSGWTAGAAAYYVGYLQPRTFLLKYNENGTITDAVDCALDPLSETKCTLKSFTVEKGIYQTSNFRVQPTESIVRFPNITNLCPFGEVFNATRFASVYAWNRKRISNCVADYSVLYNSASFSTFKCYGVSPTKLNDLCFTNVYADSFVIRGDEVRQIAPGQTGKIADYNYKLPDDFTGCVIAWNSNNLDSKVGGNYNYLYRLFRKSNLKPFERDISTEIYQAGSTPCNGVEGFNCYFPLQSYGFQPTNGVGYQPYRVVVLSFELLHAPATVCGPKKSTNLVKNKCVNFNFNGLTGTGVLTESNKKFLPFQQFGRDIADTTDAVRDPQTLEILDITPCSFGGVSVITPGTNTSNQVAVLYQDVNCTEVPVAIHADQLTPTWRVYSTGSNVFQTRAGCLIGAEHVNNSYECDIPIGAGICASYQTQTNSPRRARSVASQSIIAYTMSLGAENSVAYSNNSIAIPTNFTISVTTEILPVSMTKTSVDCTMYICGDSTECSNLLLQYGSFCTQLNRALTGIAVEQDKNTQEVFAQVKQIYKTPPIKDFGGFNFSQILPDPSKPSKRSFIEDLLFNKVTLADAGFIKQYGDCLGDIAARDLICAQKFNGLTVLPPLLTDEMIAQYTSALLAGTITSGWTFGAGAALQIPFAMQMAYRFNGIGVTQNVLYENQKLIANQFNSAIGKIQDSLSSTASALGKLQDVVNQNAQALNTLVKQLSSNFGAISSVLNDILSRLDPPEAEVQIDRLITGRLQSLQTYVTQQLIRAAEIRASANLAATKMSECVLGQSKRVDFCGKGYHLMSFPQSAPHGVVFLHVTYVFAQEKNFTTAPAICHDGKAHFPREGVFVSNGTHWFVTQRNFYEPQIITTDNTFVSGNCDVVIGIVNNTVYDPLQPELESFKEELDKYFKNHTSPDVDLGDISGINASVVNIQKEIDRLNEVAKNLNESLIDLQELGKYEQYIKGGSGYIPEAPRDGQAYVRKDGEWVLLSTFL

SEQ ID NO: 5873 - protein, 1241 aa, Artificial Sequence
  SARS-CoV-2/2019-nCoV/USA-CruiseA-18/2020__MT159716.1 spike protein (1-1211)(K986P_V987P_P1069F) Foldon construct
MFVFLVLLPLVSSQCVNLTTRTQLPPAYTNSFTRGVYYPDKVFRSSVLHSTQDLFLPFFSNVTWFHAIHVSGTNGTKRFDNPVLPFNDGVYFASTEKSNIIRGWIFGTTLDSKTQSLLIVNNATNVVIKVCEFQFCNDPFLGVYYHKNNKSWMESELRVYSSANNCTFEYVSQPFLMDLEGKQGNFKNLREFVFKNIDGYFKIYSKHTPINLVRDLPQGFSALEPLVDLPIGINITRFQTLLALHRSYLTPGDSSSGWTAGAAAYYVGYLQPRTFLLKYNENGTITDAVDCALDPLSETKCTLKSFTVEKGIYQTSNFRVQPTESIVRFPNITNLCPFGEVFNATRFASVYAWNRKRISNCVADYSVLYNSASFSTFKCYGVSPTKLNDLCFTNVYADSFVIRGDEVRQIAPGQTGKIADYNYKLPDDFTGCVIAWNSNNLDSKVGGNYNYLYRLFRKSNLKPFERDISTEIYQAGSTPCNGVEGFNCYFPLQSYGFQPTNGVGYQPYRVVVLSFELLHAPATVCGPKKSTNLVKNKCVNFNFNGLTGTGVLTESNKKFLPFQQFGRDIADTTDAVRDPQTLEILDITPCSFGGVSVITPGTNTSNQVAVLYQDVNCTEVPVAIHADQLTPTWRVYSTGSNVFQTRAGCLIGAEHVNNSYECDIPIGAGICASYQTQTNSPRRARSVASQSIIAYTMSLGAENSVAYSNNSIAIPTNFTISVTTEILPVSMTKTSVDCTMYICGDSTECSNLLLQYGSFCTQLNRALTGIAVEQDKNTQEVFAQVKQIYKTPPIKDFGGFNFSQILPDPSKPSKRSFIEDLLFNKVTLADAGFIKQYGDCLGDIAARDLICAQKFNGLTVLPPLLTDEMIAQYTSALLAGTITSGWTFGAGAALQIPFAMQMAYRFNGIGVTQNVLYENQKLIANQFNSAIGKIQDSLSSTASALGKLQDVVNQNAQALNTLVKQLSSNFGAISSVLNDILSRLDPPEAEVQIDRLITGRLQSLQTYVTQQLIRAAEIRASANLAATKMSECVLGQSKRVDFCGKGYHLMSFPQSAPHGVVFLHVTYVFAQEKNFTTAPAICHDGKAHFPREGVFVSNGTHWFVTQRNFYEPQIITTDNTFVSGNCDVVIGIVNNTVYDPLQPELDSFKEELDKYFKNHTSPDVDLGDISGINASVVNIQKEIDRLNEVAKNLNESLIDLQELGKYEQYIKGGSGYIPEAPRDGQAYVRKDGEWVLLSTFL

SEQ ID NO: 5874 - protein, 1241 aa, Artificial Sequence
  SARS-CoV-2/SARS-CoV-2/Yunnan-01/human/2020/CHN__MT049951.1 spike protein (1-1211)(K986P_V987P_P1069F) Foldon construct
MFVFLVLLPLVSSQCVNLTTRTQLPPANTNSFTRGVYYPDKVFRSSVLHSTQDLFLPFFSNVTWFHAIHVSGTNGTKRFDNPVLPFNDGVYFASTEKSNIIRGWIFGTTLDSKTQSLLIVNNATNVVIKVCEFQFCNDPFLGVYYHKNNKSWMESEFRVYSSANNCTFEYVSQPFLMDLEGKQGNFKNLREFVFKNIDGYFKIYSKHTPINLVRDLPQGFSALEPLVDLPIGINITRFQTLLALHRSYLTPGDSSSGWTAGAAAYYVGYLQPRTFLLKYNENGTITDAVDCALDPLSETKCTLKSFTVEKGIYQTSNFRVQPTESIVRFPNITNLCPFGEVFNATRFASVYAWNRKRISNCVADYSVLYNSASFSTFKCYGVSPTKLNDLCFTNVYADSFVIRGDEVRQIAPGQTGKIADYNYKLPDDFTGCVIAWNSNNLDSKVGGNYNYLYRLFRKSNLKPFERDISTEIYQAGSTPCNGVEGFNCYFPLQSYGFQPTNGVGYQPYRVVVLSFELLHAPATVCGPKKSTNLVKNKCVNFNFNGLTGTGVLTESNKKFLPFQQFGRDIADTTDAVRDPQTLEILDITPCSFGGVSVITPGTNTSNQVAVLYQDVNCTEVPVAIHADQLTPTWRVYSTGSNVFQTRAGCLIGAEHVNNSYECDIPIGAGICASYQTQTNSPRRARSVASQSIIAYTMSLGAENSVAYSNNSIAIPTNFTISVTTEILPVSMTKTSVDCTMYICGDSTECSNLLLQYGSFCTQLNRALTGIAVEQDKNTQEVFAQVKQIYKTPPIKDFGGFNFSQILPDPSKPSKRSFIEDLLFNKVTLADAGFIKQYGDCLGDIAARDLICAQKFNGLTVLPPLLTDEMIAQYTSALLAGTITSGWTFGAGAALQIPFAMQMAYRFNGIGVTQNVLYENQKLIANQFNSAIGKIQDSLSSTASALGKLQDVVNQNAQALNTLVKQLSSNFGAISSVLNDILSRLDPPEAEVQIDRLITGRLQSLQTYVTQQLIRAAEIRASANLAATKMSECVLGQSKRVDFCGKGYHLMSFPQSAPHGVVFLHVTYVFAQEKNFTTAPAICHDGKAHFPREGVFVSNGTHWFVTQRNFYEPQIITTDNTFVSGNCDVVIGIVNNTVYDPLQPELDSFKEELDKYFKNHTSPDVDLGDISGINASVVNIQKEIDRLNEVAKNLNESLIDLQELGKYEQYIKGGSGYIPEAPRDGQAYVRKDGEWVLLSTFL

SEQ ID NO: 5875 - protein, 1241 aa, Artificial Sequence
  SARS-CoV-2/USA/WA-UW292/2020__EPI_ISL_418077 spike protein (1-1211)(K986P_V987P_P1069F) Foldon construct
MFVFLVLLPLVSSQCVNLTTRTQLPPAYTNSFTRGVYYPDKVFRSSVLHSTQDLFLPFFSNVTWFHAIHVSGTNGTKRFDNPVLPFNDGVYFASTEKSNIIRGWIFGTTLDSKTQSLLIVNNATNVVIKVCEFQFCNDPFLGVYYHKNNKSWMESEFRVYSSANNCTFEYVSQPFLMDLEGKQGNFKNLREFVFKNIDGYFKIYSKHTPINLVRDLPQGFSALEPLVDLPIGINITRFQTLLALHRSYLTPGDSSSGWTAGAAAYYVGYLQPRTFLLKYNENGTITDAVDCALDPLSETKCTLKSFTVEKGIYQTSNFRVQPTESIVRFPNITNLCPFGEVFNATRFASVYAWNRKRISNCVADYSVLYNSASFSTFKCYGVSPTKLNDLCFTNVYADSFVIRGDEVRQIAPGQTGKIADYNYKLPDDFTGCVIAWNSNNLDSKVGGNYNYLYRLFRKSNLKPFERDISTEIYQASSTPCNGVEGFNCYFPLQSYGFQPTNGVGYQPYRVVVLSFELLHAPATVCGPKKSTNLVKNKCVNFNFNGLTGTGVLTESNKKFLPFQQFGRDIADTTDAVRDPQTLEILDITPCSFGGVSVITPGTNTSNQVAVLYQDVNCTEVPVAIHADQLTPTWRVYSTGSNVFQTRAGCLIGAEHVNNSYECDIPIGAGICASYQTQTNSPRRARSVASQSIIAYTMSLGAENSVAYSNNSIAIPTNFTISVTTEILPVSMTKTSVDCTMYICGDSTECSNLLLQYGSFCTQLNRALTGIAVEQDKNTQEVFAQVKQIYKTPPIKDFGGFNFSQILPDPSKPSKRSFIEDLLFNKVTLADAGFIKQYGDCLGDIAARDLICAQKFNGLTVLPPLLTDEMIAQYTSALLAGTITSGWTFGAGAALQIPFAMQMAYRFNGIGVTQNVLYENQKLIANQFNSAIGKIQDSLSSTASALGKLQDVVNQNAQALNTLVKQLSSNFGAISSVLNDILSRLDPPEAEVQIDRLITGRLQSLQTYVTQQLIRAAEIRASANLAATKMSECVLGQSKRVDFCGKGYHLMSFPQSAPHGVVFLHVTYVFAQEKNFTTAPAICHDGKAHFPREGVFVSNGTHWFVTQRNFYEPQIITTDNTFVSGNCDVVIGIVNNTVYDPLQPELDSFKEELDKYFKNHTSPDVDLGDISGINASVVNIQKEIDRLNEVAKNLNESLIDLQELGKYEQYIKGGSGYIPEAPRDGQAYVRKDGEWVLLSTFL

SEQ ID NO: 5876 - protein, 1241 aa, Artificial Sequence
  SARS-CoV-2/Iceland/192/2020__EPI_ISL_417819 spike protein (1-1211)(K986P_V987P_P1069F) Foldon construct
MFVFFVLLPLVSSQCVNLTTRTQLPPAYTNSFTRGVYYPDKVFRSSVLHSTQDLFLPFFSNVTWFHAIHVSGTNGTKRFDNPVLPFNDGVYFASTEKSNIIRGWIFGTTLDSKTQSLLIVNNATNVVIKVCEFQFCNDPFLGVYYHKNNKSWMESEFRVYSSANNCTFEYVSQPFLMDLEGKQGNFKNLREFVFKNIDGYFKIYSKHTPINLVRDLPQGFSALEPLVDLPIGINITRFQTLLALHRSYLTPGDSSSGWTAGAAAYYVGYLQPRTFLLKYNENGTITDAVDCALDPLSETKCTLKSFTVEKGIYQTSNFRVQPTESIVRFPNITNLCPFGEVFNATRFASVYAWNRKRISNCVADYSVLYNSASFSTFKCYGVSPTKLNDLCFTNVYADSFVIRGDEVRQIAPGQTGKIADYNYKLPDDFTGCVIAWNSNNLDSKVGGNYNYLYRLFRKSNLKPFERDISTEIYQAGSTPCNGVEGFNCYFPLQSYGFQPTNGVGYQPYRVVVLSFELLHAPATVCGPKKSTNLVKNKCVNFNFNGLTGTGVLTESNKKFLPFQQFGRDIADTTDAVRDPQTLEILDITPCSFGGVSVITPGTNTSNQVAVLYQGVNCTEVPVAIHADQLTPTWRVYSTGSNVFQTRAGCLIGAEHVNNSYECDIPIGAGICASYQTQTNSPRRARSVASQSIIAYTMSLGAENSVAYSNNSIAIPTNFTISVTTEILPVSMTKTSVDCTMYICGDSTECSNLLLQYGSFCTQLNRALTGIAVEQDKNTQEVFAQVKQIYKTPPIKDFGGFNFSQILPDPSKPSKRSFIEDLLFNKVTLADAGFIKQYGDCLGDIAARDLICAQKFNGLTVLPPLLTDEMIAQYTSALLAGTITSGWTFGAGAALQIPFAMQMAYRFNGIGVTQNVLYENQKLIANQFNSAIGKIQDSLSSTASALGKLQDVVNQNAQALNTLVKQLSSNFGAISSVLNDILSRLDPPEAEVQIDRLITGRLQSLQTYVTQQLIRAAEIRASANLAATKMSECVLGQSKRVDFCGKGYHLMSFPQSAPHGVVFLHVTYVFAQEKNFTTAPAICHDGKAHFPREGVFVSNGTHWFVTQRNFYEPQIITTDNTFVSGNCDVVIGIVNNTVYDPLQPELDSFKEELDKYFKNHTSPDVDLGDISGINASVVNIQKEIDRLNEVAKNLNESLIDLQELGKYEQYIKGGSGYIPEAPRDGQAYVRKDGEWVLLSTFL

SEQ ID NO: 5877 - protein, 1241 aa, Artificial Sequence
  SARS-CoV-2/Belgium/ULG-6939/2020__EPI_ISL_417020 spike protein (1-1211)(K986P_V987P_P1069F) Foldon construct
MFVFLVLLPLVSSQCVNLTTRTQLPPAYTNSFTRGVYYPDKVFRSSVLHSTQDLFLPFFSNVTWFHAIHVSGTNGTKRFDNPVLPFNDGVYFASTEKSNIIRGWIFGTTLDSKTQSLLIVNNATNVVIKVCEFQFCNDPFLGVYYHKNNKSWMESEFRVYSSANNCTFEYVSQPFLMDLEGKQGNFKNLREFVFKNIDGYFKIYSKHTPINLVRDLPQGFSALEPLVDLPIGINITRFQTLLALHRSYLTPGDSSSGWTAGAAAYYVGYLQPRTFLLKYNENGTITDAVDCALDPLSETKCTLKSFTVEKGIYQTSNFRVQPTESIVRFPNITNLCPFGEVFNATRFASVYAWNRKRISNCVADYSVLYNSASFSTFKCYGVSPTKLNDLCFTNVYADSFVIRGDEVRQIAPGQTGKIADYNYKLPDDFTGCVIAWNSNNLDSKVGGNYNYLYRLFRKSNLKPFERDISTEIYQAGSTPCNGVEGFNCYFPLQSYGFQPTNGVGYQPYRVVVLSFELLHAPATVCGPKKSTNLVKNKCVNFNFNGLTGTGVLTESNKKFLPFQQFGRDIADTTDAVRDPQTLEILDITPCSFGGVSVITPGTNTSNQVAVLYQGVNCTEVPVAIHADQLTPTWRVYSTGSNVFQTRAGCLIGAEHVNNSYECDIPIGAGICASYQTQTNSPRRARSVASQSIIAYTMSLGAENSVVYSNNSIAIPTNFTISVTTEILPVSMTKTSVDCTMYICGDSTECSNLLLQYGSFCTQLNRALTGIAVEQDKNTQEVFAQVKQIYKTPPIKDFGGFNFSQILPDPSKPSKRSFIEDLLFNKVTLADAGFIKQYGDCLGDIAARDLICAQKFNGLTVLPPLLTDEMIAQYTSALLAGTITSGWTFGAGAALQIPFAMQMAYRFNGIGVTQNVLYENQKLIANQFNSAIGKIQDSLSSTASALGKLQDVVNQNAQALNTLVKQLSSNFGAISSVLNDILSRLDPPEAEVQIDRLITGRLQSLQTYVTQQLIRAAEIRASANLAATKMSECVLGQSKRVDFCGKGYHLMSFPQSAPHGVVFLHVTYVFAQEKNFTTAPAICHDGKAHFPREGVFVSNGTHWFVTQRNFYEPQIITTDNTFVSGNCDVVIGIVNNTVYDPLQPELDSFKEELDKYFKNHTSPDVDLGDISGINASVVNIQKEIDRLNEVAKNLNESLIDLQELGKYEQYIKGGSGYIPEAPRDGQAYVRKDGEWVLLSTFL

SEQ ID NO: 5878 - protein, 1241 aa, Artificial Sequence
  SARS-CoV-2/France/HF2496/2020__EPI_ISL_418231 spike protein (1-1211)(K986P_V987P_P1069F) Foldon construct
MFVFLVLLPLVSSQCVNLTTRTQLPPAYTNSFTRGVYYPDKVFRSSVLHSTQDLFLPFFSNVTWFHAIHVSGTNGTKRFDNPVLPFNDGVYFASTEKSNIIRGWIFGTTLDSKTQSLLIVNNATNVVIKVCEFQFCNDPFLGVYYHKNNKSWMESEFRVYSSANNCTFEYVSQPFLMDLEGKQGNFKNLREFVFKNIDGYFKIYSKHTPINLVRDLPQGFSALEPLVDLPIGINITRFQTLLALHRSYLTPGDSSSGWTAGAAAYYVGYLQPRTFLLKYNENGTITDAVDCALDPLSETKCTLKSFTVEKGIYQTSNFRVQPTESIVRFPNITNLCPFGEVFNATRFASVYAWNRKRISNCVADYSVLYNSASFSTFKCYGVSPTKLNDLCFTNVYADSFVIRGDEVRQIAPGQTGKIADYNYKLPDDFTGCVIAWNSNNLDSKVGGNYNYLYRLFRKSNLKPFERDISTEIYQAGSTPCNGVEGFNCYFPLQSYGFQPTNGVGYQPYRVVVLSFELLHAPATVCGPKKSTNLVKNKCVNFNFNGLTGTGVLTESNKKFLPFQQFGRDIADTTDAVRDPQTLEILDITPCSFGGVSVITPGTNTSNQVAVLYQGVNCTEVPVAIHADQLTPTWRVYSTGSNVFQTRAGCLIGAEHVNNSYECDIPIGAGICASYQTQTNSPRRARSVASQSIIAYTMSLGAENSVAYSNNSIAIPTNFTISVTTEILPVSMTKTSVDCTMYICGDSTECSNLLLQYGSFCTQLNRALTGIAVEQDKNTQEVFAQVKQIYKTPPIKDFGGFNFSQILPDPSKPSKRSFIEDLLFNKVTLADAGFIKQYGDCLGDIVARDLICAQKFNGLTVLPPLLTDEMIAQYTSALLAGTITSGWTFGAGAALQIPFAMQMAYRFNGIGVTQNVLYENQKLIANQFNSAIGKIQDSLSSTASALGKLQDVVNQNAQALNTLVKQLSSNFGAISSVLNDILSRLDPPEAEVQIDRLITGRLQSLQTYVTQQLIRAAEIRASANLAATKMSECVLGQSKRVDFCGKGYHLMSFPQSAPHGVVFLHVTYVFAQEKNFTTAPAICHDGKAHFPREGVFVSNGTHWFVTQRNFYEPQIITTDNTFVSGNCDVVIGIVNNTVYDPLQPELDSFKEELDKYFKNHTSPDVDLGDISGINASVVNIQKEIDRLNEVAKNLNESLIDLQELGKYEQYIKGGSGYIPEAPRDGQAYVRKDGEWVLLSTFL

SEQ ID NO: 5879 - protein, 1241 aa, Artificial Sequence
  SARS-CoV-2/USA/WA-UW291/2020__EPI_ISL_418076 spike protein (1-1211)(K986P_V987P_P1069F) Foldon construct
MFVFLVLLPLVSSQCVNLTTRTQLPPAYTNSFTRGVYYPDKVFRSSVLHSTQDLFLPFFSNVTWFHAIHVSGTNGTKRFDNPVLPFNDGVYFASTEKSNIIRGWIFGTTLDSKTQSLLIVNNATNVVIKVCEFQFCNDPFLGVYYHKNNKSWMESEFRVYSSANNCTFEYVSQPFLMDLEGKQGNFKNLREFVFKNIDGYFKIYSKHTPINLVRDLPQGFSALEPLVDLPIGINITRFQTLLALHRSYLTPGDSSSGWTAGAAAYYVGYLQPRTFLLKYNENGTITDAVDCALDPLSETKCTLKSFTVEKGIYQTSNFRVQPTESIVRFPNITNLCPFGEVFNATRFASVYAWNRKRISNCVADYSVLYNSASFSTFKCYGVSPTKLNDLCFTNVYADSFVIRGDEVRQIAPGQTGKIADYNYKLPDDFTGCVIAWNSNNLDSKVGGNYNYLYRLFRKSNLKPFERDISTEIYQAGSTPCNGVEGFNCYFPLQSYGFQPTNGVGYQPYRVVVLSFELLHAPATVCGPKKSTNLVKNKCVNFNFNGLTGTGVLTESNKKFLPFQQFGRDIADTTDAVRDPQTLEILDITPCSFGGVSVITPGTNTSNQVAVLYQGVNCTEVPVAIHADQLTPTWRVYSTGSNVFQTRAGCLIGAEHVNNSYECDIPIGAGICASYQTQTNSPRRARSVASQSIIAYTMSLGAENSVAYSNNSIAIPTNFTISVTTEILPVSMTKTSVDCTMYICGDSTECSNLLLQYGSFCTQLNRALTGIAVEQDKNTQEVFAQVKQIYKTPPIKDFGGFNFSQILPDPSKPSKRSFIEDLLFNKVTLADAGFIKQYGDCLGDIAARDLICAQKFNGLTVLPPLLTDEMIAQYTSALLAGTITSGWTFGAGAALQIPFAMQMAYRFNGIGVTQNVLYENQKLIANQFNSAIGKIQYSLSSTASALGKLQDVVNQNAQALNTLVKQLSSNFGAISSVLNDILSRLDPPEAEVQIDRLITGRLQSLQTYVTQQLIRAAEIRASANLAATKMSECVLGQSKRVDFCGKGYHLMSFPQSAPHGVVFLHVTYVFAQEKNFTTAPAICHDGKAHFPREGVFVSNGTHWFVTQRNFYEPQIITTDNTFVSGNCDVVIGIVNNTVYDPLQPELDSFKEELDKYFKNHTSPDVDLGDISGINASVVNIQKEIDRLNEVAKNLNESLIDLQELGKYEQYIKGGSGYIPEAPRDGQAYVRKDGEWVLLSTFL

SEQ ID NO: 5880 - protein, 1241 aa, Artificial Sequence; identical to SEQ ID NO: 5843
  SARS-CoV-2/Portugal/PT0034/2020__EPI_ISL_418019 spike protein (1-1211)(K986P_V987P_P1069F) Foldon construct

SEQ ID NO: 5881 - protein, 1241 aa, Artificial Sequence
  SARS-CoV-2/Iceland/202/2020__EPI_ISL_417750 spike protein (1-1211)(K986P_V987P_P1069F) Foldon construct
MFVFLVLLPLVSSQCVNLTTRTQLPPAYTNSFTRGVYYPDKVFRSSVLHSTQDLFLPFFSNVTWFHAIHVSGTNGTKRFDNPVLPFNDGVYFASTEKSNIIRGWIFGTTLDSKTQSLLIVNNATNVVIKVCEFQFCNDPFLGVYYHKNNKSWMESEFRVYSSANNCTFEYVSQPFLMDLEGKQGNFKNLREFVFKNIDGYFKIYSKHTPINLVRDLPQGFSALEPLVDLPIGINITRFQTLLALHRSYLTPGDSSSGWTAGAAAYYVGYLQPRTFLLKYNENGTITDAVDCALDPLSETKCTLKSFTVEKGIYQTSNFRVQPTESIVRFPNITNLCPFGEVFNATRFASVYAWNRKRISNCVADYSVLYNSASFSTFKCYGVSPTKLNDLCFTNVYADSFVIRGDEVRQIAPGQTGKIADYNYKLPDDFTGCVIAWNSNNLDSKVGGNYNYLYRLFRKSNLKPFERDISTEIYQAGSTPCNGVEGFNCYFPLQSYGFQPTNGVGYQPYRVVVLSFELLHAPATVCGPKKSTNLVKNKCVNFNFNGLTGTGVLTESNKKFLPFQQFGRDIADTTDAVRDPQTLEILDITPCSFGGVSVITPGTNTSNQVAVLYQDVNCTEVPVAIHADQLTPTWRVYSTGSNVFQTRAGCLIGAEHVNNSYECDIPIGAGICASYQTQTNSPRRARSVASQSIIAYTMSLGAENSVAYSNNSIAIPTNFTISVTTEILPVSMTKTSVDCTMYICGDSTECSNLLLQYGSFCTQLNRALTGIAVEQDKNTQEVFAQVKQIYKTPPIKDFGGFNFSQILPDPSKPSKRSFIEDLLFNKVTLADAGFIKQYGDCLGDIAARDLICAQKFNGLTVLPPLLTDEMIAQYTSALLAGTITSGWTFGAGAALQIPFAMQMAYRFNGIGVTQNVLYENQKLIANQFNSAIGKIQDSLSSTASALGKLQDVVNQNAQALNTLVKQLSSNFGAISSVLNDILSRLDPPEAEVQIDRLITGRLQSLQTYVTQQLIRAAEIRASANLAATKMSECVLGQSKRVDFCGKGYHLMSFPQSAPHGVVFLHVTYVFAQEKNFTTAPAICHDGKAHFPREGVFVSNGTHWFVTQRNFYEPQIITTDNTFVSGNCDVVIGIVNNTVYDPLQPELDSFKEELDKYFKNHTSPDVDLGDIPGINASVVNIQKEIDRLNEVAKNLNESLIDLQELGKYEQYIKGGSGYIPEAPRDGQAYVRKDGEWVLLSTFL

SEQ ID NO: 5882 - protein, 1241 aa, Artificial Sequence
  SARS-CoV-2/USA/WA-UW261/2020__EPI_ISL_418046 spike protein (1-1211)(K986P_V987P_P1069F) Foldon construct
MFVFLVLLPLVSSQCVNLTTRTQLPPAYTNSFTRGVYYPDKVFRSSVLHSTQDLFLPFFSNVTWFHAIHVSGTNGTKRFDNPVLPFNDGVYFASTEKSNIIRGWIFGTTLDSKTQSLLIVNNATNVVIKVCEFQFCNDPFLGVYYHKNNKSWMESEFRVYSSANNCTFEYVSQPFLMDLEGKQGNFKNLREFVFKNIDGYFKIYSKHTPINLVRDLPQGFSALEPLVDLPIGINITRFQTLLALHRSYLTPGDSSSGWTAGAAAYYVGYLQPRTFLLKYNENGTITDAVDCALDPLSETKCTLKSFTVEKGIYQTSNFRVQPTESIVRFPNITNLCPFGEVFNATRFTSVYAWNRKRISNCVADYSVLYNSASFSTFKCYGVSPTKLNDLCFTNVYADSFVIRGDEVRQIAPGQTGKIADYNYKLPDDFTGCVIAWNSNNLDSKVGGNYNYLYRLFRKSNLKPFERDISTEIYQAGSTPCNGVEGFNCYFPLQSYGFQPTNGVGYQPYRVVVLSFELLHAPATVCGPKKSTNLVKNKCVNFNFNGLTGTGVLTESNKKFLPFQQFGRDIADTTDAVRDPQTLEILDITPCSFGGVSVITPGTNTSNQVAVLYQDVNCTEVPVAIHADQLTPTWRVYSTGSNVFQTRAGCLIGAEHVNNSYECDIPIGAGICASYQTQTNSPRRARSVASQSIIAYTMSLGAENSVAYSNNSIAIPTNFTISVTTEILPVSMTKTSVDCTMYICGDSTECSNLLLQYGSFCTQLNRALTGIAVEQDKNTQEVFAQVKQIYKTPPIKDFGGFNFSQILPDPSKPSKRSFIEDLLFNKVTLADAGFIKQYGDCLGDIAARDLICAQKFNGLTVLPPLLTDEMIAQYTSALLAGTITSGWTFGAGAALQIPFAMQMAYRFNGIGVTQNVLYENQKLIANQFNSAIGKIQDSLSSTASALGKLQDVVNQNAQALNTLVKQLSSNFGAISSVLNDILSRLDPPEAEVQIDRLITGRLQSLQTYVTQQLIRAAEIRASANLAATKMSECVLGQSKRVDFCGKGYHLMSFPQSAPHGVVFLHVTYVFAQEKNFTTAPAICHDGKAHFPREGVFVSNGTHWFVTQRNFYEPQIITTDNTFVSGNCDVVIGIVNNTVYDPLQPELDSFKEELDKYFKNHTSPDVDLGDISGINASVVNIQKEIDRLNEVAKNLNESLIDLQELGKYEQYIKGGSGYIPEAPRDGQAYVRKDGEWVLLSTFL

SEQ ID NO: 5883 - protein, 1241 aa, Artificial Sequence
  SARS-CoV-2/Portugal/PT0035/2020__EPI_ISL_418020 spike protein (1-1211)(K986P_V987P_P1069F) Foldon construct
MFVFLVLLPLVSSQCVNLTTRTQLPPAYTNSFTRGVYYPDKVFRSSVLHSTQDLFLPFFSNVTWFHAIHVSGTNGTKRFDNPVLPFNDGVYFASTEKSNIIRGWIFGTTLDSKTQSLLIVNNATNVVIKVCEFQFCNDPFLGVYYHKNNKSWMESEFRVYSSANNCTFEYVSQPFLMDLEGKQGNFKNLREFVFKNIDGYFKIYSKHTPINLVRDLPQGFSALEPLVDLPIGINITRFQTLLALHRSYLTPGDSSSGWTAGAAAYYVGYLQPRTFLLKYNENGTITDAVDCALDPLSETKCTLKSFTVEKGIYQTSNFRVQPTESIVRFPNITNLCPFGEVFNATRFASVYAWNRKRISNCVADYSVLYNSASFSTFKCYGVSPTKLNDLCFTNVYADSFVIRGDEVRQIAPGQTGKIADYNYKLPDDFTGCVIAWNSNNLDSKVGGNYNYLYRLFRKSNLKPFERDISTEIYQAGSTPCNGVEGFNCYFPLQSYGFQPTNGVGYQPYRVVVLSFELLHAPATVCGPKKSTNLVKNKCVNFNFNGLTGTGVLTESNKKFLPFQQFGRDIADTTDAVRDPQTLEILDITPCSFGGVSVITPGTNTSNQVAVLYQDVNCTEVPVAIHADQLTPTWRVYSTGSNVFQTRAGCLIGAEHVNNSYECDIPIGAGICASYQTQTNSPRRARSVASQSIIAYTMSLGAENSVAYSNNSIAIPTNFTISVTTEILPVSMTKTSVDCTMYICGDSTECSNLLLQYGSFCTQLNRALTGIAVEQDKNTQEVFAQVKQIYKTPPIKDFGGFNFSQILPDPSKPSKRSFIEDLLFNKVTLADAGFIKQYGDCLGDISARDLICAQKFNGLTVLPPLLTDEMIAQYTSALLAGTITSGWTFGAGAALQIPFAMQMAYRFNGIGVTQNVLYENQKLIANQFNSAIGKIQDSLSSTASALGKLQDVVNQNAQALNTLVKQLSSNFGAISSVLNDILSRLDPPEAEVQIDRLITGRLQSLQTYVTQQLIRAAEIRASANLAATKMSECVLGQSKRVDFCGKGYHLMSFPQSAPHGVVFLHVTYVFAQEKNFTTAPAICHDGKAHFPREGVFVSNGTHWFVTQRNFYEPQIITTDNTFVSGNCDVVIGIVNNTVYDPLQPELDSFKEELDKYFKNHTSPDVDLGDISGINASVVNIQKEIDRLNEVAKNLNESLIDLQELGKYEQYIKGGSGYIPEAPRDGQAYVRKDGEWVLLSTFL

SEQ ID NO: 5884 - protein, 1241 aa, Artificial Sequence
  SARS-CoV-2/USA/NY-NYUMC7/2020__EPI_ISL_418192 spike protein (1-1211)(K986P_V987P_P1069F) Foldon construct
MFVFLVLLPLVSSQCVNLTTRTQLPPAYTNSFTRGVYYPDKVFRSSVLHSTQDLFLPFFSNVTWFHAIHVSGTNGTKRFDNPVLPFNDGVYFASTEKSNIIRGWIFGTTLDSKTQSLLIVNNATNVVIKVCEFQFCNDPFLGVYHHKNNKSWMESEFRVYSSANNCTFEYVSQPFLMDLEGKQGNFKNLREFVFKNIDGYFKIYSKHTPINLVRDLPQGFSALEPLVDLPIGINITRFQTLLALHRSYLTPGDSSSGWTAGAAAYYVGYLQPRTFLLKYNENGTITDAVDCALDPLSETKCTLKSFTVEKGIYQTSNFRVQPTESIVRFPNITNLCPFGEVFNATRFASVYAWNRKRISNCVADYSVLYNSASFSTFKCYGVSPTKLNDLCFTNVYADSFVIRGDEVRQIAPGQTGKIADYNYKLPDDFTGCVIAWNSNNLDSKVGGNYNYLYRLFRKSNLKPFERDISTEIYQAGSTPCNGVEGFNCYFPLQSYGFQPTNGVGYQPYRVVVLSFELLHAPATVCGPKKSTNLVKNKCVNFNFNGLTGTGVLTESNKKFLPFQQFGRDIADTTDAVRDPQTLEILDITPCSFGGVSVITPGTNTSNQVAVLYQGVNCTEVPVAIHADQLTPTWRVYSTGSNVFQTRAGCLIGAEHVNNSYECDIPIGAGICASYQTQTNSPRRARSVASQSIIAYTMSLGAENSVAYSNNSIAIPTNFTISVTTEILPVSMTKTSVDCTMYICGDSTECSNLLLQYGSFCTQLNRALTGIAVEQDKNTQEVFAQVKQIYKTPPIKDFGGFNFSQILPDPSKPSKRSFIEDLLFNKVTLADAGFIKQYGDCLGDIAARDLICAQKFNGLTVLPPLLTDEMIAQYTSALLAGTITSGWTFGAGAALQIPFAMQMAYRFNGIGVTQNVLYENQKLIANQFNSAIGKIQDSLSSTASALGKLQDVVNQNAQALNTLVKQLSSNFGAISSVLNDILSRLDPPEAEVQIDRLITGRLQSLQTYVTQQLIRAAEIRASANLAATKMSECVLGQSKRVDFCGKGYHLMSFPQSAPHGVVFLHVTYVFAQEKNFTTAPAICHDGKAHFPREGVFVSNGTHWFVTQRNFYEPQIITTDNTFVSGNCDVVIGIVNNTVYDPLQPELDSFKEELDKYFKNHTSPDVDLGDISGINASVVNIQKEIDRLNEVAKNLNESLIDLQELGKYEQYIKGGSGYIPEAPRDGQAYVRKDGEWVLLSTFL

SEQ ID NO: 5885 - protein, 1241 aa, Artificial Sequence
  SARS-CoV-2/Iceland/189/2020__EPI_ISL_417709 spike protein (1-1211)(K986P_V987P_P1069F) Foldon construct
MFVFLVLLPLVSSQCVNLTTRTQLPPAYTNSFTRGVYYPDKVFRSSVLHSTQDLFLPFFSNVTWFHAIHVSGTNGTKRFDNPVLPFNDGVYFASTEKSNIIRGWIFGTTLDSKTQSLLIVNNATNVVIKVCEFQFCNDPFLGVYYHKNNKSWMESEFRVYSSANNCTFEYVSQPFLMDLEGKQGNFKNLREFVFKNIDGYFKIYSKHTPINLVRDLPQGFSALEPLVDLPIGINITRFQTLLALHRSYLTPGDSSSGWTAGAAAYYVGYLQPRTFLLKYNENGTITDAVDCALDPLSETKCTLKSFTVEKGIYQTSNFRVQPTESIVRFPNITNLCPFGEVFNATRFASVYAWNRKRISNCVADYSVLYNSASFSTFKCYGVSPTKLNDLCFTNVYADSFVIRGDEVRQIAPGQTGKIADYNYKLPDDFTGCVIAWNSNNLDSKVGGNYNYLYRLFRKSNLKPFERDISTEIYQAGSTPCNGVEGFNCYFPLQSYGFQPTNGVGYQPYRVVVLSFELLHAPATVCGPKKSTNLVKNKCVNFNFNGLTGTGVLTESNKKFLPFQQFGRDIADTTDAVRDPQTLEILDITPCSFGGVSVITPGTNTSNQVAVLYQGVNCTEVPVAIHADQLTPTWRVYSTGSNVFQTRAGCLIGAEHVNNSYECDIPIGAGICASYQTQTNSPRRARSVASQSIIAYTMSLGAENSVAYSNNSIAIPTNFTISVTTEILPVSMTKTSVDCTMYICGDSTECSNLLLQYGSFCTQLNRALTGIAVEQDKNTQEVFAQVKQIYKTPPIKDFGGFNFSQILPDPSKPSKRSFIEDLLFNKVTLADAGFTKQYGDCLGDIAARDLICAQKFNGLTVLPPLLTDEMIAQYTSALLAGTITSGWTFGAGAALQIPFAMQMAYRFNGIGVTQNVLYENQKLIANQFNSAIGKIQDSLSSTASALGKLQDVVNQNAQALNTLVKQLSSNFGAISSVLNDILSRLDPPEAEVQIDRLITGRLQSLQTYVTQQLIRAAEIRASANLAATKMSECVLGQSKRVDFCGKGYHLMSFPQSAPHGVVFLHVTYVFAQEKNFTTAPAICHDGKAHFPREGVFVSNGTHWFVTQRNFYEPQIITTDNTFVSGNCDVVIGIVNNTVYDPLQPELDSFKEELDKYFKNHTSPDVDLGDISGINASVVNIQKEIDRLNEVAKNLNESLIDLQELGKYEQYIKGGSGYIPEAPRDGQAYVRKDGEWVLLSTFL

SEQ ID NO: 5886 - protein, 1241 aa, Artificial Sequence
  SARS-CoV-2/Australia/NSW56/2020__EPI_ISL_417408 spike protein (1-1211)(K986P_V987P_P1069F) Foldon construct
MFVFLVLLPLVSSQCVNLTTRTQLPPAYTNSFTRGVYYPDKVFRSSVLHSTQDLFLPFFSNVTWFHAIHVSGTNGTKRFDNPVLPFNDGVYFASTEKSNIIRGWIFGTTLDSKTQSLLIVNNATNVVIKVCEFQFCNDPFLGVYYHKNNKSWMESEFRVYSSANNCTFEYVSQPFLMDLEGKQGNFKNLREFVFKNIDGYFKIYSKHTPINLVRDLPQGFSALEPLVDLPIGINITRFQTLLALHRSYLTPGDSSSGWTAGAAAYYVGYLQPRTFLLKYNENGTITDAVDCALDPLSETKCTLKSFTVEKGIYQTSNFRVQPTESIVRFPNITNLCPFGEVFNATRFASVYAWNRKRISNCVADYSVLYNSASFSTFKCYGVSPTKLNDLCFTNVYADSFVIRGDEVRQIAPGQTGKIADYNYKLPDDFTGCVIAWNSNNLDSKVGGNYNYLYRLFRKSNLKPFERDISTEIYQAGSTPCNGVEGFNCYFPLQSYGFQPTNGVGYQPYRVVVLSFELLHAPATVCGPKKSTNLVKNKCVNFNFNGLTGTGVLTESNKKFLPFQQFGRDIADTTDAVRDPQTLEILDITPCSFGGVSVITPGTNTSNQVAVLYQDVNCTEVPVAIHADQLTPTWRVYSTGSNVFQTRAGCLIGAEHVNNSYECDIPIGAGICASYQTQTNSPRRARSVASQSIIAYTMSLGAENSVAYSNNSIAIPTNFTISVTTEILPVSMTKTSVDCTMYICGDSTECSNLLLQYGSFCTQLNRALTGIAVEQDKNTQEVFAQVKQIYKTPPIKDFGGFNFSQILPDSSKPSKRSFIEDLLFNKVTLADAGFIKQYGDCLGDIAARDLICAQKFNGLTVLPPLLTDEMIAQYTSALLAGTITSGWTFGAGAALQIPFAMQMAYRFNGIGVTQNVLYENQKLIANQFNSAIGKIQDSLSSTASALGKLQDVVNQNAQALNTLVKQLSSNFGAISSVLNDILSRLDPPEAEVQIDRLITGRLQSLQTYVTQQLIRAAEIRASANLAATKMSECVLGQSKRVDFCGKGYHLMSFPQSAPHGVVFLHVTYVFAQEKNFTTAPAICHDGKAHFPREGVFVSNGTHWFVTQRNFYEPQIITTDNTFVSGNCDVVIGIVNNTVYDPLQPELDSFKEELDKYFKNHTSPDVDLGDISGINASVVNIQKEIDRLNEVAKNLNESLIDLQELGKYEQYIKGGSGYIPEAPRDGQAYVRKDGEWVLLSTFL

SEQ ID NO: 5887 - protein, 1241 aa, Artificial Sequence
  SARS-CoV-2/Iceland/280/2020__EPI_ISL_417608 spike protein (1-1211)(K986P_V987P_P1069F) Foldon construct
MFVFLVLLPLVSSQCVNLTTRTQLPPAYTNSFTRGVYYPDKVFRSSVLHSTQDLFLPFFSNVTWFHAIHVSGTNGTKRFDNPVLPFNDGVYFASTEKSNIIRGWIFGTTLDSKTQSLLIVNNATNVVIKVCEFQFCNDPFLGVYYHKNNKSWMESEFRVYSSANNCTFEYVSQPFLMDLEGKQGNFKNLREFVFKNIDGYFKIYSKHTPINLVRDLPQGFSALEPLVDLPIGINITRFQTLLALHRSYLTPGDSSSGWTAGAAAYYVGYLQPRTFLLKYNENGTITDAVDCALDPLSETKCTLKSFTVEKGIYQTSNFRVQPTESIVRFPNITNLCPFGEVFNATRFASVYAWNRKRISNCVADYSVLYNSASFSTFKCYGVSPTKLNDLCFTNVYADSFVIRGDEVRQIAPGQTGKIADYNYKLPDDFTGCVIAWNSNNLDSKVGGNYNYLYRLFRKSNLKPFERDISTEIYQAGSTPCNGVEGFNCYFPLQSYGFQPTNGVGYQPYRVVVLSFELLHAPATVCGPKKSTNLVKNKCVNFNFNGLTGTGVLTESNKKFLPFQQFGRDIADTTDAVRDPQTLEILDITPCSFGGVSVITPGTNTSNQVAVLYQGVNCTEVPVAIHADQLTPTWRVYSTGSNVFQTRAGCLIGAEHVNNSYECDIPIGAGICASYHTQTNSPRRARSVASQSIIAYTMSLGAENSVAYSNNSIAIPTNFTISVTTEILPVSMTKTSVDCTMYICGDSTECSNLLLQYGSFCTQLNRALTGIAVEQDKNTQEVFAQVKQIYKTPPIKDFGGFNFSQILPDPSKPSKRSFIEDLLFNKVTLADAGFIKQYGDCLGDIAARDLICAQKFNGLTVLPPLLTDEMIAQYTSALLAGTITSGWTFGAGAALQIPFAMQMAYRFNGIGVTQNVLYENQKLIANQFNSAIGKIQDSLSSTASALGKLQDVVNQNAQALNTLVKQLSSNFGAISSVLNDILSRLDPPEAEVQIDRLITGRLQSLQTYVTQQLIRAAEIRASANLAATKMSECVLGQSKRVDFCGKGYHLMSFPQSAPHGVVFLHVTYVFAQEKNFTTAPAICHDGKAHFPREGVFVSNGTHWFVTQRNFYEPQIITTDNTFVSGNCDVVIGIVNNTVYDPLQPELDSFKEELDKYFKNHTSPDVDLGDISGINASVVNIQKEIDRLNEVAKNLNESLIDLQELGKYEQYIKGGSGYIPEAPRDGQAYVRKDGEWVLLSTFL

SEQ ID NO: 5888 - protein, 1241 aa, Artificial Sequence; identical to SEQ ID NO: 5843
  SARS-CoV-2/Iceland/247/2020__EPI_ISL_417575 spike protein (1-1211)(K986P_V987P_P1069F) Foldon construct

SEQ ID NO: 5889 - protein, 1241 aa, Artificial Sequence
  SARS-CoV-2/Iceland/238/2020__EPI_ISL_417566 spike protein (1-1211)(K986P_V987P_P1069F) Foldon construct
MFVFLVLLPLVSSQCVNLTTRTQLPPAYTNSFTRGVYYPDKVFRSSVLHSTQDLFLPFFSNVTWFHAIHVSGTNGTKRFDNPVLPFNDGVYFASTEKSNIIRGWIFGTTLDSKTQSLLIVNNATNVVIKVCEFQFCNDPFLGVYYHKNNKSWMESEFRVYSSANNCTFEYVSQPFLMDLEGKQGNFKNLREFVFKNIDGYFKIYSKHTPINLVRDLPQGFSALEPLVDLPIGINITRFQTLLALHRSYLTPGDSSSGWTAGAAAYYVGYLQPRTFLLKYNENGTITDAVDCALDPLSETKCTLKSFTVEKGIYQTSNFRVQPTESIVRFPNITNLCPFGEVFNATRFASVYAWNRKRISNCVADYSVLYNSASFSTFKCYGVSPTKLNDLCFTNVYADSFVIRGDEVRQIAPGQTGKIADYNYKLPDDFTGCVIAWNSNNLDSKVGGNYNYLYRLFRKSNLKPFERDISTEIYQAGSTPCNGVEGFNCYFPLQSYGFQPTNGVGYQPYRVVVLSFELLHAPATVCGPKKSTNLVKNKCVNFNFNGLTGTGVLTESNKKFLPFQQFGRDIADTTDAVRDPQTLEILDITPCSFGGVSVITPGTNTSNQVAVLYQGVNCTEVPVAIHADQLTPTWRVYSTGSNVFQTRAGCLIGAEHVNNSYECDIPIGAGICASYQTQTNSPRRARSVASQSIIAYTMSLGAENSVAYSNNSIAIPTNFTISVTTEILPVSMTKTSVDCTMYICGDSTECSNLLLQYGSFCTQLNRALTGIAVEQDKNTQEVFAQVKQIYKTPPIKDFGGFNFSQILPDPSKPSKRSFIEDLLFNKVTLADVGFIKQYGDCLGDIAARDLICAQKFNGLTVLPPLLTDEMIAQYTSALLAGTITSGWTFGAGAALQIPFAMQMAYRFNGIGVTQNVLYENQKLIANQFNSAIGKIQDSLSSTASALGKLQDVVNQNAQALNTLVKQLSSNFGAISSVLNDILSRLDPPEAEVQIDRLITGRLQSLQTYVTQQLIRAAEIRASANLAATKMSECVLGQSKRVDFCGKGYHLMSFPQSAPHGVVFLHVTYVFAQEKNFTTAPAICHDGKAHFPREGVFVSNGTHWFVTQRNFYEPQIITTDNTFVSGNCDVVIGIVNNTVYDPLQPELDSFKEELDKYFKNHTSPDVDLGDISGINASVVNIQKEIDRLNEVAKNLNESLIDLQELGKYEQYIKGGSGYIPEAPRDGQAYVRKDGEWVLLSTFL

SEQ ID NO: 5890 - protein, 1241 aa, Artificial Sequence
  SARS-CoV-2/Greece/16/2020__EPI_ISL_418265 spike protein (1-1211)(K986P_V987P_P1069F) Foldon construct
MFVFLVLLPLVSSQCVNLTTRTQLPPAYTNSFTRGVYYPDKVFRSSVLHSTQDLFLPFFSNVTWFHAIHVSGTNGTKRFDNPVLPFNDGVYFASTEKSNIIRGWIFGTTLDSKTQSLLIVNNATNVVIKVCEFQFCNDPFLGVYYHKNNKSWMESEFRVYSSANNCTFEYVSQPFLMDLEGKQGNFKNLREFVFKNVDGYFKIYSKHTPINLVRDLPQGFSALEPLVDLPIGINITRFQTLLALHRSYLTPGDSSSGWTAGAAAYYVGYLQPRTFLLKYNENGTITDAVDCALDPLSETKCTLKSFTVEKGIYQTSNFRVQPTESIVRFPNITNLCPFGEVFNATRFASVYAWNRKRISNCVADYSVLYNSASFSTFKCYGVSPTKLNDLCFTNVYADSFVIRGDEVRQIAPGQTGKIADYNYKLPDDFTGCVIAWNSNNLDSKVGGNYNYLYRLFRKSNLKPFERDISTEIYQAGSTPCNGVEGFNCYFPLQSYGFQPTNGVGYQPYRVVVLSFELLHAPATVCGPKKSTNLVKNKCVNFNFNGLTGTGVLTESNKKFLPFQQFGRDIADTTDAVRDPQTLEILDITPCSFGGVSVITPGTNTSNQVAVLYQDVNCTEVPVAIHADQLTPTWRVYSTGSNVFQTRAGCLIGAEHVNNSYECDIPIGAGICASYQTQTNSPRRARSVASQSIIAYTMSLGAENSVAYSNNSIAIPTNFTISVTTEILPVSMTKTSVDCTMYICGDSTECSNLLLQYGSFCTQLNRALTGIAVEQDKNTQEVFAQVKQIYKTPPIKDFGGFNFSQILPDPSKPSKRSFIEDLLFNKVTLADAGFIKQYGDCLGDIAARDLICAQKFNGLTVLPPLLTDEMIAQYTSALLAGTITSGWTFGAGAALQIPFAMQMAYRFNGIGVTQNVLYENQKLIANQFNSAIGKIQDSLSSTASALGKLQDVVNQNAQALNTLVKQLSSNFGAISSVLNDILSRLDPPEAEVQIDRLITGRLQSLQTYVTQQLIRAAEIRASANLAATKMSECVLGQSKRVDFCGKGYHLMSFPQSAPHGVVFLHVTYVFAQEKNFTTAPAICHDGKAHFPREGVFVSNGTHWFVTQRNFYEPQIITTDNTFVSGNCDVVIGIVNNTVYDPLQPELDSFKEELDKYFKNHTSPDVDLGDISGINASVVNIQKEIDRLNEVAKNLNESLIDLQELGKYEQYIKGGSGYIPEAPRDGQAYVRKDGEWVLLSTFL

SEQ ID NO: 5891 - protein, 1241 aa, Artificial Sequence
  SARS-CoV-2/Iceland/319/2020__EPI_ISL_417648 spike protein (1-1211)(K986P_V987P_P1069F) Foldon construct
MFVFLVLLPLVSSQCVNLTTRTQLPPAYTNSFTRGVYYPDKVFRSSVLHSTQDLFLPFFSNVTWFHAIHVSGTNGTKRFDNPVLPFNDGVYFASTEKSNIIRGWIFGTTLDSKTQSLLIVNNATNVVIKVCEFQFCNDPFLGVYYHKNNKSWMESEFRVYSSANNCTFEYVSQPFLIDLEGKQGNFKNLREFVFKNIDGYFKIYSKHTPINLVRDLPQGFSALEPLVDLPIGINITRFQTLLALHRSYLTPGDSSSGWTAGAAAYYVGYLQPRTFLLKYNENGTITDAVDCALDPLSETKCTLKSFTVEKGIYQTSNFRVQPTESIVRFPNITNLCPFGEVFNATRFASVYAWNRKRISNCVADYSVLYNSASFSTFKCYGVSPTKLNDLCFTNVYADSFVIRGDEVRQIAPGQTGKIADYNYKLPDDFTGCVIAWNSNNLDSKVGGNYNYLYRLFRKSNLKPFERDISTEIYQAGSTPCNGVEGFNCYFPLQSYGFQPTNGVGYQPYRVVVLSFELLHAPATVCGPKKSTNLVKNKCVNFNFNGLTGTGVLTESNKKFLPFQQFGRDIADTTDAVRDPQTLEILDITPCSFGGVSVITPGTNTSNQVAVLYQGVNCTEVPVAIHADQLTPTWRVYSTGSNVFQTRAGCLIGAEHVNNSYECDIPIGAGICASYQTQTNSPRRARSVASQSIIAYTMSLGAENSVAYSNNSIAIPTNFTISVTTEILPVSMTKTSVDCTMYICGDSTECSNLLLQYGSFCTQLNRALTGIAVEQDKNTQEVFAQVKQIYKTPPIKDFGGFNFSQILPDPSKPSKRSFIEDLLFNKVTLADAGFIKQYGDCLGDIAARDLICAQKFNGLTVLPPLLTDEMIAQYTSALLAGTITSGWTFGAGAALQIPFAMQMAYRFNGIGVTQNVLYENQKLIANQFNSAIGKIQDSLSSTASALGKLQDVVNQNAQALNTLVKQLSSNFGAISSVLNDILSRLDPPEAEVQIDRLITGRLQSLQTYVTQQLIRAAEIRASANLAATKMSECVLGQSKRVDFCGKGYHLMSFPQSAPHGVVFLHVTYVFAQEKNFTTAPAICHDGKAHFPREGVFVSNGTHWFVTQRNFYEPQIITTDNTFVSGNCDVVIGIVNNTVYDPLQPELDSFKEELDKYFKNHTSPDVDLGDISGINASVVNIQKEIDRLNEVAKNLNESLIDLQELGKYEQYIKGGSGYIPEAPRDGQAYVRKDGEWVLLSTFL

SEQ ID NO: 5892 - protein, 1241 aa, Artificial Sequence
  SARS-CoV-2/Congo/94/2020__EPI_ISL_417947 spike protein (1-1211)(K986P_V987P_P1069F) Foldon construct
MFVFLVLLPLVSSQCVNLTTRTQLPPAYTNSFTRGVYYPDKVFRSSVLHSTQDLFLPFFSNVTWFHAIHVSGTNGTKRFDNPVLPFNDGVYFASTEKSNIIRGWIFGTTLDSKTQSLLIVNNATNVVIKVCEFQFCNDPFLGVYYHKNNKSWMESEFRVYSSANNCTFEYVSQPFLMDLEGKQGNFKNLREFVFKNIDGYFKIYSKHTPINLVRDLPQGFSALEPLVDLPIGINITRFQTLLALHRSYLTPGDSSSGWTAGAAAYYVGYLQPRTFLLKYNENGTITDAVDCALDPLSETKCTLKSFTVEKGIYQTSNFRVQPTESIVRFPNITNLCPFGEVFNATRFASVYAWNRKRISNCVADYSVLYNSASFSTFKCYGVSPTKLNDLCFTNVYADSFVIRGDEVRQIAPGQTGKIADYNYKLPDDFTGCVIAWNSNNLDSKVGGNYNYLYRLFRKSNLKPFERDISTEIYQAGSTPCNGVEGFNCYFPLQSYGFQPTNGVGYQPYRVVVLSFELLHAPATVCGPKKSTNLVKNKCVNFNFNGLTGTGVLTESNKKFLPFQQFGRDIADTTDAVRDPQTLEILDITPCSFGGVSVITPGTNTSNQVAVLYQGVNCTEVPVAIHADQLTPTWRVYSTGSNVFQTRAGCLIGAEHVNNSYECDIPIGAGICASYQTQTNSPRRARSVASQSIIAYTMSLGAENSVAYSNNSIAIPTNFTISVTTEILPVSMTKTSVDCTMYICGDSTECSNLLLQYGSFCTQLNRALTGIAVEQDKNTQEVFAQVKQIYKTPPIKDFGGFNFSQILPDPSKPSKRSFIEDILFNKVTLADAGFIKQYGDCLGDIAARDLICAQKFNGLTVLPPLLTDEMIAQYTSALLAGTITSGWTFGAGAALQIPFAMQMAYRFNGIGVTQNVLYENQKLIANQFNSAIGKIQDSLSSTASALGKLQDVVNQNAQALNTLVKQLSSNFGAISSVLNDILSRLDPPEAEVQIDRLITGRLQSLQTYVTQQLIRAAEIRASANLAATKMSECVLGQSKRVDFCGKGYHLMSFPQSAPHGVVFLHVTYVFAQEKNFTTAPAICHDGKAHFPREGVFVSNGTHWFVTQRNFYEPQIITTDNTFVSGNCDVVIGIVNNTVYDPLQPELDSFKEELDKYFKNHTSPDVDLGDISGINASVVNIQKEIDRLNEVAKNLNESLIDLQELGKYEQYIKGGSGYIPEAPRDGQAYVRKDGEWVLLSTFL

SEQ ID NO: 5893 - protein, 1241 aa, Artificial Sequence
  SARS-CoV-2/Congo/158/2020__EPI_ISL_417950 spike protein (1-1211)(K986P_V987P_P1069F) Foldon construct
MFVFLVLLPLVSSQCVNLTTRTQLPPAYTNSFTRGVYYPDKVFRSSVLHSTQDLFLPFFSNVTWFHAIHVSGTNGTKRFDNPVLPFNDGVYFASTEKSNIIRGWIFGTTLDSKTQSLLIVNNATNVVIKVCEFQFCNDPFLGVYYHKNNKSWMESEFRVYSSANNCTFEYVSQPFLMDLEGKQGNFKNLREFVFKNIDGYFKIYSKHTPINLVRDLPQGFSALEPLVDLPIGINITRFQTLLALHRSYLTPGDSSSGWTAGAAAYYVGYLQPRTFLLKYNENGTITDAVDCALDPLSETKCTLKSFTVEKGIYQTSNFRVQPTESIVRFPNITNLCPFGEVFNATRFASVYAWNRKRISNCVADYSVLYNSASFSTFKCYGVSPTKLNDLCFTNVYADSFVIRGDEVRQIAPGQTGKIADYNYKLPDDFTGCVIAWNSNNLDSKVGGNYNYLYRLFRKSNLKPFERDISTEIYQAGSTPCNGVEGFNCYFPLQSYGFQPTNGVGYQPYRVVVLSFELLHAPATVCGPKKSTNLVKNKCVNFNFNGLTGTGVLTESNKKFLPFQQFGRDIADTTDAVRDPQTLEILDITPCSFGGVSVITPGTNTSNQVAVLYQDVNCTEVPVAIHADQLTPTWRVYSTGSNVFQTRAGCLIGAEHVNNSYECDIPIGAGICASYQTQTNSPRRARSVASQSIIAYTMSLGAENSVAYSNNSIAIPTNFTISVTTEILPVSMTKTSVDCTMYICGDSTECSNLLLQYGSFCTQLNRALTGIAVEQDKNTQEVFAQVKQIYKTPPIKDFGGFNFSQILPDPSKPSKRSFIEDLLFNKVTLADAGFIKQYGDCLGDIAARDLICAQKFNGLTVLPPLLTDEMIAQYTSALLAGTITSGWTFGAGAALQIPFAMQMAYRFNGIGVTQNVLYENQKLIANQFNSAIGKIQDSLSSTASALGKLQDVVNQNAQALNTLVKQLSSNFGAISSVLNDILSRLDPPEAEVQIDRLITGRLQSLQTYVTQQLIRAAEIRASANLAATKMSECVLGQSKRVDFCGKGYHLMSFPQSAPHGVVFLHVTYVFAQEKNFTTAPAICHDGKAHFPREGVFVSNGTHWFVTQRNFYEPQIITTDNTFLSGNCDVVIGIVNNTVYDPLQPELDSFKEELDKYFKNHTSPDVDLGDISGINASVVNIQKEIDRLNEVAKNLNESLIDLQELGKYEQYIKGGSGYIPEAPRDGQAYVRKDGEWVLLSTFL

SEQ ID NO: 5894 - protein, 1241 aa, Artificial Sequence
  SARS-CoV-2/USA/UT-00034/2020__EPI_ISL_417977 spike protein (1-1211)(K986P_V987P_P1069F) Foldon construct
MFVFLVLLPLVSSQCVNLTTRTQLPPAYTNSFTRGVYYPDKVFRSSVLHSTQDLFLPFFSNVTWFHAIHVSGTNGTKRFDNPVLPFNDGVYFASTEKSNIIRGWIFGTTLDSKTQSLLIVNNATNVVIKVCEFQFCNDPFLGVYYYKNNKSWMESEFRVYSSANNCTFEYVSQPFLMDLEGKQGNFKNLREFVFKNIDGYFKIYSKHTPINLVRDLPQGFSALEPLVDLPIGINITRFQTLLALHRSYLTPGDSSSGWTAGAAAYYVGYLQPRTFLLKYNENGTITDAVDCALDPLSETKCTLKSFTVEKGIYQTSNFRVQPTESIVRFPNITNLCPFGEVFNATRFASVYAWNRKRISNCVADYSVLYNSASFSTFKCYGVSPTKLNDLCFTNVYADSFVIRGDEVRQIAPGQTGKIADYNYKLPDDFTGCVIAWNSNNLDSKVGGNYNYLYRLFRKSNLKPFERDISTEIYQAGSTPCNGVEGFNCYFPLQSYGFQPTNGVGYQPYRVVVLSFELLHAPATVCGPKKSTNLVKNKCVNFNFNGLTGTGVLTESNKKFLPFQQFGRDIADTTDAVRDPQTLEILDITPCSFGGVSVITPGTNTSNQVAVLYQGVNCTEVPVAIHADQLTPTWRVYSTGSNVFQTRAGCLIGAEHVNNSYECDIPIGAGICASYQTQTNSPRRARSVASQSIIAYTMSLGAENSVAYSNNSIAIPTNFTISVTTEILPVSMTKTSVDCTMYICGDSTECSNLLLQYGSFCTQLNRALTGIAVEQDKNTQEVFAQVKQIYKTPPIKDFGGFNFSQILPDPSKPSKRSFIEDLLFNKVTLADAGFIKQYGDCLGDIAARDLICAQKFNGLTVLPPLLTDEMIAQYTSALLAGTITSGWTFGAGAALQIPFAMQMAYRFNGIGVTQNVLYENQKLIANQFNSAIGKIQDSLSSTASALGKLQDVVNQNAQALNTLVKQLSSNFGAISSVLNDILSRLDPPEAEVQIDRLITGRLQSLQTYVTQQLIRAAEIRASANLAATKMSECVLGQSKRVDFCGKGYHLMSFPQSAPHGVVFLHVTYVFAQEKNFTTAPAICHDGKAHFPREGVFVSNGTHWFVTQRNFYEPQIITTDNTFVSGNCDVVIGIVNNTVYDPLQPELDSFKEELDKYFKNHTSPDVDLGDISGINASVVNIQKEIDRLNEVAKNLNESLIDLQELGKYEQYIKGGSGYIPEAPRDGQAYVRKDGEWVLLSTFL

SEQ ID NO: 5895 - protein, 1241 aa, Artificial Sequence
  SARS-CoV-2/USA/UT-00033/2020__EPI_ISL_417976 spike protein (1-1211)(K986P_V987P_P1069F) Foldon construct
MFVFLVLLPLVSSQCVNLTTRTQLPPAYTNSFTRGVYYPDKVFRSSVLHSTQDLFLPFFSNVTWFHAIHVSGTNGTKRFDNPVLPFNDGVYFASTEKSNIIRGWIFGTTLDSKTQSLLIVNNATNVVIKVCEFQFCNDPFLGVYYHKNNKSWMESEFRVYSSANNCTFEYVSQPFLMDLEGKQGNFKNLREFVFKNIDGYFKIYSKHTPINLVRDLPQGFSALEPLVDLPIGINITRFQTLLALHRSYLTPGDSSSGLTAGAAAYYVGYLQPRTFLLKYNENGTITDAVDCALDPLSETKCTLKSFTVEKGIYQTSNFRVQPTESIVRFPNITNLCPFGEVFNATRFASVYAWNRKRISNCVADYSVLYNSASFSTFKCYGVSPTKLNDLCFTNVYADSFVIRGDEVRQIAPGQTGKIADYNYKLPDDFTGCVIAWNSNNLDSKVGGNYNYLYRLFRKSNLKPFERDISTEIYQAGSTPCNGVEGFNCYFPLQSYGFQPTNGVGYQPYRVVVLSFELLHAPATVCGPKKSTNLVKNKCVNFNFNGLTGTGVLTESNKKFLPFQQFGRDIADTTDAVRDPQTLEILDITPCSFGGVSVITPGTNTSNQVAVLYQGVNCTEVPVAIHADQLTPTWRVYSTGSNVFQTRAGCLIGAEHVNNSYECDIPIGAGICASYQTQTNSPRRARSVASQSIIAYTMSLGAENSVAYSNNSIAIPTNFTISVTTEILPVSMTKTSVDCTMYICGDSTECSNLLLQYGSFCTQLNRALTGIAVEQDKNTQEVFAQVKQIYKTPPIKDFGGFNFSQILPDPSKPSKRSFIEDLLFNKVTLADAGFIKQYGDCLGDIAARDLICAQKFNGLTVLPPLLTDEMIAQYTSALLAGTITSGWTFGAGAALQIPFAMQMAYRFNGIGVTQNVLYENQKLIANQFNSAIGKIQDSLSSTASALGKLQDVVNQNAQALNTLVKQLSSNFGAISSVLNDILSRLDPPEAEVQIDRLITGRLQSLQTYVTQQLIRAAEIRASANLAATKMSECVLGQSKRVDFCGKGYHLMSFPQSAPHGVVFLHVTYVFAQEKNFTTAPAICHDGKAHFPREGVFVSNGTHWFVTQRNFYEPQIITTDNTFVSGNCDVVIGIVNNTVYDPLQPELDSFKEELDKYFKNHTSPDVDLGDISGINASVVNIQKEIDRLNEVAKNLNESLIDLQELGKYEQYIKGGSGYIPEAPRDGQAYVRKDGEWVLLSTFL

SEQ ID NO: 5896 - protein, 1241 aa, Artificial Sequence
  SARS-CoV-2/USA/WI-13/2020__EPI_ISL_417516 spike protein (1-1211)(K986P_V987P_P1069F) Foldon construct
MFVFLVLLPLVSSQCVNLTTRTQLPPAYTNSFTRGVYYPDKVFRSSVLHSTQDLFLPFFSNVTWFHAIHVSGTNGTKRFDNPVLPFNDGVYFASTEKSNIIRGWIFGTTLDSKTQSLLIVNNATNVVIKVCEFQFCNDPFLGVYYHKNNKSWMESEFRVYSSANNCTFEYVSQPFLMDLEGKQGNFKNLREFVFKNIDGYFKIYSKHTPINLVRDLPQGFSALEPLVDLPIGINITRFQTLLALHRSYLTPGDSSSGWTAGAAAYYVGYLQPRTFLLKYNENGTITDAVDCALDPLSETKCTLKSFTVEKGIYQTSNFRVLPTESIVRFPNITNLCPFGEVFNATRFASVYAWNRKRISNCVADYSVLYNSASFSTFKCYGVSPTKLNDLCFTNVYADSFVIRGDEVRQIAPGQTGKIADYNYKLPDDFTGCVIAWNSNNLDSKVGGNYNYLYRLFRKSNLKPFERDISTEIYQAGSTPCNGVEGFNCYFPLQSYGFQPTNGVGYQPYRVVVLSFELLHAPATVCGPKKSTNLVKNKCVNFNFNGLTGTGVLTESNKKFLPFQQFGRDIADTTDAVRDPQTLEILDITPCSFGGVSVITPGTNTSNQVAVLYQGVNCTEVPVAIHADQLTPTWRVYSTGSNVFQTRAGCLIGAEHVNNSYECDIPIGAGICASYQTQTNSPRRARSVASQSIIAYTMSLGAENSVAYSNNSIAIPTNFTISVTTEILPVSMTKTSVDCTMYICGDSTECSNLLLQYGSFCTQLNRALTGIAVEQDKNTQEVFAQVKQIYKTPPIKDFGGFNFSQILPDPSKPSKRSFIEDLLFNKVTLADAGFIKQYGDCLGDIAARDLICAQKFNGLTVLPPLLTDEMIAQYTSALLAGTITSGWTFGAGAALQIPFAMQMAYRFNGIGVTQNVLYENQKLIANQFNSAIGKIQDSLSSTASALGKLQDVVNQNAQALNTLVKQLSSNFGAISSVLNDILSRLDPPEAEVQIDRLITGRLQSLQTYVTQQLIRAAEIRASANLAATKMSECVLGQSKRVDFCGKGYHLMSFPQSAPHGVVFLHVTYVFAQEKNFTTAPAICHDGKAHFPREGVFVSNGTHWFVTQRNFYEPQIITTDNTFVSGNCDVVIGIVNNTVYDPLQPELDSFKEELDKYFKNHTSPDVDLGDISGINASVVNIQKEIDRLNEVAKNLNESLIDLQELGKYEQYIKGGSGYIPEAPRDGQAYVRKDGEWVLLSTFL

SEQ ID NO: 5897 - protein, 1240 aa, Artificial Sequence
  SARS-CoV-2/India/1-27/2020__EPI_ISL_413522 spike protein (1-1210)(K985P_V986P_P1068F) Foldon construct
MFVFLVLLPLVSSQCVNLTTRTQLPPAYTNSFTRGVYYPDKVFRSSVLHSTQDLFLPFFSNVTWFHAIHVSGTNGTKRFDNPVLPFNDGVYFASTEKSNIIRGWIFGTTLDSKTQSLLIVNNATNVVIKVCEFQFCNDPFLGVYHKNNKSWMESEFRVYSSANNCTFEYVSQPFLMDLEGKQGNFKNLREFVFKNIDGYFKIYSKHTPINLVRDLPQGFSALEPLVDLPIGINITRFQTLLALHRSYLTPGDSSSGWTAGAAAYYVGYLQPRTFLLKYNENGTITDAVDCALDPLSETKCTLKSFTVEKGIYQTSNFRVQPTESIVRFPNITNLCPFGEVFNATRFASVYAWNRKRISNCVADYSVLYNSASFSTFKCYGVSPTKLNDLCFTNVYADSFVIRGDEVIQIAPGQTGKIADYNYKLPDDFTGCVIAWNSNNLDSKVGGNYNYLYRLFRKSNLKPFERDISTEIYQAGSTPCNGVEGFNCYFPLQSYGFQPTNGVGYQPYRVVVLSFELLHAPATVCGPKKSTNLVKNKCVNFNFNGLTGTGVLTESNKKFLPFQQFGRDIADTTDAVRDPQTLEILDITPCSFGGVSVITPGTNTSNQVAVLYQDVNCTEVPVAIHADQLTPTWRVYSTGSNVFQTRAGCLIGAEHVNNSYECDIPIGAGICASYQTQTNSPRRARSVASQSIIAYTMSLGAENSVAYSNNSIAIPTNFTISVTTEILPVSMTKTSVDCTMYICGDSTECSNLLLQYGSFCTQLNRALTGIAVEQDKNTQEVFAQVKQIYKTPPIKDFGGFNFSQILPDPSKPSKRSFIEDLLFNKVTLADAGFIKQYGDCLGDIAARDLICAQKFNGLTVLPPLLTDEMIAQYTSALLAGTITSGWTFGAGAALQIPFAMQMAYRFNGIGVTQNVLYENQKLIANQFNSAIGKIQDSLSSTASALGKLQDVVNQNAQALNTLVKQLSSNFGAISSVLNDILSRLDPPEAEVQIDRLITGRLQSLQTYVTQQLIRAAEIRASANLAATKMSECVLGQSKRVDFCGKGYHLMSFPQSAPHGVVFLHVTYVFAQEKNFTTAPAICHDGKAHFPREGVFVSNGTHWFVTQRNFYEPQIITTDNTFVSGNCDVVIGIVNNTVYDPLQPELDSFKEELDKYFKNHTSPDVDLGDISGINASVVNIQKEIDRLNEVAKNLNESLIDLQELGKYEQYIKGGSGYIPEAPRDGQAYVRKDGEWVLLSTFL

SEQ ID NO: 5898 - protein, 1235 aa, Artificial Sequence
  SARS-CoV-2/pangolin/Guangxi/P4L/2017__EPI_ISL_410538 spike protein (1-1205)(K980P_V981P_P1063F) Foldon construct
MFVFLFVLPLVSSQCVNLTTRTGIPPGYTNSSTRGVYYPDKVFRSSILHLTQDLFLPFFSNVTWFNTINYQGGFKKFDNPVLPFNDGVYFASTEKSNIIRGWIFGTTLDARTQSLLIVNNATNVVIKVCEFQFCTDPFLGVYYHNNNKTWVENEFRVYSSANNCTFEYISQPFLMDLEGKQGNFKNLREFVFKNVDGYFKIYSKHTPIDLVRDLPRGFAALEPLVDLPIGINITRFQTLLALHRSYLTPGNLESGWTTGAAAYYVGYLQQRTFLLSYNQNGTITDAVDCSLDPLSETKCTLKSLTVEKGIYQTSNFRVQPTISIVRFPNITNLCPFGEVFNASKFASVYAWNRKRISNCVADYSVLYNSTSFSTFKCYGVSPTKLNDLCFTNVYADSFVVKGDEVRQIAPGQTGVIADYNYKLPDDFTGCVIAWNSVKQDALTGGNYGYLYRLFRKSKLKPFERDISTEIYQAGSTPCNGQVGLNCYYPLERYGFHPTTGVNYQPFRVVVLSFELLNGPATVCGPKLSTTLVKDKCVNFNFNGLTGTGVLTTSKKQFLPFQQFGRDISDTTDAVRDPQTLEILDITPCSFGGVSVITPGTNTSNQVAVLYQDVNCTEVPMAIHAEQLTPAWRVYSAGANVFQTRAGCLVGAEHVNNSYECDIPVGAGICASYHSMSSLRSVNQRSIIAYTMSLGAENSVAYSNNSIAIPTNFTISVTTEILPVSMTKTSVDCTMYICGDSIECSNLLLQYGSFCTQLNRALTGIAVEQDKNTQEVFAQVKQIYKTPPIKDFGGFNFSQILPDPSKPSKRSFIEDLLFNKVTLADAGFIKQYGDCLGDIAARDLICAQKFNGLTVLPPLLTDEMIAQYTSALLAGTITSGWTFGAGAALQIPFAMQMAYRFNGIGVTQNVLYENQKLIANQFNSAIGKIQDSLSSTASALGKLQDVVNQNAQALNTLVKQLSSNFGAISSVLNDILSRLDPPEAEVQIDRLITGRLQSLQTYVTQQLIRAAEIRASANLAATKMSECVLGQSKRVDFCGKGYHLMSFPQSAPHGVVFLHVTYVFAQEKNFTTAPAICHEGKAHFPREGVFVSNGTHWFITQRNFYEPQIITTDNTFVSGSCDVVIGIVNNTVYDPLQPELDSFKEELDKYFKNHTSPDVDLGDISGINASVVNIQKEIDRLNEVAKNLNESPIDLQELGKYEQYIKGGSGYIPEAPRDGQAYVRKDGEWVLLSTFL

SEQ ID NO: 5899 - protein, 1235 aa, Artificial Sequence
  SARS-CoV-2/pangolin/Guangxi/P5L/2017__EPI_ISL_410540 spike protein (1-1205)(K980P_V981P_P1063F) Foldon construct
MFVFLFVLPLVSSQCVNLTTRTGIPPGYTNSSTRGVYYPDKVFRSSILHLTQDLFLPFFSNVTWFNTINYQGGFKKFDNPVLPFNDGVYFASTEKSNIIRGWIFGTTLDARTQSLLIVNNATNVVIKVCEFQFCTDPFLGVYYHNNNKTWVENEFRVYSSANNCTFEYISQPFLMDLEGKQGNFKNLREFVFKNVDGYFKIYSKHTPIDLVRDLPRGFAALEPLVDLPIGINITRFQTLLALHRSYLTPGKLESGWTTGAAAYYVGYLQQRTFLLSYNQNGTITDAVDCSLDPLSETKCTLKSLTVEKGIYQTSNFRVQPTISIVRFPNITNLCPFGEVFNASKFASVYAWNRKRISNCVADYSVLYNSTSFSTFKCYGVSPTKLNDLCFTNVYADSFVVKGDEVRQIAPGQTGVIADYNYKLPDDFTGCVIAWNSVKQDALTGGNYGYLYRLFRKSKLKPFERDISTEIYQAGSTPCNGQVGLNCYYPLERYGFHPTTGVNYQPFRVVVLSFELLNGPATVCGPKLSTTLVKDKCVNFNFNGLTGTGVLTTSKKQFLPFQQFGRDISDTTDAVRDPQTLEILDITPCSFGGVSVITPGTNTSNQVAVLYQDVNCTEVPMAIHAEQLTPAWRVYSAGANVFQTRAGCLVGAEHVNNSYECDIPVGAGICASYHSMSSFRSVNQRSIIAYTMSLGAENSVAYSNNSIAIPTNFTISVTTEILPVSMTKTSVDCTMYICGDSIECSNLLLQYGSFCTQLNRALTGIAVEQDKNTQEVFAQVKQIYKTPPIKDFGGFNFSQILPDPSKPSKRSFIEDLLFNKVTLADAGFIKQYGDCLGDIAARDLICAQKFNGLTVLPPLLTDEMIAQYTSALLAGTITSGWTFGAGAALQIPFAMQMAYRFNGIGVTQNVLYENQKLIANQFNSAIGKIQDSLSSTASALGKLQDVVNQNAQALNTLVKQLSSNFGAISSVLNDILSRLDPPEAEVQIDRLITGRLQSLQTYVTQQLIRAAEIRASANLAATKMSECVLGQSKRVDFCGKGYHLMSFPQSAPHGVVFLHVTYVFAQEKNFTTAPAICHEGKAHFPREGVFVSNGTHWFITQRNFYEPQIITTDNTFVSGSCDVVIGIVNNTVYDPLQPELDSFKEELDKYFKNHTSPDVDLGDISGINASVVNIQKEIDRLNEVAKNLNESLIDLQELGKYEQYIKGGSGYIPEAPRDGQAYVRKDGEWVLLSTFL

SEQ ID NO: 5900 - protein, 1235 aa, Artificial Sequence
  SARS-CoV-2/pangolin/Guangxi/P5E/2017__EPI_ISL_410541 spike protein (1-1205)(K980P_V981P_P1063F) Foldon construct
MFVFLFVLPLVSSQCVNLTTRTGIPPGYTNSSTRGVYYPDKVFRSSILHLTQDLFLPFFSNVTWFNTITYQGGSKKFDNPVLPFNDGVYFASTEKSNIIRGWIFGTTLDARTQSLLIVNNATNVVIKVCEFQFCTDPFLGVYYHNNNKTWVENEFRVYSSANNCTFEYISQPFLMDLEGKQGNFKNLREFVFKNVDGYFKIYSKHTPIDLVRDLPRGFAALEPLVDLPIGINITRFQTLLALHRSYLTPGKLESGWTTGAAAYYVGYLQQRTFLLSYNQNGTITDAVDCSLDPLSETKCTLKSLTVEKGIYQTSNFRVQPTISIVRFPNITNLCPFGEVFNASKFASVYAWNRKRISNCVADYSVLYNSTSFSTFKCYGVSPTKLNDLCFTNVYADSFVVKGDEVRQIAPGQTGVIADYNYKLPDDFTGCVIAWNSVKQDALTGDNYGYLYRLFRKSKLKPFERDISTEIYQAGSTPCNGQVGLNCYYPLERYGFHPTTGVNYQPFRVVVLSFELLNGPATVCGPKLSTTLVKDKCVNFNFNGLTGTGVLTTSKKQFLPFQQFGRDISDTTDAVRDPQTLEILDITPCSFGGVSVITPGTNTSNQVAVLYQDVNCTEVPMAIHAEQLTPAWRVYSAGANVFQTRAGCLVGAEHVNNSYECDIPVGAGICASYHSMSSFRSVNQRSIIAYTMSLGAENSVAYSNNSIAIPTNFTISVTTEILPVSMTKTSVDCTMYICGDSIECSNLLLQYGSFCTQLNRALTGIAVEQDKNTQEVFAQVKQIYKTPPIKDFGGFNFSQILPDPSKPSKRSFIEDLLFNKVTLADAGFIKQYGDCLGDIAARDLICAQKFNGLTVLPPLLTDEMIAQYTSALLAGTITSGWTFGAGAALQIPFAMQMAYRFNGIGVTQNVLYENQKLIANQFNSAIGKIQDSLSSTASALGKLQDVVNQNAQALNTLVKQLSSNFGAISSVLNDILSRLDPPEAEVQIDRLITGRLQSLQTYVTQQLIRAAEIRASANLAATKMSECVLGQSKRVDFCGKGYHLMSFPQSAPHGVVFLHVTYVFAQEKNFTTAPAICHEGKAHFPREGVFVSNGTHWFITQRNFYEPQIITTDNTFVSGSCDVVIGIVNNTVYDPLQPELDSFKEELDKYFKNHTSPDVDLGDISGINASVVNIQKEIDRLNEVAKNLNESLIDLQELGKYEQYIKGGSGYIPEAPRDGQAYVRKDGEWVLLSTFL

SEQ ID NO: 5901 - protein, 1233 aa, Artificial Sequence
  SARS-CoV-2/pangolin/Guangxi/P1E/2017__EPI_ISL_410539 spike protein (1-1203)(K978P_V979P_P1061F) Foldon construct
MFVFLFVLPLVSSQCVNLTTRTGIQPGYTNSSTRGVYYPDKVFRSSILHLTQDLFLPFFSNVTWFNTINYQGGFKKFDNPVLPFNDGVYFASTEKSNIIRGWIFGTTLDARTQSLLIVNNATNVVIKVCEFQFCTDPFLGVYYHNNNKTWVENEFRVYSSANNCTFEYISQPFLMDLEGKQGNFKNLREFVFKNVDGYFKIYSKHTPIDLVRDLPRGFAALEPLVDLPIGINITRFQTLLALHRSYLTPGKLESGWTTGAAAYYVGYLQQRTFLLSYNQNGTITDAVDCSLDPLSETKCTLKSLTVEKGIYQTSNFRVQPTISIVRFPNITNLCPFGEVFNASKFASVYAWNRKRISNCVADYSVLYNSTSFSTFKCYGVSPTKLNDLCFTNVYADSFVVKGDEVRQIAPGQTGVIADYNYKLPDDFTGCVIAWNSVKQDALTGGNYLYRLFRKSKLKPFERDISTEIYQAGSTPCNGQVGLNCYYPLERYGFHPTTGVNYQPFRVVVLSFELLNGPATVCGPKLSTTLVKDKCVNFNFNGLTGTGVLTTSKKQFLPFQQFGRDISDTTDAVRDPQTLEILDITPCSFGGVSVITPGTNTSNQVAVLYQDVNCTEVPMAIHAEQLTPAWRVYSAGANVFQTRAGCLVGAEHVNNSYECDIPVGAGICASYHSMSSLRSVNQRSIIAYTMSLGAENSVAYSNNSIAIPTNFTISVTTEILPVSMTKTSVDCTMYICGDSIECSNLLLQYGSFCTQLNRALTGIAVEQDKNTQEVFAQVKQIYKTPPIKDFGGFNFSQILPDPSKPSKRSFIEDLLFNKVTLADAGFIKQYGDCLGDIAARDLICAQKFNGLTVLPPLLTDEMIAQYTSALLAGTITSGWTFGAGAALQIPFAMQMAYRFNGIGVTQNVLYENQKLIANQFNSAIGKIQDSLSSTASALGKLQDVVNQNAQALNTLVKQLSSNFGAISSVLNDILSRLDPPEAEVQIDRLITGRLQSLQTYVTQQLIRAAEIRASANLAATKMSECVLGQSKRVDFCGKGYHLMSFPQSAPHGVVFLHVTYVFAQEKNFTTAPAICHEGKAHFPREGVFVSNGTHWFITQRNFYEPQIITTDNTFVSGSCDVVIGIVNNTVYDPLQPELDSFKEELDKYFKNHTSPDVDLGDISGINASVVNIQKEIDRLNEVAKNLNESLIDLQELGKYEQYIKGGSGYIPEAPRDGQAYVRKDGEWVLLSTFL

SEQ ID NO: 5902 - protein, 1241 aa, Artificial Sequence
  SARS-CoV-2/Wuhan/WIV05/2019__EPI_ISL_402128 spike protein (1-1211)(K986P_V987P_ H1048Q_H1064N_ H1083N_H1101N) Foldon construct
MFVFLVLLPLVSSQCVNLTTRTQLPPAYTNSFTRGVYYPDKVFRSSVLHSTQDLFLPFFSNVTWFHAIHVSGTNGTKRFDNPVLPFNDGVYFASTEKSNIIRGWIFGTTLDSKTQSLLIVNNATNVVIKVCEFQFCNDPFLGVYYHKNNKSWMESEFRVYSSANNCTFEYVSQPFLMDLEGKQGNFKNLREFVFKNIDGYFKIYSKHTPINLVRDLPQGFSALEPLVDLPIGINITRFQTLLALHRSYLTPGDSSSGWTAGAAAYYVGYLQPRTFLLKYNENGTITDAVDCALDPLSETKCTLKSFTVEKGIYQTSNFRVQPTESIVRFPNITNLCPFGEVFNATRFASVYAWNRKRISNCVADYSVLYNSASFSTFKCYGVSPTKLNDLCFTNVYADSFVIRGDEVRQIAPGQTGKIADYNYKLPDDFTGCVIAWNSNNLDSKVGGNYNYLYRLFRKSNLKPFERDISTEIYQAGSTPCNGVEGFNCYFPLQSYGFQPTNGVGYQPYRVVVLSFELLHAPATVCGPKKSTNLVKNKCVNFNFNGLTGTGVLTESNKKFLPFQQFGRDIADTTDAVRDPQTLEILDITPCSFGGVSVITPGTNTSNQVAVLYQDVNCTEVPVAIHADQLTPTWRVYSTGSNVFQTRAGCLIGAEHVNNSYECDIPIGAGICASYQTQTNSPRRARSVASQSIIAYTMSLGAENSVAYSNNSIAIPTNFTISVTTEILPVSMTKTSVDCTMYICGDSTECSNLLLQYGSFCTQLNRALTGIAVEQDKNTQEVFAQVKQIYKTPPIKDFGGFNFSQILPDPSKPSKRSFIEDLLFNKVTLADAGFIKQYGDCLGDIAARDLICAQKFNGLTVLPPLLTDEMIAQYTSALLAGTITSGWTFGAGAALQIPFAMQMAYRFNGIGVTQNVLYENQKLIANQFNSAIGKIQDSLSSTASALGKLQDVVNQNAQALNTLVKQLSSNFGAISSVLNDILSRLDPPEAEVQIDRLITGRLQSLQTYVTQQLIRAAEIRASANLAATKMSECVLGQSKRVDFCGKGYQLMSFPQSAPHGVVFLNVTYVPAQEKNFTTAPAICNDGKAHFPREGVFVSNGTNWFVTQRNFYEPQIITTDNTFVSGNCDVVIGIVNNTVYDPLQPELDSFKEELDKYFKNHTSPDVDLGDISGINASVVNIQKEIDRLNEVAKNLNESLIDLQELGKYEQYIKGGSGYIPEAPRDGQAYVRKDGEWVLLSTFL

SEQ ID NO: 5903 - protein, 1237 aa, Artificial Sequence
  SARS-CoV-2/bat/Yunnan/RaTG13/2013__EPI_ISL_402131 spike protein (1-1207)(K982P_V983P_ H1044Q_H1060N_ H1079N_H1097N) Foldon construct
MFVFLVLLPLVSSQCVNLTTRTQLPPAYTNSSTRGVYYPDKVFRSSVLHLTQDLFLPFFSNVTWFHAIHVSGTNGIKRFDNPVLPFNDGVYFASTEKSNIIRGWIFGTTLDSKTQSLLIVNNATNVVIKVCEFQFCNDPFLGVYYHKNNKSWMESEFRVYSSANNCTFEYVSQPFLMDLEGKQGNFKNLREFVFKNIDGYFKIYSKHTPINLVRDLPPGFSALEPLVDLPIGINITRFQTLLALHRSYLTPGDSSSGWTAGAAAYYVGYLQPRTFLLKYNENGTITDAVDCALDPLSETKCTLKSFTVEKGIYQTSNFRVQPTDSIVRFPNITNLCPFGEVFNATTFASVYAWNRKRISNCVADYSVLYNSTSFSTFKCYGVSPTKLNDLCFTNVYADSFVITGDEVRQIAPGQTGKIADYNYKLPDDFTGCVIAWNSKHIDAKEGGNFNYLYRLFRKANLKPFERDISTEIYQAGSKPCNGQTGLNCYYPLYRYGFYPTDGVGHQPYRVVVLSFELLNAPATVCGPKKSTNLVKNKCVNFNFNGLTGTGVLTESNKKFLPFQQFGRDIADTTDAVRDPQTLEILDITPCSFGGVSVITPGTNASNQVAVLYQDVNCTEVPVAIHADQLTPTWRVYSTGSNVFQTRAGCLIGAEHVNNSYECDIPIGAGICASYQTQTNSRSVASQSIIAYTMSLGAENSVAYSNNSIAIPTNFTISVTTEILPVSMTKTSVDCTMYICGDSTECSNLLLQYGSFCTQLNRALTGIAVEQDKNTQEVFAQVKQIYKTPPIKDFGGFNFSQILPDPSKPSKRSFIEDLLFNKVTLADAGFIKQYGDCLGDIAARDLICAQKFNGLTVLPPLLTDEMIAQYTSALLAGTITSGWTFGAGAALQIPFAMQMAYRFNGIGVTQNVLYENQKLIANQFNSAIGKIQDSLSSTASALGKLQDVVNQNAQALNTLVKQLSSNFGAISSVLNDILSRLDPPEAEVQIDRLITGRLQSLQTYVTQQLIRAAEIRASANLAATKMSECVLGQSKRVDFCGKGYQLMSFPQSAPHGVVFLNVTYVPAQEKNFTTAPAICNDGKAHFPREGVFVSNGTNWFVTQRNFYEPQIITTDNTFVSGSCDVVIGIVNNTVYDPLQPELDSFKEELDKYFKNHTSPDVDLGDISGINASVVNIQKEIDRLNEVAKNLNESLIDLQELGKYEQYIKGGSGYIPEAPRDGQAYVRKDGEWVLLSTFL

SEQ ID NO: 5904 - protein, 1241 aa, Artificial Sequence
  SARS-CoV-2/Wuhan/HBCDC-HB-01/2019__EPI_ISL_402132 spike protein (1-1211)(K986P_V987P_ H1048Q_H1064N_ H1083N_H1101N) Foldon construct
MFVFLVLLPLVSSQCVNLTTRTQLPPAYTNSITRGVYYPDKVFRSSVLHSTQDLFLPFFSNVTWFHAIHVSGTNGTKRFDNPVLPFNDGVYFASTEKSNIIRGWIFGTTLDSKTQSLLIVNNATNVVIKVCEFQFCNDPFLGVYYHKNNKSWMESEFRVYSSANNCTFEYVSQPFLMDLEGKQGNFKNLREFVFKNIDGYFKIYSKHTPINLVRDLPQGFSALEPLVDLPIGINITRFQTLLALHRSYLTPGDSSSGWTAGAAAYYVGYLQPRTFLLKYNENGTITDAVDCALDPLSETKCTLKSFTVEKGIYQTSNFRVQPTESIVRFPNITNLCPFGEVFNATRFASVYAWNRKRISNCVADYSVLYNSASFSTFKCYGVSPTKLNDLCFTNVYADSFVIRGDEVRQIAPGQTGKIADYNYKLPDDFTGCVIAWNSNNLDSKVGGNYNYLYRLFRKSNLKPFERDISTEIYQAGSTPCNGVEGFNCYFPLQSYGFQPTNGVGYQPYRVVVLSFELLHAPATVCGPKKSTNLVKNKCVNFNFNGLTGTGVLTESNKKFLPFQQFGRDIADTTDAVRDPQTLEILDITPCSFGGVSVITPGTNTSNQVAVLYQDVNCTEVPVAIHADQLTPTWRVYSTGSNVFQTRAGCLIGAEHVNNSYECDIPIGAGICASYQTQTNSPRRARSVASQSIIAYTMSLGAENSVAYSNNSIAIPTNFTISVTTEILPVSMTKTSVDCTMYICGDSTECSNLLLQYGSFCTQLNRALTGIAVEQDKNTQEVFAQVKQIYKTPPIKDFGGFNFSQILPDPSKPSKRSFIEDLLFNKVTLADAGFIKQYGDCLGDIAARDLICAQKFNGLTVLPPLLTDEMIAQYTSALLAGTITSGWTFGAGAALQIPFAMQMAYRFNGIGVTQNVLYENQKLIANQFNSAIGKIQDSLSSTASALGKLQDVVNQNAQALNTLVKQLSSNFGAISSVLNDILSRLDPPEAEVQIDRLITGRLQSLQTYVTQQLIRAAEIRASANLAATKMSECVLGQSKRVDFCGKGYQLMSFPQSAPHGVVFLNVTYVPAQEKNFTTAPAICNDGKAHFPREGVFVSNGTNWFVTQRNFYEPQIITTDNTFVSGNCDVVIGIVNNTVYDPLQPELDSFKEELDKYFKNHTSPDVDLGDISGINASVVNIQKEIDRLNEVAKNLNESLIDLQELGKYEQYIKGGSGYIPEAPRDGQAYVRKDGEWVLLSTFL

SEQ ID NO: 5905 - protein, 1241 aa, Artificial Sequence
  SARS-CoV-2/Guangdong/20SF028/2020__EPI_ISL_403936 spike protein (1-1211)(K986P_V987P_ H1048Q_H1064N_ H1083N_H1101N) Foldon construct
MFVFLVLLPLVSSQCVNLTTRTQLPPAYTNSFTRGVYYPDKVFRSSVLYSTQDLFLPFFSNVTWFHAIHVSGTNGTKRFDNPVLPFNDGVYFASTEKSNIIRGWIFGTTLDSKTQSLLIVNNATNVVIKVCEFQFCNDPFLGVYYHKNNKSWMESEFRVYSSANNCTFEYVSQPFLMDLEGKQGNFKNLREFVFKNIDGYFKIYSKHTPINLVRDLPQGFSALEPLVDLPIGINITRFQTLLALHRSYLTPGDSSSGWTAGAAAYYVGYLQPRTFLLKYNENGTITDAVDCALDPLSETKCTLKSFTVEKGIYQTSNFRVQPTESIVRFPNITNLCPFGEVFNATRFASVYAWNRKRISNCVADYSVLYNSASFSTFKCYGVSPTKLNDLCFTNVYADSFVIRGDEVRQIAPGQTGKIADYNYKLPDDFTGCVIAWNSNNLDSKVGGNYNYLYRLFRKSNLKPFERDISTEIYQAGSTPCNGVEGFNCYFPLQSYGFQPTNGVGYQPYRVVVLSFELLHAPATVCGPKKSTNLVKNKCVNFNFNGLTGTGVLTESNKKFLPFQQFGRDIADTTDAVRDPQTLEILDITPCSFGGVSVITPGTNTSNQVAVLYQDVNCTEVPVAIHADQLTPTWRVYSTGSNVFQTRAGCLIGAEHVNNSYECDIPIGAGICASYQTQTNSPRRARSVASQSIIAYTMSLGAENSVAYSNNSIAIPTNFTISVTTEILPVSMTKTSVDCTMYICGDSTECSNLLLQYGSFCTQLNRALTGIAVEQDKNTQEVFAQVKQIYKTPPIKDFGGFNFSQILPDPSKPSKRSFIEDLLFNKVTLADAGFIKQYGDCLGDIAARDLICAQKFNGLTVLPPLLTDEMIAQYTSALLAGTITSGWTFGAGAALQIPFAMQMAYRFNGIGVTQNVLYENQKLIANQFNSAIGKIQDSLSSTASALGKLQDVVNQNAQALNTLVKQLSSNFGAISSVLNDILSRLDPPEAEVQIDRLITGRLQSLQTYVTQQLIRAAEIRASANLAATKMSECVLGQSKRVDFCGKGYQLMSFPQSAPHGVVFLNVTYVPAQEKNFTTAPAICNDGKAHFPREGVFVSNGTNWFVTQRNFYEPQIITTDNTFVSGNCDVVIGIVNNTVYDPLQPELDSFKEELDKYFKNHTSPDVDLGDISGINASVVNIQKEIDRLNEVAKNLNESLIDLQELGKYEQYIKGGSGYIPEAPRDGQAYVRKDGEWVLLSTFL

SEQ ID NO: 5906 - protein, 1241 aa, Artificial Sequence
  SARS-CoV-2/Shenzhen/SZTH-001/2020__EPI_ISL_406592 spike protein (1-1211)(K986P_V987P_ H1048Q_H1064N_ H1083N_H1101N) Foldon construct
MFVFLVLLPLVSSQCVNLTTRTQLPPAYTNSFTRGVYYPDKVFRSSVLHSTQDLFLPFFSNVTWFHAIHVSGTNGTKRFDNPVLPFNDGVYFASTEKSNIIRGWIFGTTLDSKTQSLLIVNNATNVVIKVCEFQFCNDPFLGVYYHKNNKSWMESEFRVYSSANNCTFEYVSQPFLMDLEGKQGNFKNLREFVFKNIDGYFKIYSKHTPINLVRDLPQGFSALEPLVDLPIGINITRFQTLLALHRSYLTPGDSSSGWTAGAAAYYVGYLQPRTFLLKYNENGTITDAVDCALDPLSETKCTLKSFTVEKGIYQTSNFRVQPTESIVRFPNITNLCPFGEVFNATRFASVYAWNRKRISNCVADYSVLYNSASFSTFKCYGVSPTKLNDLCFTNVYADSFVIRGDEVRQIAPGQTGKIADYNYKLPDDFTGCVIAWNSNNLDSKVGGNYNYLYRLFRKSNLKPFERDISTEIYQAGSTPCNGVEGFNCYFPLQSYGFQPTNGVGYQPYRVVVLSFELLHAPATVCGPKKSTNLVKNKCVNFNFNGLTGTGVLTESNKKFLPFQQFGRDIADTTDAVRDPQTLEILDITPCSFGGVSVITPGTNTSNQVAVLYQDVNCTEVPVAIHADQLTPTWRVYSTGSNVFQTRAGCLIGAEHVNNSYECDIPIGAGICASYQTQTNSPRRARSVASQSIIAYTMSLGAENSVAYSNNSIAIPTNFTISVTTEILPVSMTKTSVDCTMYICGDSTECSNLLLQYGSFCTQLNRALTGIAVEQDKNTQEVFAQVKQIYKTPPIKDFGGFNFSQILPDPSKPSKRSFIEDLLFNKVTLADAGFIKQYGDCLGDIAARDLICAQKFNGLTVLPPLLTDEMIAQYTSALLAGTITSGWTFGAGAALQIPFAMQMAYRFNGIGVTQNVLYENQKLIANQFNSAIGKIQDSLSSTASALGKLQDVVNQNAQALNTLVKQLSSNFGAISSVLNDILSRLDPPEAEVQIDRLITGRLQSLQTYVTQQLIRAAEIRASANLAATKMSECVLGQSKRVDFCGKGYQLMSFPQSAPHGVVFLNVTYVPAQEKNFTTAPAICNDGKAHFPREGVFVSNGTNWFVTQRNFYEPQIITTDNTFVSGNCDVLIGIVNNTVYDPLQPELDSFKEELDKYFKNHTSPDVDLGDISGINASVVNIQKEIDRLNEVAKNLNESLIDLQELGKYEQYIKGGSGYIPEAPRDGQAYVRKDGEWVLLSTFL

SEQ ID NO: 5907 - protein, 1241 aa, Artificial Sequence
  SARS-CoV-2/Shenzhen/SZTH-004/2020__EPI_ISL_406595 spike protein (1-1211)(K986P_V987P_ H1048Q_H1064N_ H1083N_H1101N) Foldon construct
MFVFLVLLPLVSSQCVNLTTRTQLPPAYTNSFTRGVYYPDKVFRSSVLHSTQDLFLPFFSNVTWFHAIHVSGTNGTKRFDNPVLPFNDGVYFASTEKSNIIRGWIFGTTLDSKTQSLLIVNNATNVVIKVCEFQFCNDPFLGVYYHKNNKSWMESEFRVYSSANNCTFEYVSQPFLMDLEGKQGNFKNLREFVFKNIDGYFKIYSKHTPINLVRDLPQGFSALEPLVDLPIGINITRFQTLLALHRSYLTPGDSSSGWTAGAAAYYVGYLQPRTFLLKYNENGTITDAVDCALDPLSETKCTLKSFTVEKGIYQTSNFRVQPTESIVRFPNITNLCPFGEVFNATRFASVYAWDRKRISNCVAYYSVLYNSASFSTFKCYGVSPTKLNDLCFTNVYADSFVIRGDEVRQIAPGQTGKIADYNYKLPDDFTGCVIAWNSNNLDSKVGGNYNYLYRLFRKSNLKPFERDISTEIYQAGSTPCNGVEGFNCYFPLQSYGFQPTNGVGYQPYRVVVLSFELLHAPATVCGPKKSTNLVKNKCVNFNFNGLTGTGVLTESNKKFLPFQQFGRDIADTTDAVRDPQTLEILDITPCSFGGVSVITPGTNTSNQVAVLYQDVNCTEVPVAIHADQLTPTWRVYSTGSNVFQTRAGCLIGAEHVNNSYECDIPIGAGICASYQTQTNSPRRARSVASQSIIAYTMSLGAENSVAYSNNSIAIPTNFTISVTTEILPVSMTKTSVDCTMYICGDSTECSNLLLQYGSFCTQLNRALTGIAVEQDKNTQEVFAQVKQIYKTPPIKDFGGFNFSQILPDPSKPSKRSFIEDLLFNKVTLADAGFIKQYGDCLGDIAARDLICAQKFNGLTVLPPLLTDEMIAQYTSALLAGTITSGWTFGAGAALQIPFAMQMAYRFNGIGVTQNVLYENQKLIANQFNSAIGKIQDSLSSTASALGKLQDVVNQNAQALNTLVKQLSSNFGAISSVLNDILSRLDPPEAEVQIDRLITGRLQSLQTYVTQQLIRAAEIRASANLAATKMSECVLGQSKRVDFCGKGYQLMSFPQSAPHGVVFLNVTYVPAQEKNFTTAPAICNDGKAHFPREGVFVSNGTNWFVTQRNFYEPQIITTDNTFVSGNCDVVIGIVNNTVYDPLQPELDSFKEELDKYFKNHTSPDVDLGDISGINASVVNIQKEIDRLNEVAKNLNESLIDLQELGKYEQYIKGGSGYIPEAPRDGQAYVRKDGEWVLLSTFL

SEQ ID NO: 5908 - protein, 1241 aa, Artificial Sequence
  SARS-CoV-2/France/IDF0372/2020__EPI_ISL_406596 spike protein (1-1211)(K986P_V987P_ H1048Q_H1064N_ H1083N_H1101N) Foldon construct
MFVFLVLLPLVSSQCVNLTTRTQLPPAYTNSFTRGVYYPDKVFRSSVLHSTQDLFLPFFSNVTWFHAIHVSGTNGTKRFDNPVLPFNDGVYFASTEKSNIIRGWIFGTTLDSKTQSLLIVNNATNVVIKVCEFQFCNDPFLGVYYHKNNKSWMESEFRVYSSANNCTFEYVSQPFLMDLEGKQGNFKNLREFVFKNIDGYFKIYSKHTPINLVRDLPQGFSALEPLVDLPIGINITRFQTLLALHRSYLTPGDSSSGWTAGAAAYYVGYLQPRTFLLKYNENGTITDAVDCALDPLSETKCTLKSFTVEKGIYQTSNFRVQPTESIVRFPNITNLCPFGEVFNATRFASVYAWNRKRISNCVADYSFLYNSASFSTFKCYGVSPTKLNDLCFTNVYADSFVIRGDEVRQIAPGQTGKIADYNYKLPDDFTGCVIAWNSNNLDSKVGGNYNYLYRLFRKSNLKPFERDISTEIYQAGSTPCNGVEGFNCYFPLQSYGFQPTNGVGYQPYRVVVLSFELLHAPATVCGPKKSTNLVKNKCVNFNFNGLTGTGVLTESNKKFLPFQQFGRDIADTTDAVRDPQTLEILDITPCSFGGVSVITPGTNTSNQVAVLYQDVNCTEVPVAIHADQLTPTWRVYSTGSNVFQTRAGCLIGAEHVNNSYECDIPIGAGICASYQTQTNSPRRARSVASQSIIAYTMSLGAENSVAYSNNSIAIPTNFTISVTTEILPVSMTKTSVDCTMYICGDSTECSNLLLQYGSFCTQLNRALTGIAVEQDKNTQEVFAQVKQIYKTPPIKDFGGFNFSQILPDPSKPSKRSFIEDLLFNKVTLADAGFIKQYGDCLGDIAARDLICAQKFNGLTVLPPLLTDEMIAQYTSALLAGTITSGWTFGAGAALQIPFAMQMAYRFNGIGVTQNVLYENQKLIANQFNSAIGKIQDSLSSTASALGKLQDVVNQNAQALNTLVKQLSSNFGAISSVLNDILSRLDPPEAEVQIDRLITGRLQSLQTYVTQQLIRAAEIRASANLAATKMSECVLGQSKRVDFCGKGYQLMSFPQSAPHGVVFLNVTYVPAQEKNFTTAPAICNDGKAHFPREGVFVSNGTNWFVTQRNFYEPQIITTDNTFVSGNCDVVIGIVNNTVYDPLQPELDSFKEELDKYFKNHTSPDVDLGDISGINASVVNIQKEIDRLNEVAKNLNESLIDLQELGKYEQYIKGGSGYIPEAPRDGQAYVRKDGEWVLLSTFL

SEQ ID NO: 5909 - protein, 1241 aa, Artificial Sequence
  SARS-CoV-2/Australia/VIC01/2020__EPI_ISL_406844 spike protein (1-1211)(K986P_V987P_ H1048Q_H1064N_ H1083N_H1101N) Foldon construct
MFVFLVLLPLVSSQCVNLTTRTQLPPAYTNSFTRGVYYPDKVFRSSVLHSTQDLFLPFFSNVTWFHAIHVSGTNGTKRFDNPVLPFNDGVYFASTEKSNIIRGWIFGTTLDSKTQSLLIVNNATNVVIKVCEFQFCNDPFLGVYYHKNNKSWMESEFRVYSSANNCTFEYVSQPFLMDLEGKQGNFKNLREFVFKNIDGYFKIYSKHTPINLVRDLPQGFSALEPLVDLPIGINITRFQTLLALHRRYLTPGDSSSGWTAGAAAYYVGYLQPRTFLLKYNENGTITDAVDCALDPLSETKCTLKSFTVEKGIYQTSNFRVQPTESIVRFPNITNLCPFGEVFNATRFASVYAWNRKRISNCVADYSVLYNSASFSTFKCYGVSPTKLNDLCFTNVYADSFVIRGDEVRQIAPGQTGKIADYNYKLPDDFTGCVIAWNSNNLDSKVGGNYNYLYRLFRKSNLKPFERDISTEIYQAGSTPCNGVEGFNCYFPLQSYGFQPTNGVGYQPYRVVVLSFELLHAPATVCGPKKSTNLVKNKCVNFNFNGLTGTGVLTESNKKFLPFQQFGRDIADTTDAVRDPQTLEILDITPCSFGGVSVITPGTNTSNQVAVLYQDVNCTEVPVAIHADQLTPTWRVYSTGSNVFQTRAGCLIGAEHVNNSYECDIPIGAGICASYQTQTNSPRRARSVASQSIIAYTMSLGAENSVAYSNNSIAIPTNFTISVTTEILPVSMTKTSVDCTMYICGDSTECSNLLLQYGSFCTQLNRALTGIAVEQDKNTQEVFAQVKQIYKTPPIKDFGGFNFSQILPDPSKPSKRSFIEDLLFNKVTLADAGFIKQYGDCLGDIAARDLICAQKFNGLTVLPPLLTDEMIAQYTSALLAGTITSGWTFGAGAALQIPFAMQMAYRFNGIGVTQNVLYENQKLIANQFNSAIGKIQDSLSSTASALGKLQDVVNQNAQALNTLVKQLSSNFGAISSVLNDILSRLDPPEAEVQIDRLITGRLQSLQTYVTQQLIRAAEIRASANLAATKMSECVLGQSKRVDFCGKGYQLMSFPQSAPHGVVFLNVTYVPAQEKNFTTAPAICNDGKAHFPREGVFVSNGTNWFVTQRNFYEPQIITTDNTFVSGNCDVVIGIVNNTVYDPLQPELDSFKEELDKYFKNHTSPDVDLGDISGINASVVNIQKEIDRLNEVAKNLNESLIDLQELGKYEQYIKGGSGYIPEAPRDGQAYVRKDGEWVLLSTFL

SEQ ID NO: 5910 - protein, 1241 aa, Artificial Sequence
  SARS-CoV-2/Germany/BavPat1/2020__EPI_ISL_406862 spike protein (1-1211)(K986P_V987P_ H1048Q_H1064N_ H1083N_H1101N) Foldon construct
MFVFLVLLPLVSSQCVNLTTRTQLPPAYTNSFTRGVYYPDKVFRSSVLHSTQDLFLPFFSNVTWFHAIHVSGTNGTKRFDNPVLPFNDGVYFASTEKSNIIRGWIFGTTLDSKTQSLLIVNNATNVVIKVCEFQFCNDPFLGVYYHKNNKSWMESEFRVYSSANNCTFEYVSQPFLMDLEGKQGNFKNLREFVFKNIDGYFKIYSKHTPINLVRDLPQGFSALEPLVDLPIGINITRFQTLLALHRSYLTPGDSSSGWTAGAAAYYVGYLQPRTFLLKYNENGTITDAVDCALDPLSETKCTLKSFTVEKGIYQTSNFRVQPTESIVRFPNITNLCPFGEVFNATRFASVYAWNRKRISNCVADYSVLYNSASFSTFKCYGVSPTKLNDLCFTNVYADSFVIRGDEVRQIAPGQTGKIADYNYKLPDDFTGCVIAWNSNNLDSKVGGNYNYLYRLFRKSNLKPFERDISTEIYQAGSTPCNGVEGFNCYFPLQSYGFQPTNGVGYQPYRVVVLSFELLHAPATVCGPKKSTNLVKNKCVNFNFNGLTGTGVLTESNKKFLPFQQFGRDIADTTDAVRDPQTLEILDITPCSFGGVSVITPGTNTSNQVAVLYQGVNCTEVPVAIHADQLTPTWRVYSTGSNVFQTRAGCLIGAEHVNNSYECDIPIGAGICASYQTQTNSPRRARSVASQSIIAYTMSLGAENSVAYSNNSIAIPTNFTISVTTEILPVSMTKTSVDCTMYICGDSTECSNLLLQYGSFCTQLNRALTGIAVEQDKNTQEVFAQVKQIYKTPPIKDFGGFNFSQILPDPSKPSKRSFIEDLLFNKVTLADAGFIKQYGDCLGDIAARDLICAQKFNGLTVLPPLLTDEMIAQYTSALLAGTITSGWTFGAGAALQIPFAMQMAYRFNGIGVTQNVLYENQKLIANQFNSAIGKIQDSLSSTASALGKLQDVVNQNAQALNTLVKQLSSNFGAISSVLNDILSRLDPPEAEVQIDRLITGRLQSLQTYVTQQLIRAAEIRASANLAATKMSECVLGQSKRVDFCGKGYQLMSFPQSAPHGVVFLNVTYVPAQEKNFTTAPAICNDGKAHFPREGVFVSNGTNWFVTQRNFYEPQIITTDNTFVSGNCDVVIGIVNNTVYDPLQPELDSFKEELDKYFKNHTSPDVDLGDISGINASVVNIQKEIDRLNEVAKNLNESLIDLQELGKYEQYIKGGSGYIPEAPRDGQAYVRKDGEWVLLSTFL

SEQ ID NO: 5911 - protein, 1241 aa, Artificial Sequence
  SARS-CoV-2/Wuhan/HBCDC-HB-02/2020__EPI_ISL_412978 spike protein (1-1211)(K986P_V987P_ H1048Q_H1064N_ H1083N_H1101N) Foldon construct
MFVFLVLLPLVSSQCVNLTTRTQLPPAYTNSFTRGVYYPDKVFRSSVLHSTQDLFLPFFSNVTWFHAIHVSGTNGTKRFDNPVLPFNDGVYFASTEKSNIIRGWIFGTTLDSKTQSLLIVNNATNVVIKVCEFQFCNDPFLGVYYHKNNKSWMESEFRVYSSANNCTFEYVSQPFLMDLEGKQGNFKNLREFVFKNIDGYFKIYSKHTPINLVRDLPQGFSALEPLVDLPIGINITRFQTLLALHRSYLTPGDSSSGWTAGAAAYYVGYLQPRTFLLKYNENGTITDAVDCALDPLSETKCTLKSFTVEKGIYQTSNFRVQPTESIVRFPNITNLCPFGEVFNATRFASVYAWNRKRISNCVADYSVLYNSASFSTFKCYGVSPTKLNDLCFTNVYADSFVIRGDEVRQIAPGQTGKIADYNYKLPDDFTGCVIAWNSNNLDSKVGGNYNYLYRLFRKSNLKPFERDISTEIYQAGSTPCNGVEGFNCYFPLQSYGFQPTNGVGYQPYRVVVLSFELLHAPATVCGPKKSTNLVKNKCVNFNFNGLTGTGVLTESNKKFLPFQQFGRDIADTTDAVRDPQTLEILDITPCSFGGVSVITPGTNTSNQVAVLYQDVNCTEVPVAIHADQLTPTWRVYSTGSNVFQTRAGCLIGAEHVNNSYECDIPIGAGICASYQTQTNSPRRARSVASQSIIAYTMSLGAENSVAYSNNSIAIPTNFTISVTTEILPVSMTKTSVDCTMYICGDSTECSNFLLQYGSFCTQLNRALTGIAVEQDKNTQEVFAQVKQIYKTPPIKDFGGFNFSQILPDPSKPSKRSFIEDLLFNKVTLADAGFIKQYGDCLGDIAARDLICAQKFNGLTVLPPLLTDEMIAQYTSALLAGTITSGWTFGAGAALQIPFAMQMAYRFNGIGVTQNVLYENQKLIANQFNSAIGKIQDSLSSTASALGKLQDVVNQNAQALNTLVKQLSSNFGAISSVLNDILSRLDPPEAEVQIDRLITGRLQSLQTYVTQQLIRAAEIRASANLAATKMSECVLGQSKRVDFCGKGYQLMSFPQSAPHGVVFLNVTYVPAQEKNFTTAPAICNDGKAHFPREGVFVSNGTNWFVTQRNFYEPQIITTDNTFVSGNCDVVIGIVNNTVYDPLQPELDSFKEELDKYFKNHTSPDVDLGDISGINASVVNIQKEIDRLNEVAKNLNESLIDLQELGKYEQYIKGGSGYIPEAPRDGQAYVRKDGEWVLLSTFL

SEQ ID NO: 5912 - protein, 1241 aa, Artificial Sequence
  SARS-CoV-2/Australia/QLD02/2020__EPI_ISL_407896 spike protein (1-1211)(K986P_V987P_ H1048Q_H1064N_ H1083N_H1101N) Foldon construct
MFVFLVLLPLVSSQCVNLTTRTQLPPAYTNSFTRGVYYPDKVFRSSVLHSTQDLFLPFFSNVTWFHAIHVSGTNGTKRFDNPVLPFNDGVYFASTEKSNIIRGWIFGTTLDSKTQSLLIVNNATNVVIKVCEFQFCNDPFLGVYYHKNNKSWMESEFRVYSSANNCTFEYVSQPFLMDLEGKQGNFKNLREFVFKNIDGYFKIYSKHTPINLVRDLPQGFSALEPLVDLPIGINITRFQTLLALHRSYLTPGDSSSGWTAGAAAYYVGYLQPRTFLLKYNENGTITDAVDCALDPLSETKCTLKSFTVEKGIYQTSNFRVQPTESIVRFPNITNLCPFGEVFNATRFASVYAWNRKRISNCVADYSVLYNSASFSTFKCYGVSPTKLNDLCFTNVYADSFVIRGDEVRQIAPGQTGKIADYNYKLPDDFTGCVIAWNSNNLDSKVGGNYNYLYRLFRKSNLKPFERDISTEIYQAGSTPCNGVEGFNCYFPLQSYGFQPTNGVGYQPYRVVVLSFELLHAPATVCGPKKSTNLVKNKCVNFNFNGLTGTGVLTESNKKFLPFQQFGRDIADTTDAVRDPQTLEILDITPCSFGGVSVITPGTNTSNQVAVLYQDVNCTEVPVAIHADQLTPTWRVYSTGSNVFQTRAGCLIGAEHVNNSYECDIPIGAGICASYQTQTNSPRRARSVASQSIIAYTMSLGAENSVAYSNNSIAIPTNFTISVTTEILPVSMTKTSVDCTMYICGDSTECSNLLLQYGSFCTQLNRALTGIAVEQDKNTQEVFAQVKQIYKTPPIKDFGGFNFSQILPDPSKPSKRSFIEDLLFNKVTLADAGFIKQYGDCLGDIAARDLICAQKFNGLTVLPPLLTDEMIAQYTSALLAGTITSGWTFGAGAALQIPFAMQMAYRFNGIGVTQNVLYENQKLIANQFNSAIGKIQDSLSSTASALGKLQDVVNQNAQALNTLVKQLSSNFGAISSVLNDILSRLDPPEAEVQIDRLITGRLQSLQTYVTQQLIRAAEIRASANLAATKMSECVLGQSKRVDFCGKGYQLMSFPQSAPHGVVFLNVTYVPAQEKNFTTAPAICNDGKAHFPREGVFVSNGTNWFVTQRNFYEPQIITTDNTFVSGNCDVVIGIVNNTVYDPLQLELDSFKEELDKYFKNHTSPDVDLGDISGINASVVNIQKEIDRLNEVAKNLNESLIDLQELGKYEQYIKGGSGYIPEAPRDGQAYVRKDGEWVLLSTFL

SEQ ID NO: 5913 - protein, 1241 aa, Artificial Sequence
  SARS-CoV-2/India/1-31/2020__EPI_ISL_413523 spike protein (1-1211)(K986P_V987P_ H1048Q_H1064N_ H1083N_H1101N) Foldon construct
MFVFLVLLPLVSSQCVNLTTRTQLPPAYTNSFTRGVYYPDKVFRSSVLHSTQDLFLPFFSNVTWFHAIHVSGTNGTKRFDNPVLPFNDGVYFASTEKSNIIRGWIFGTTLDSKTQSLLIVNNATNVVIKVCEFQFCNDPFLGVYYHKNNKSWMESEFRVYSSANNCTFEYVSQPFLMDLEGKQGNFKNLREFVFKNIDGYFKIYSKHTPINLVRDLPQGFSALEPLVDLPIGINITRFQTLLALHRSYLTPGDSSSGWTAGAAAYYVGYLQPRTFLLKYNENGTITDAVDCALDPLSETKCTLKSFTVEKGIYQTSNFRVQPTESIVRFPNITNLCPFGEVFNATRFASVYAWNRKRISNCVADYSVLYNSASFSTFKCYGVSPTKLNDLCFTNVYADSFVIRGDEVRQIAPGQTGKIADYNYKLPDDFTGCVIAWNSNNLDSKVGGNYNYLYRLFRKSNLKPFERDISTEIYQAGSTPCNGVEGFNCYFPLQSYGFQPTNGVGYQPYRVVVLSFELLHAPATVCGPKKSTNLVKNKCVNFNFNGLTGTGVLTESNKKFLPFQQFGRDIADTTDAVRDPQTLEILDITPCSFGGVSVITPGTNTSNQVAVLYQDVNCTEVPVAIHADQLTPTWRVYSTGSNVFQTRAGCLIGAEHVNNSYECDIPIGAGICASYQTQTNSPRRARSVASQSIIAYTMSLGAENSVAYSNNSIAIPTNFTISVTTEILPVSMTKTSVDCTMYICGDSTECSNLLLQYGSFCTQLNRALTGIAVEQDKNTQEVFAQVKQIYKTPPIKDFGGFNFSQILPDPSKPSKRSFIEDLLFNKVTLADAGFIKQYGDCLGDIAARDLICAQKFNGLTVLPPLLTDEMIAQYTSALLAGTITSGWTFGAGAALQIPFAMQMAYRFNGIGVTQNVLYENQKLIANQFNSVIGKIQDSLSSTASALGKLQDVVNQNAQALNTLVKQLSSNFGAISSVLNDILSRLDPPEAEVQIDRLITGRLQSLQTYVTQQLIRAAEIRASANLAATKMSECVLGQSKRVDFCGKGYQLMSFPQSAPHGVVFLNVTYVPAQEKNFTTAPAICNDGKAHFPREGVFVSNGTNWFVTQRNFYEPQIITTDNTFVSGNCDVVIGIVNNTVYDPLQPELDSFKEELDKYFKNHTSPDVDLGDISGINASVVNIQKEIDRLNEVAKNLNESLIDLQELGKYEQYIKGGSGYIPEAPRDGQAYVRKDGEWVLLSTFL

SEQ ID NO: 5914 - protein, 1241 aa, Artificial Sequence
  SARS-CoV-2/Guangdong/GD2020087-P0008/2020__EPI_ISL_413863 spike protein (1-1211)(K986P_V987P_ H1048Q_H1064N_ H1083N_H1101N) Foldon construct
MFVFLVLLPLVSSQCVNLTTRTQLPPAYTNSFTRGVYYPDKVFRSSVLHSTQDLFLPFFSNVTWFHAIHVSGTNGTKRFDNPVLPFNDGVYFASTEKSNIIRGWIFGTTLDSKTQSLLIVNNATNVVIKVCEFQFCNDPFLGVYYHKNNKSWMESEFRVYSSANNCTFEYVSQPFLMDLEGKQGNFKNLREFVFKNIDGYFKIYSKHTPINLVRDLPQGFSALEPLVDLPIGINITRFQTLLALHRSYLTPGDSSSGWTAGAAAYYVGYLQPRTFLLKYNENGTITDAVDCALDPLSETKCTLKSFTVEKGIYQTSNFRVQPTESIVRFPNITNLCPFGEVFNATRFASVYAWNRKRISNCVADYSVLYNSASFSTFKCYGVSPTKLNDLCFTNVYADSFVIRGDEVREIAPGQTGKIADYNYKLPDDFTGCVIAWNSNNLDSKVGGNYNYLYRLFRKSNLKPFERDISTEIYQAGSTPCNGVEGFNCYFPLQSYGFQPTNGVGYQPYRVVVLSFELLHAPATVCGPKKSTNLVKNKCVNFNFNGLTGTGVLTESNKKFLPFQQFGRDIADTTDAVRDPQTLEILDITPCSFGGVSVITPGTNTSNQVAVLYQDVNCTEVPVAIHADQLTPTWRVYSTGSNVFQTRAGCLIGAEHVNNSYECDIPIGAGICASYQTQTNSPRRARSVASQSIIAYTMSLGAENSVAYSNNSIAIPTNFTISVTTEILPVSMTKTSVDCTMYICGDSTECSNLLLQYGSFCTQLNRALTGIAVEQDKNTQEVFAQVKQIYKTPPIKDFGGFNFSQILPDPSKPSKRSFIEDLLFNKVTLADAGFIKQYGDCLGDIAARDLICAQKFNGLTVLPPLLTDEMIAQYTSALLAGTITSGWTFGAGAALQIPFAMQMAYRFNGIGVTQNVLYENQKLIANQFNSAIGKIQDSLSSTASALGKLQDVVNQNAQALNTLVKQLSSNFGAISSVLNDILSRLDPPEAEVQIDRLITGRLQSLQTYVTQQLIRAAEIRASANLAATKMSECVLGQSKRVDFCGKGYQLMSFPQSAPHGVVFLNVTYVPAQEKNFTTAPAICNDGKAHFPREGVFVSNGTNWFVTQRNFYEPQIITTDNTFVSGNCDVVIGIVNNTVYDPLQPELDSFKEELDKYFKNHTSPDVDLGDISGINASVVNIQKEIDRLNEVAKNLNESLIDLQELGKYEQYIKGGSGYIPEAPRDGQAYVRKDGEWVLLSTFL

SEQ ID NO: 5915 - protein, 1241 aa, Artificial Sequence
  SARS-CoV-2/Sweden/01/2020__EPI_ISL_411951 spike protein (1-1211)(K986P_V987P_ H1048Q_H1064N_ H1083N_H1101N) Foldon construct
MFVFLVLLPLVSSQCVNLTTRTQLPPAYTNSFTRGVYYPDKVFRSSVLHSTQDLFLPFFSNVTWFHAIHVSGTNGTKRFDNPVLPFNDGVYFASTEKSNIIRGWIFGTTLDSKTQSLLIVNNATNVVIKVCEFQFCNDPFLGVYYHKNNKSWMESEFRVYSSANNCTFEYVSQPFLMDLEGKQGNFKNLREFVFKNIDGYFKIYSKHTPINLVRDLPQGFSALEPLVDLPIGINITRFQTLLALHRSYLTPGDSSSGWTAGAAAYYVGYLQPRTFLLKYNENGTITDAVDCALDPLSETKCTLKSFTVEKGIYQTSNFRVQPTESIVRFPNITNLCPFGEVFNATRFASVYAWNRKRISNCVADYSVLYNSASFSTFKCYGVSPTKLNDLCFTNVYADSFVIRGDEVRQIAPGQTGKIADYNYKLPDDFTGCVIAWNSNNLDSKVGGNYNYLYRLFRKSNLKPFERDISTEIYQAGSTPCNGVEGFNCYFPLQSYGFQPTNGVGYQPYRVVVLSFELLHAPATVCGPKKSTNLVKNKCVNFNFNGLTGTGVLTESNKKFLPFQQFGRDIADTTDAVRDPQTLEILDITPCSFGGVSVITPGTNTSNQVAVLYQDVNCTEVPVAIHADQLTPTWRVYSTGSNVFQTRAGCLIGAEHVNNSYECDIPIGAGICASYQTQTNSPRRARSVASQSIIAYTMSLGAENSVAYSNNSIAIPTNFTISVTTEILPVSMTKTSVDCTMYICGDSTECSNLLLQYGSFCTQLNRALTGIAVEQDKNTQEVFAQVKQIYKTPPIKDCGGFNFSQILPDPSKPSKRSFIEDLLFNKVTLADAGFIKQYGDCLGDIAARDLICAQKFNGLTVLPPLLTDEMIAQYTSALLAGTITSGWTFGAGAALQIPFAMQMAYRFNGIGVTQNVLYENQKLIANQFNSAIGKIQDSLSSTASALGKLQDVVNQNAQALNTLVKQLSSNFGAISSVLNDILSRLDPPEAEVQIDRLITGRLQSLQTYVTQQLIRAAEIRASANLAATKMSECVLGQSKRVDFCGKGYQLMSFPQSAPHGVVFLNVTYVPAQEKNFTTAPAICNDGKAHFPREGVFVSNGTNWFVTQRNFYEPQIITTDNTFVSGNCDVVIGIVNNTVYDPLQPELDSFKEELDKYFKNHTSPDVDLGDISGINASVVNIQKEIDRLNEVAKNLNESLIDLQELGKYEQYIKGGSGYIPEAPRDGQAYVRKDGEWVLLSTFL

SEQ ID NO: 5916 - protein, 1241 aa, Artificial Sequence
  SARS-CoV-2/Tianmen/HBCDC-HB-07/2020__EPI_ISL_412983 spike protein (1-1211)(K986P_V987P_ H1048Q_H1064N_ H1083N_H1101N) Foldon construct
MFVFLVLLPLVSSQCVNLTTRTQLPPAYTNSFTRGVYYPDKVFRSSVLHSTQDLFLPFFSNVTWFHAIHVSGTNGTKRFDNPVLPFNDGVYFASTEKSNIIRGWIFGTTLDSKTQSLLIVNNATNVVIKVCEFQFCNDPFLGVYYHKNNKSWMESEFRVYSSANNCTFEYVSQPFLMDLEGKQGNFKNLREFVFKNIDGYFKIYSKHTPINLVRDLPQGFSALEPLVDLPIGINITRFQTLLALHRSYLTPGDSSSGWTAGAAAYYVGYLQPRTFLLKYNENGTITDAVDCALDPLSETKCTLKSFTVEKGIYQTSNFRVQPTESIVRFPNITNLCPFGEVFNATRFASVYAWNRKRISNCVADYSVLYNSASFSTFKCYGVSPTKLNDLCFTNVYADSFVIRGDEVRQIAPGQTGKIADYNYKLPDDFTGCVIAWNSNNLDSKVGGNYNYLYRLFRKSNLKPFERDISTEIYQAGSTPCNGVEGFNCYFPLQSYGFQPTNGVGYQPYRVVVLSFELLHAPATVCGPKKSTNLVKNKCVNFNFNGLTGTGVLTESNKKFLPFQQFGRDIADTTDAVRDPQTLEILDITPCSFGGVSVITPGTNTSNQVAVLYQDLNCTEVPVAIHADQLTPTWRVYSTGSNVFQTRAGCLIGAEHVNNSYECDIPIGAGICASYQTQTNSPRRARSVASQSIIAYTMSLGAENSVAYSNNSIAIPTNFTISVTTEILPVSMTKTSVDCTMYICGDSTECSNLLLQYGSFCTQLNRALTGIAVEQDKNTQEVFAQVKQIYKTPPIKDFGGFNFSQILPDPSKPSKRSFIEDLLFNKVTLADAGFIKQYGDCLGDIAARDLICAQKFNGLTVLPPLLTDEMIAQYTSALLAGTITSGWTFGAGAALQIPFAMQMAYRFNGIGVTQNVLYENQKLIANQFNSAIGKIQDSLSSTASALGKLQDVVNQNAQALNTLVKQLSSNFGAISSVLNDILSRLDPPEAEVQIDRLITGRLQSLQTYVTQQLIRAAEIRASANLAATKMSECVLGQSKRVDFCGKGYQLMSFPQSAPHGVVFLNVTYVPAQEKNFTTAPAICNDGKAHFPREGVFVSNGTNWFVTQRNFYEPQIITTDNTFVSGNCDVVIGIVNNTVYDPLQPELDSFKEELDKYFKNHTSPDVDLGDISGINASVVNIQKEIDRLNEVAKNLNESLIDLQELGKYEQYIKGGSGYIPEAPRDGQAYVRKDGEWVLLSTFL

SEQ ID NO: 5917 - protein, 1241 aa, Artificial Sequence
  SARS-CoV-2/Hong Kong/case42_VM20002493/2020__EPI_ISL_414527 spike protein (1-1211)(K986P_V987P_ H1048Q_H1064N_ H1083N_H1101N) Foldon construct
MFVFLVLLPLVSSQCVNLTTRTQLPPAYTNSFTRGVYYPDKVFRSSVLHSTQDLFLPFFSNVTWFHAIHVSGTNGTKRFDNPVLPFNDGVYFASTEKSNIIRGWIFGTTLDSKTQSLLIVNNATNVVIKVCEFQFCNDPFLGVYYHKNNKSWMESEFRVYSSANNCTFEYVSQPFLMDLEGKQGNFKNLREFVFKNIDGYFKIYSKHTPINLVRDLPQGFSALEPLVDLPIGINITRFQTLLALHRSYLTPGDSSSGWTAGAAAYYVGYLQPRTFLLKYNENGTITDAVDCALDPLSETKCTLKSFTVEKGIYQTSNFRVQPTESIVRFPNITNLCPFGEVFNATRFASVYAWNRKRISNCVADYSVLYNSASFSTFKCYGVSPTKLNDLCFTNVYADSFVIRGDEVRQIAPGQTGKIADYNYKLPDDFTGCVIAWNSNNLDSKVGGNYNYLYRLFRKSNLKPFERDISTEIYQAGSTPCNGVEGFNCYFPLQSYGFQPTNGVGYQPYRVVVLSFELLHAPATVCGPKKSTNLVKNKCVNFNFNGLTGTGVLTESNKKFLPFQQFGRDIADTTDAVRDPQTLEILDITPCSFGGVSVITPGTNTSNQVAVLYQDVNCTEVPVAIHADQLTPTWRVYSTGSNVFQTRAGCLIGAEHVNNSYECDIPIGAGICASYQTQTNSPRRARSVASQSIIAYTMSLGAENSVAYSNNSIAIPTNFAISVTTEILPVSMTKTSVDCTMYICGDSTECSNLLLQYGSFCTQLNRALTGIAVEQDKNTQEVFAQVKQIYKTPPIKDFGGFNFSQILPDPSKPSKRSFIEDLLFNKVTLADAGFIKQYGDCLGDIAARDLICAQKFNGLTVLPPLLTDEMIAQYTSALLAGTITSGWTFGAGAALQIPFAMQMAYRFNGIGVTQNVLYENQKLIANQFNSAIGKIQDSLSSTASALGKLQDVVNQNAQALNTLVKQLSSNFGAISSVLNDILSRLDPPEAEVQIDRLITGRLQSLQTYVTQQLIRAAEIRASANLAATKMSECVLGQSKRVDFCGKGYQLMSFPQSAPHGVVFLNVTYVPAQEKNFTTAPAICNDGKAHFPREGVFVSNGTNWFVTQRNFYEPQIITTDNTFVSGNCDVVIGIVNNTVYDPLQPELDSFKEELDKYFKNHTSPDVDLGDISGINASVVNIQKEIDRLNEVAKNLNESLIDLQELGKYEQYIKGGSGYIPEAPRDGQAYVRKDGEWVLLSTFL

SEQ ID NO: 5918 - protein, 1241 aa, Artificial Sequence
  SARS-CoV-2/USA/CruiseA-23/2020__EPI_ISL_414482 spike protein (1-1211)(K986P_V987P_ H1048Q_H1064N_ H1083N_H1101N) Foldon construct
MFVFLVLLPLVSSQCVNLTTRTQLPPAYTNSFTRGVYYPDKVFRSSVLHSTQDLFLPFFSNVTWFHAIHVSGTNGTKRFDNPVLPFNDGVYFASTEKSNIIRGWIFGTTLDSKTQSLLIVNNATNVVIKVCEFQFCNDPFLGVYYHKNNKSWMESEFRVYSSANNCTFEYVSQPFLMDLEVKQGNFKNLREFVFKNIDGYFKIYSKHTPINLVRDLPQGFSALEPLVDLPIGINITRFQTLLALHRSYLTPGDSSSGWTAGAAAYYVGYLQPRTFLLKYNENGTITDAVDCALDPLSETKCTLKSFTVEKGIYQTSNFRVQPTESIVRFPNITNLCPFGEVFNATRFASVYAWNRKRISNCVADYSVLYNSASFSTFKCYGVSPTKLNDLCFTNVYADSFVIRGDEVRQIAPGQTGKIADYNYKLPDDFTGCVIAWNSNNLDSKVGGNYNYLYRLFRKSNLKPFERDISTEIYQAGSTPCNGVEGFNCYFPLQSYGFQPTNGVGYQPYRVVVLSFELLHAPATVCGPKKSTNLVKNKCVNFNFNGLTGTGVLTESNKKFLPFQQFGRDIADTTDAVRDPQTLEILDITPCSFGGVSVITPGTNTSNQVAVLYQDVNCTEVPVAIHADQLTPTWRVYSTGSNVFQTRAGCLIGAEHVNNSYECDIPIGAGICASYQTQTNSPRRARSVASQSIIAYTMSLGAENSVAYSNNSIAIPTNFTISVTTEILPVSMTKTSVDCTMYICGDSTECSNLLLQYGSFCTQLNRALTGIAVEQDKNTQEVFAQVKQIYKTPPIKDFGGFNFSQILPDPSKPSKRSFIEDLLFNKVTLADAGFIKQYGDCLGDIAARDLICAQKFNGLTVLPPLLTDEMIAQYTSALLAGTITSGWTFGAGAALQIPFAMQMAYRFNGIGVTQNVLYENQKLIANQFNSAIGKIQDSLSSTASALGKLQDVVNQNAQALNTLVKQLSSNFGAISSVLNDILSRLDPPEAEVQIDRLITGRLQSLQTYVTQQLIRAAEIRASANLAATKMSECVLGQSKRVDFCGKGYQLMSFPQSAPHGVVFLNVTYVPAQEKNFTTAPAICNDGKAHFPREGVFVSNGTNWFVTQRNFYEPQIITTDNTFVSGNCDVVIGIVNNTVYDPLQPELDSFKEELDKYFKNHTSPDVDLGDISGINASVVNIQKEIDRLNEVAKNLNESLIDLQELGKYEQYIKGGSGYIPEAPRDGQAYVRKDGEWVLLSTFL

SEQ ID NO: 5919 - protein, 1241 aa, Artificial Sequence
  SARS-CoV-2/Hong Kong/case85_VM20002868/2020__EPI_ISL_414519 spike protein (1-1211)(K986P_V987P_ H1048Q_H1064N_ H1083N_H1101N) Foldon construct
MFVFLVLVPLVSSQCVNLTTRTQLPPAYTNSFTRGVYYPDKVFRSSVLHSTQDLFLPFFSNVTWFHAIHVSGTNGTKRFDNPVLPFNDGVYFASTEKSNIIRGWIFGTTLDSKTQSLLIVNNATNVVIKVCEFQFCNDPFLGVYYHKNNKSWMESEFRVYSSANNCTFEYVSQPFLMDLEGKQGNFKNLREFVFKNIDGYFKIYSKHTPINLVRDLPQGFSALEPLVDLPIGINITRFQTLLALHRSYLTPGDSSSGWTAGAAAYYVGYLQPRTFLLKYNENGTITDAVDCALDPLSETKCTLKSFTVEKGIYQTSNFRVQPTESIVRFPNITNLCPFGEVFNATRFASVYAWNRKRISNCVADYSVLYNSASFSTFKCYGVSPTKLNDLCFTNVYADSFVIRGDEVRQIAPGQTGKIADYNYKLPDDFTGCVIAWNSNNLDSKVGGNYNYLYRLFRKSNLKPFERDISTEIYQAGSTPCNGVEGFNCYFPLQSYGFQPTNGVGYQPYRVVVLSFELLHAPATVCGPKKSTNLVKNKCVNFNFNGLTGTGVLTESNKKFLPFQQFGRDIADTTDAVRDPQTLEILDITPCSFGGVSVITPGTNTSNQVAVLYQDVNCTEVPVAIHADQLTPTWRVYSTGSNVFQTRAGCLIGAEHVNNSYECDIPIGAGICASYQTQTNSPRRARSVASQSIIAYTMSLGAENSVAYSNNSIAIPTNFTISVTTEILPVSMTKTSVDCTMYICGDSTECSNLLLQYGSFCTQLNRALTGIAVEQDKNTQEVFAQVKQIYKTPPIKDFGGFNFSQILPDPSKPSKRSFIEDLLFNKVTLADAGFIKQYGDCLGDIAARDLICAQKFNGLTVLPPLLTDEMIAQYTSALLAGTITSGWTFGAGAALQIPFAMQMAYRFNGIGVTQNVLYENQKLIANQFNSAIGKIQDSLSSTASALGKLQDVVNQNAQALNTLVKQLSSNFGAISSVLNDILSRLDPPEAEVQIDRLITGRLQSLQTYVTQQLIRAAEIRASANLAATKMSECVLGQSKRVDFCGKGYQLMSFPQSAPHGVVFLNVTYVPAQEKNFTTAPAICNDGKAHFPREGVFVSNGTNWFVTQRNFYEPQIITTDNTFVSGNCDVVIGIVNNTVYDPLQPELDSFKEELDKYFKNHTSPDVDLGDISGINASVVNIQKEIDRLNEVAKNLNESLIDLQELGKYEQYIKGGSGYIPEAPRDGQAYVRKDGEWVLLSTFL

SEQ ID NO: 5920 - protein, 1241 aa, Artificial Sequence; identical to SEQ ID NO: 5910
  SARS-CoV-2/England/200990660/2020__EPI_ISL_414523 spike protein (1-1211)(K986P_V987P_ H1048Q_H1064N_ H1083N_H1101N) Foldon construct

SEQ ID NO: 5921 - protein, 1241 aa, Artificial Sequence
  SARS-CoV-2/Australia/NSW09/2020__EPI_ISL_413595 spike protein (1-1211)(K986P_V987P_ H1048Q_H1064N_ H1083N_H1101N) Foldon construct
MFVFLVLLPLVSSQCVNLTTRTQLPPAYTNSFTRGVYYPDKVFRSSVLHSTQDLFLPFFSNVTWFHAIHVSGTNGTKRFDNPVLPFNDGVYFASTEKSNIIRGWIFGTTLDSKTQSLLIVNNATNVVIKVCEFQFCNDPFLGVYYHKNNKSWMESEFRVYSSANNCTFEYVSQPFLMDLEGKQGNFKNLREFVFKNIDGYFKIYSKHTPINLVRDLPQGFSALEPLVDLPIGINITRFQTLLALHRSYLTPGDSSSGWTAGAAAYYVGYLQPRTFLLKYNENGTITDAVDCALDPLSETKCTLKSFTVEKGIYQTSNFRVQPTESIVRFPNITNLCPFGEVFNATRFASVYAWNRKRISNCVADYSVLYNSASFSTFKCYGVSPTKLNDLCFTNVYADSFVIRGDEVRQIAPGQTGKIADYNYKLPDDFTGCVIAWNSNNLDSKVGGNYNYLYRLFRKSNLKPFERDISTEIYQAGSTPCNGVEGFNCYFPLQSYGFQPTNGVGYQPYRVVVLSFELLHAPATVCGPKKSTNLVKNKCVNFNFNGLTGTGVLTESNKKFLPFQQFGRDIADTTDAVRDPQTLEILDITPCSFGGVSVITPGTNTSNQVAVLYQDVNCTEVPVAIHADQLTPTWRVYSTGSNVFQTRAGCLIGAEHVNNSYECDIPIGAGICASYQTQTNSPRRARSVASQSIIAYTMSLGAENSVAYSNNSIAIPTNFTISVTTEILPVSMTKTSVDCTMYICGDSTECSNLLLQYGSFCTQLNRALTGIAVEQDKNTQEVFAQVKQIYKTPPIKDFGGFNFSQILPDPSKPSKRSFIEDLLFNKVTLADAGFIKQYGDCLGDIAARDLICAQKFNGLTVLPPLLTDEMIAQYTSALLAGTITSGWTFGAGAALQIPFAMQMAYRFNGIGVTQNVLYENQKLIANQFNSAIGKIQDSLSFTASALGKLQDVVNQNAQALNTLVKQLSSNFGAISSVLNDILSRLDPPEAEVQIDRLITGRLQSLQTYVTQQLIRAAEIRASANLAATKMSECVLGQSKRVDFCGKGYQLMSFPQSAPHGVVFLNVTYVPAQEKNFTTAPAICNDGKAHFPREGVFVSNGTNWFVTQRNFYEPQIITTDNTFVSGNCDVVIGIVNNTVYDPLQPELDSFKEELDKYFKNHTSPDVDLGDISGINASVVNIQKEIDRLNEVAKNLNESLIDLQELGKYEQYIKGGSGYIPEAPRDGQAYVRKDGEWVLLSTFL

SEQ ID NO: 5922 - protein, 1241 aa, Artificial Sequence; identical to SEQ ID NO: 5902
  SARS-CoV-2/Australia/NSW10/2020__EPI_ISL_413596 spike protein (1-1211)(K986P_V987P_ H1048Q_H1064N_ H1083N_H1101N) Foldon construct

SEQ ID NO: 5923 - protein, 1241 aa, Artificial Sequence
  SARS-CoV-2/Switzerland/1000477797/2020__EPI_ISL_413023 spike protein (1-1211)(K986P_V987P_ H1048Q_H1064N_ H1083N_H1101N) Foldon construct
MFVFLVLLPLVSSQCVNLTTRTQLPPAYTNSFTRGVYYPDKVFRSSVLHSTQDLFLPFFSNVTWFHAIHVSGTNGTKRFDNPVLPFNDGVYFASTEKSNIIRGWIFGTTLDSKTQSLLIVNNATNVVIKVCEFQFCNDPFLGVYYHKNNKSWMESEFRVYSSANNCTFEYVSQPFLMDLEGKQGNFKNLREFVFKNIDGYFNIYSKHTPINLVRDLPQGFSALEPLVDLPIGINITRFQTLLALHRSYLTPGDSSSGWTAGAAAYYVGYLQPRTFLLKYNENGTITDAVDCALDPLSETKCTLKSFTVEKGIYQTSNFRVQPTESIVRFPNITNLCPFGEVFNATRFASVYAWNRKRISNCVADYSVLYNSASFSTFKCYGVSPTKLNDLCFTNVYADSFVIRGDEVRQIAPGQTGKIADYNYKLPDDFTGCVIAWNSNNLDSKVGGNYNYLYRLFRKSNLKPFERDISTEIYQAGSTPCNGVEGFNCYFPLQSYGFQPTNGVGYQPYRVVVLSFELLHAPATVCGPKKSTNLVKNKCVNFNFNGLTGTGVLTESNKKFLPFQQFGRDIADTTDAVRDPQTLEILDITPCSFGGVSVITPGTNTSNQVAVLYQGVNCTEVPVAIHADQLTPTWRVYSTGSNVFQTRAGCLIGAEHVNNSYECDIPIGAGICASYQTQTNSPRRARSVASQSIIAYTMSLGAENSVAYSNNSIAIPTNFTISVTTEILPVSMTKTSVDCTMYICGDSTECSNLLLQYGSFCTQLNRALTGIAVEQDKNTQEVFAQVKQIYKTPPIKDFGGFNFSQILPDPSKPSKRSFIEDLLFNKVTLADAGFIKQYGDCLGDIAARDLICAQKFNGLTVLPPLLTDEMIAQYTSALLAGTITSGWTFGAGAALQIPFAMQMAYRFNGIGVTQNVLYENQKLIANQFNSAIGKIQDSLSSTASALGKLQDVVNQNAQALNTLVKQLSSNFGAISSVLNDILSRLDPPEAEVQIDRLITGRLQSLQTYVTQQLIRAAEIRASANLAATKMSECVLGQSKRVDFCGKGYQLMSFPQSAPHGVVFLNVTYVPAQEKNFTTAPAICNDGKAHFPREGVFVSNGTNWFVTQRNFYEPQIITTDNTFVSGNCDVVIGIVNNTVYDPLQPELDSFKEELDKYFKNHTSPDVDLGDISGINASVVNIQKEIDRLNEVAKNLNESLIDLQELGKYEQYIKGGSGYIPEAPRDGQAYVRKDGEWVLLSTFL

SEQ ID NO: 5924 - protein, 1241 aa, Artificial Sequence
  SARS-CoV-2/Belgium/BA-02291/2020__EPI_ISL_415159 spike protein (1-1211)(K986P_V987P_ H1048Q_H1064N_ H1083N_H1101N) Foldon construct
MFVFLVLLPLVSSQCVNLTTRTQLPPAYTNSFTRGVYYPDKVFRSSVLHSTQDLFLPFFSNVTWFHAIHVSGTNGTKRFDNPVLPFNDGVYFASTEKSNIIRGWIFGTTLDSKTQSLLIVNNATNVVIKVCEFQFCNDPFLGVYYHKNNKSWMESEFRVYSSANNCTFEYVSQPFLMDLEGKQGNFKNLREFVFKNIDGYFKIYSKHTPINLVRDLPQGFSALEPLVDLPIGINITRFQTLLALHRSYLTPGDSSSGWTAGAAAYYVGYLQPRTFLLKYNENGTITDAVDCALDPLSETKCTLKSFTVEKGIYQTSNFRVQPTESIVRFPNITNLCPFGEVFNATRFASVYAWNRKRISNCVADYSVLYNSASFSTFKCYGVSPTKLNDLCFTNVYADSFVIRGDEVRQIAPGQTGKIADYNYKLPDDFTGCVIAWNSNNLDSKVGGNYNYLYRLFRRSNLKPFERDISTEIYQAGSTPCNGVEGFNCYFPLQSYGFQPTNGVGYQPYRVVVLSFELLPAPATVCGPKKSTNLVKNKCVNFNFNGLTGTGVLTESNKKFLPFQQFGRDIADTTDAVRDPQTLEILDITPCSFGGVSVITPGTNTSNQVAVLYQGVNCTEVPVAIHADQLTPTWRVYSTGSNVFQTRAGCLIGAEHVNNSYECDIPIGAGICASYQTQTNSPRRARSVASQSIIAYTMSLGAENSVAYSNNSIAIPTNFTISVTTEILPVSMTKTSVDCTMYICGDSTECSNLLLQYGSFCTQLNRALTGIAVEQDKNTQEVFAQVKQIYKTPPIKDFGGFNFSQILPDPSKPSKRSFIEDLLFNKVTLADAGFIKQYGDCLGDIAARDLICAQKFNGLTVLPPLLTDEMIAQYTSALLAGTITSGWTFGAGAALQIPFAMQMAYRFNGIGVTQNVLYENQKLIANQFNSAIGKIQDSLSSAAPALGKLQDVVNQNAQALNTLVKQLSSNFGAISSVLNDILSRLDPPEAEVQIDRLITGRLQSLQTYVTQQLIRAAEIRASANLAATKMSECVLGQSKRVDFCGKGYQLMSFPQSAPHGVVFLNVTYVPAQEKNFTTAPAICNDGKAHFPREGVFVSNGTNWFVTQRNFYEPQIITTDNTFVSGNCDVVIGIVNNTVYDPLQPELDSFKEELDKYFKNHTSPDVDLGDISGINASVVNIQKEIDRLNEVAKNLNESLIDLQELGKYEQYIKGGSGYIPEAPRDGQAYVRKDGEWVLLSTFL

SEQ ID NO: 5925 - protein, 1241 aa, Artificial Sequence
  SARS-CoV-2/USA/WA8-UW5/2020__EPI_ISL_413486 spike protein (1-1211)(K986P_V987P_ H1048Q_H1064N_ H1083N_H1101N) Foldon construct
MFVFLVLLPLVSSQCVNLTTRTQLPPAYTNSFTRGVYYPDKVFRSSVLHSTQDLFLPFFSNVTWFHAIHVSGTNGTKRFDNPVLPFNDGVYFASTEKSNIIRGWIFGTTLDSKTQSLLIVNNATNVVIKVCEFQFCNDPFLGVYYHKNNKSWMESEFRVYSSANNCTFEYVSQPFLMDLEGKQGNFKNLREFVFKNIDGYFKIYSKHTPINLVRDLPQGFSALEPLVDLPIGINITRFQTLLALHRSYLTPGDSSSGWTAGAAAYYVGYLQPRTFLLKYNENGTITDAVDCALDPLSETKCTLKSFTVEKGIYQTSNFRVQPTESIVRFPNITNLCPFGEVFNATRFASVYAWNRKRISNCVADYSVLYNSASFSTFKCYGVSPTKLNDLCFTNVYADSFVIRGDEVRQIAPGQTGKIADYNYKLPDDFTGCVIAWNSNNLDSKVGGNYNYLYRLFRKSNLKPFERDISTEIYQAGSTPCNGVEGFNCYFPLQSYGFQPTNGVGYQPYRVVVLSFELLHAPATVCGPKKSTNLVKNKCVNFNFNGLTGTGVLTESNKKFLPFQQFGRDIADTTDAVRDPQTLEILDITPCSFGGVSVITPGTNTSNQVAVLYQDVNCTEVPVAIHADQLTPTWRVYSTGSNVFQTRAGCLIGAEYVNNSYECDIPIGAGICASYQTQTNSPRRARSVASQSIIAYTMSLGAENSVAYSNNSIAIPTNFTISVTTEILPVSMTKTSVDCTMYICGDSTECSNLLLQYGSFCTQLNRALTGIAVEQDKNTQEVFAQVKQIYKTPPIKDFGGFNFSQILPDPSKPSKRSFIEDLLFNKVTLADAGFIKQYGDCLGDIAARDLICAQKFNGLTVLPPLLTDEMIAQYTSALLAGTITSGWTFGAGAALQIPFAMQMAYRFNGIGVTQNVLYENQKLIANQFNSAIGKIQDSLSSTASALGKLQDVVNQNAQALNTLVKQLSSNFGAISSVLNDILSRLDPPEAEVQIDRLITGRLQSLQTYVTQQLIRAAEIRASANLAATKMSECVLGQSKRVDFCGKGYQLMSFPQSAPHGVVFLNVTYVPAQEKNFTTAPAICNDGKAHFPREGVFVSNGTNWFVTQRNFYEPQIITTDNTFVSGNCDVVIGIVNNTVYDPLQPELDSFKEELDKYFKNHTSPDVDLGDISGINASVVNIQKEIDRLNEVAKNLNESLIDLQELGKYEQYIKGGSGYIPEAPRDGQAYVRKDGEWVLLSTFL

SEQ ID NO: 5926 - protein, 1241 aa, Artificial Sequence
  SARS-CoV-2/England/20102000506/2020__EPI_ISL_415147 spike protein (1-1211)(K986P_V987P_ H1048Q_H1064N_ H1083N_H1101N) Foldon construct
MFVFLVLLPLVSSQCVNLTTRTQLPPAYTNSFTRGVYYPDKVFRSSVLHSTQDLFLPFFSNVTWFHAIHVSGTNGTKRFDNPVLPFNDGVYFASTEKSNIIRGWIFGTTLDSKTQSLLIVNNATNVVIKVCEFQFCNDPFLGVYYHKNNKSWMESEFRVYSSANNCTFEYVSQPFLMDLEGKQGNFKNLREFVFKNIDGYFKIYSKHTPINLVRDLPQGFSALEPLVDLPIGINITRFQTLLALHRSYLTPGDSSSGWTAGAAAYYVGYLQPRTFLLKYNENGTITDAVDCALDPLSETKCTLKSFTVEKGIYQTSNFRVQPTESIVRFPNITNLCPFGEVFNATRFASVYAWNRKRISNCVADYSVLYNSASFSTFKCYGVSPTKLNDLCFTNVYADSFVIRGDEVRQIAPGQTGKIADYNYKLPDDFTGCVIAWNSNNLDSKVGGNYNYLYRLFRKSNLKPFERDISTEIYQAGSTPCNGVEGFNCYFPLQSYGFQPTNGVGYQPYRVVVLSFELLHAPATVCGPKKSTNLVKNKCVNFNFNGLTGTGVLTESNKKFLPFQQFGRDIADTTDAVRDPQTLEILDITPCSFGGVSVITPGTNTSNQVAVLYQGVNCTEVPVAIHADQLTPTWRVYSTGSNVFQTRAGCLIGAEHVNNSYECDIPIGAGICASYQTQTNSPRRARSVASQSIIAYTMSLGAENSVAYSNNSIAIPTNFTISVTTEILPVSMTKTSVDCTMYICGDSTECSNLLLQYGSFCTQLNRALTGIAVEQDKNTQEVFAQVKQIYKTPPIKDFGGFNFSQILPDPSKPSKRSFIEDLLFNKVTLADAGFIKQYGYCLGDIAARDLICAQKFNGLTVLPPLLTDEMIAQYTSALLAGTITSGWTFGAGAALQIPFAMQMAYRFNGIGVTQNVLYENQKLIANQFNSAIGKIQDSLSSTASALGKLQDVVNQNAQALNTLVKQLSSNFGAISSVLNDILSRLDPPEAEVQIDRLITGRLQSLQTYVTQQLIRAAEIRASANLAATKMSECVLGQSKRVDFCGKGYQLMSFPQSAPHGVVFLNVTYVPAQEKNFTTAPAICNDGKAHFPREGVFVSNGTNWFVTQRNFYEPQIITTDNTFVSGNCDVVIGIVNNTVYDPLQPELDSFKEELDKYFKNHTSPDVDLGDISGINASVVNIQKEIDRLNEVAKNLNESLIDLQELGKYEQYIKGGSGYIPEAPRDGQAYVRKDGEWVLLSTFL

SEQ ID NO: 5927 - protein, 1241 aa, Artificial Sequence
  SARS-CoV-2/Belgium/VAG-03013/2020__EPI_ISL_415155 spike protein (1-1211)(K986P_V987P_ H1048Q_H1064N_ H1083N_H1101N) Foldon construct
MFVFLVLLPLVSSQCVNLTTRTQLPPAYTNSFTRGVYYPDKVFRSSVLHSTQDLFLPFFSNVTWFHAIHVSGTNGTKRFDNPVLPFNDGVYFASTEKSNIIRGWIFGTTLDSKTQSLLIVNNATNVVIKVCEFQFCNDPFLGVYYHKNNKSWMESEFRVYSSANNCTFEYVSQPFLMDLEGKQGNFKNLREFVFKNIDGYFKIYSKHTPINLVRDLPQGFSALEPLVDLPIGINITRFQTLLALHRSYLTPGDSSSGWTAGAAAYYVGYLQPRTFLLKYNENGTITDAVDCALDPLSETKCTLKSFTVEKGIYQTSNFRVQPTESIVRFPNITNLCPFGEVFNATRFASVYAWNRKRISNCVADYSVLYNSASFSTFKCYGVSPTKLNDLCFTNVYADSFVIRGDEVRQIAPGQTGKIADYNYKLPDDFTGCVIAWNSNNLDSKVGGNYNYLYRLFRKSNLKPFERDISTEIYQAGSTPCNGVEGFNCYFPLQSYGFQPTNGVGYQPYRVVVLSFELLHAPATVCGPKKSTNLVKNKCVNFNFNGLTGTGVLTESNKKFLPFQQFGRDIADTTDAVRDPQTLEILDITPCSFGGVSVITPGTNTSNQVAVLYQGVNCTEVPVAIHADQLTPTWRVYSTGSNVFQTRAGCLIGAEHVNNSYECDIPIGAGICASYQTQTNSPRRARSVASQSIIAYTMSLGAENSVAYSNNSIAIPTNFTISVTTEILPVSMTKTSVDCTMYICGDSTECSNLLLQYGSFCTQLNRALTGIAVEQDKNTQEVFAQVKQIYKTPPIKDFGGFNFSQILPDPSKPSKRSFIEDLLFNKVTLADAGFIKQYGDCLGDIAARDLICAQKFNGLTVLPPLLTDEMIAQYTSALLAGTITSGWTFGAGAALQIPFAMQMAYRFNGIGVTQNVLYENQKLIANQFNSAIGKIQDSLSSTATALGKLQDVVNQNAQALNTLVKQLSSNFGAISSVLNDILSRLDPPEAEVQIDRLITGRLQSLQTYVTQQLIRAAEIRASANLAATKMSECVLGQSKRVDFCGKGYQLMSFPQSAPHGVVFLNVTYVPAQEKNFTTAPAICNDGKAHFPREGVFVSNGTNWFVTQRNFYEPQIITTDNTFVSGNCDVVIGIVNNTVYDPLQPELDSFKEELDKYFKNHTSPDVDLGDISGINASVVNIQKEIDRLNEVAKNLNESLIDLQELGKYEQYIKGGSGYIPEAPRDGQAYVRKDGEWVLLSTFL

SEQ ID NO: 5928 - protein, 1241 aa, Artificial Sequence
  SARS-CoV-2/Belgium/BC-03016/2020__EPI_ISL_415157 spike protein (1-1211)(K986P_V987P_ H1048Q_H1064N_ H1083N_H1101N) Foldon construct
MFVFLVLLPLVSSQCVNLTTRTQLPPAYTNSFTRGVYYPDKVFRSSVLHSTQDLFLPFFSNVTWFHAIHVSGTNGTKRFDNPVLPFNDGVYFASTEKSNIIRGWIFGTTLDSKTQSLLIVNNATNVVIKVCEFQFCNDPFLGVYYHKNNKSWMESEFRVYSSANNCTFEYVSQPFLMDLEGKQGNFKNLREFVFKNIDGYFKIYSKHTPINLVRDLPQGFSALEPLVDLPIGINITRFQTLLALHRSYLTPGDSSSGWTAGAAAYYVGYLQPRTFLLKYNENGTITDAVDCALDPLSETKCTLKSFTVEKGIYQTSNFRVQPTESIVRFPNITNLCPFGEVFNATRFASVYAWNRKRISNCVADYSVLYNSASFSTFKCYGVSPTKLNDLCFTNVYADSFVIRGDEVRQIAPGQTGKIADYNYKLPDDFTGCVIAWNSNNLDSKVGGNYNYLYRLFRKSNLKPFERDISTEIYQAGSTPCNGVEGFNCYFPLQSYGFQPTNGVGYQPYRVVVLSFELLHAPATVCGPKKSTNLVKNKCVNFNFNGLTGTGVLTESNKKFLPFQQFGRDIADTTDAVRDPQTLEILDITPCSFGGVSVITPGTNTSNQVAVLYQGVNCTEVPVAIHADQLTPTWRVYSTGSNVFQTRAGCLIGAEHVNNSYECDIPIGAGICASYQTQTNSPRRARSVASQSIIAYTMSLGAENSVAYSNNSIAIPTNFTISVTTEILPVSMTKTSVDCTMYICGDSTECSNLLLQYGSFCTQLNRALTGIAVEQDKNTQEVFAQVKQIYKTPPIKDFGGFNFSQILPDPSKPSKRSFIEDLLFNKVTLADAGFIKQYGDCLGDIAARDLICAQKFNGLTVLPPLLTDEMIAQYTSALLAGTITSGWTFGAGAALQIPFAMQMAYRFNGIGVTQNVLYENQKLIANQFNSAIGKIQDSLSSTAPALGKLQDVVNQNAQALNTLVKQLSSNFGAISSVLNDILSRLDPPEAEVQIDRLITGRLQSLQTYVTQQLIRAAEIRASANLAATKMSECVLGQSKRVDFCGKGYQLMSFPQSAPHGVVFLNVTYVPAQEKNFTTAPAICNDGKAHFPREGVFVSNGTNWFVTQRNFYEPQIITTDNTFVSGNCDVVIGIVNNTVYDPLQPELDSFKEELDKYFKNHTSPDVDLGDISGINASVVNIQKEIDRLNEVAKNLNESLIDLQELGKYEQYIKGGSGYIPEAPRDGQAYVRKDGEWVLLSTFL

SEQ ID NO: 5929 - protein, 1241 aa, Artificial Sequence
  SARS-CoV-2/Germany/BavPat3/2020__EPI_ISL_414521 spike protein (1-1211)(K986P_V987P_ H1048Q_H1064N_ H1083N_H1101N) Foldon construct
MFVFLVLLPLVSSQCVNLTTRTQLPPAYTNSFTRGVYYPDKVFRSSVLHSTQDLFLPFFSNVTWFHAIHVSGTNGTKRFDNPVLPFNDGVYFASTEKSNIIRGWIFGTTLDSKTQSLLIVNNATNVVIKVCEFQFCNDPFLGVYYHKNNKSWMESEFRVYSSANNCTFEYVSQPFLMDLEGKQGNFKNLREFVFKNIDGYFKIYSKHTPINLVRDLPQGFSALEPLVDLPIGINITRFQTLLALHRSYLTPGDSSSGWTAGAAAYYVGYLQPRTFLLKYNENGTITDAVDCALDPLSETKCTLKSFTVEKGIYQTSNFRVQPTESIVRFPNITNLCPFGEVFNATRFASVYAWNRKRISNCVADYSVLYNSASFSTFKCYGVSPTKLNDLCFTNVYADSFVIRGDEVRQIAPGQTGKIADYNYKLPDDFTGCVIAWNSNNLDSKVGGNYNYLYRLFRKSNLKPFERDISTEIYQAGSTPCNGVEGFNCYFPLQSYGFQPTNGVGYQPYRVVVLSFELLHAPATVCGPKKSTNLVKNKCVNFNFNGLTGTGVLTESNKKFLPFQQFGRDIADTTDAVRDPQTLEILDITPCSFGGVSVITPGTNTSNQVAVLYQDVNCTEVPVAIHADQLTPTWRVYSTGSNVFQTRAGCLIGAEHVNNSYECDIPIGAGICASYQTQTNSPRRARSVASQSIIAYTMSLGAENSVAYSNNSIAIPTNFTISVTTEILPVSMTKTSVDCTMYICGDSTECSNLLLQYGSFCTQLNRALTGIAVEQDKNTQQVFAQVKQIYKTPPIKDFGGFNFSQILPDPSKPSKRSFIEDLLFNKVTLADAGFIKQYGDCLGDIAARDLICAQKFNGLTVLPPLLTDEMIAQYTSALLAGTITSGWTFGAGAALQIPFAMQMAYRFNGIGVTQNVLYENQKLIANQFNSAIGKIQDSLSSTASALGKLQDVVNQNAQALNTLVKQLSSNFGAISSVLNDILSRLDPPEAEVQIDRLITGRLQSLQTYVTQQLIRAAEIRASANLAATKMSECVLGQSKRVDFCGKGYQLMSFPQSAPHGVVFLNVTYVPAQEKNFTTAPAICNDGKAHFPREGVFVSNGTNWFVTQRNFYEPQIITTDNTFVSGNCDVVIGIVNNTVYDPLQPELDSFKEELDKYFKNHTSPDVDLGDISGINASVVNIQKEIDRLNEVAKNLNESLIDLQELGKYEQYIKGGSGYIPEAPRDGQAYVRKDGEWVLLSTFL

SEQ ID NO: 5930 - protein, 1241 aa, Artificial Sequence
  SARS-CoV-2/France/HF1805/2020__EPI_ISL_414628 spike protein (1-1211)(K986P_V987P_ H1048Q_H1064N_ H1083N_H1101N) Foldon construct
MFVFLVLLPLVSSQCVNLTTRTQLPPAYTNSFTRGVYYPDKVFRSSVLHSTQDLFLPFFSNVTWFHAIHVSGTNGTKRFDNPVLPFNDGVYFASTEKSNIIRGWIFGTTLDSKTQSLLIVNNATNVVIKVCEFQFCNDPFLGVYYHKNNKSWMESEFRVYSSANNCTFEYVSQPFLMDLEGKQGNFKNLREFVFKNIDGYFKIYSKHTPINLVRDLPQGFSALEPLVDLPIGINITRFQTLLALHRSYLTPGDSSSGWTAGAAAYYVGYLQPRTFLLKYNENGTITDAVDCALDPLSETKCTLKSFTVEKGIYQTSNFRVQPTESIVRFPNITNLCPFGEVFNATRFASVYAWNRKRISNCVADYSVLYNSASFSTFKCYGVSPTKLNDLCFTNVYADSFVIRGDEVRQIAPGQTGKIADYNYKLPDDFTGCVIAWNSNNLDSKVGGNYNYLYRLFRKSNLKPFERDISTEIYQAGSTPCNGVEGFNCYFPLQSYGFQPTNGVGYQPYRVVVLSFELLHAPATVCGPKKSTNLVKNKCVNFNFNGLTGTGVLTESNKKFLPFQQFGRDIADTTDAVRDPQTLEILDITPCSFGGVSVITPGTNTSNQVAVLYQGVNCTEVPVAIHADQLTPTWRVYSTGSNVFQTRAGCLIGAEHVNNSYECDIPIGAGICASYQTQTNSPRRARSVASQSIIAYTMSLGAENSVAYSNNSIAIPTNFTISVTTEILPVSMTKTSVDCTMYICGDSTECSNLLLQYGSFCTQLNRALTGIAVEQDKNTQEVFAQVKQIYKTPPIKDFGGFNFSQILPDPSKPSKRSFIEDLLFNKVTLADAGFIKQYGDCLGDIAARDLICAQKFNGLTVLPPLLTDEMIAQYTSALLAGTITSGWTFGAGAALQIPFAMQMAYRFNGIGVTQNVLYENQKLIANQFNSAIGKIQDSLSSTASALGKLQDVVNQNAQALNTLVKQLSSNFGAISSVLNDILSRLDPPEAEVQIDRLITGRLQSLQTYVTQQLIRAAEIRASANLAATKMSECVLGQSKRVDFCGKGYQLMSFPQSAPHGVVFLNVTYVPAQEKNFTTAPAICNDGKAHFPREGVFVSNGTNWFVTQRNFYEPQIITTDNTFVSGNCDVVIGVVNNTVYDPLQPELDSFKEELDKYFKNHTSPDVDLGDISGINASVVNIQKEIDRLNEVAKNLNESLIDLQELGKYEQYIKGGSGYIPEAPRDGQAYVRKDGEWVLLSTFL

SEQ ID NO: 5931 - protein, 1241 aa, Artificial Sequence
  SARS-CoV-2/Netherlands/ZuidHolland_9/2020__EPI_ISL_414445 spike protein (1-1211)(K986P_V987P_ H1048Q_H1064N_ H1083N_H1101N) Foldon construct
MFVFLVLLPLVSSQCVNLTTRTQLPPAYTNSFTRGVYYPDKVFRSSVLHSTQDLFLPFFSNVTWFHAIHVSGTNGTKRFDNPVLPFNDGVYFASTEKSNIIRGWIFGTTLDSKTQSLLIVNNATNVVIKVCEFQFCNDPFLGVYYHKNNKSWMESEFRVYSSANNCTFEYVSQPFLMDLEGKQGNFKNLREFVFKNIDGYFKIYSKHTPINLVRDLPQGFSALEPLVDLPIGINITRFQTLLALHRSYLTPGDSSSGWTAGAAAYYVGYLQPRTFLLKYNENGTITDAVDCALDPLSETKCTLKSFTVEKGIYQTSNFRVQPTESIVRFPNITNLCPFGEVFNATRFASVYAWNRKRISNCVADYSVLYNSASFSTFKCYGVSPTKLNDLCFTNVYADSFVIRGDEVRQIAPGQTGKIADYNYKLPDDFTGCVIAWNSNNLDSKVGGNYNYLYRLFRKSNLKPFERDISTEIYQAGSTPCNGVEGFNCYFPLQSYGFQPTNGVGYQPYRVVVLSFELLHAPATVCGPKKSTNLVKNKCVNFNFNGLTGTGVLTESNKKFLPFQQFGRDIADTTDAVRDPQTLEILDITPCSFGGVSVITPGTNTSNQVAVLYQGVNCTEVPVAIHADQLTPTWRVYSTGSNVFQTRAGCLIGAEHVNNSYECDIPIGAGICASYQTQTNSPRRARSVASQSIIAYTMSLGAENSVAYSNNSIAIPTNFTISVTTEILPVSMTKTSVDCTMYICGDSTECSNLLLQYGSFCTQLNRALTGIAVEQDKNTQEVFAQVKQIYKTPPIKDFGGFNFSQILPDPSKPSKRSFIEDLLFNKVTLADAGFIKQYGDCLGDIAARDLICVQKFNGLTVLPPLLTDEMIAQYTSALLAGTITSGWTFGAGAALQIPFAMQMAYRFNGIGVTQNVLYENQKLIANQFNSAIGKIQDSLSSTASALGKLQDVVNQNAQALNTLVKQLSSNFGAISSVLNDILSRLDPPEAEVQIDRLITGRLQSLQTYVTQQLIRAAEIRASANLAATKMSECVLGQSKRVDFCGKGYQLMSFPQSAPHGVVFLNVTYVPAQEKNFTTAPAICNDGKAHFPREGVFVSNGTNWFVTQRNFYEPQIITTDNTFVSGNCDVVIGIVNNTVYDPLQPELDSFKEELDKYFKNHTSPDVDLGDISGINASVVNIQKEIDRLNEVAKNLNESLIDLQELGKYEQYIKGGSGYIPEAPRDGQAYVRKDGEWVLLSTFL

SEQ ID NO: 5932 - protein, 1241 aa, Artificial Sequence
  SARS-CoV-2/Finland/FIN03032020A/2020__EPI_ISL_413602 spike protein (1-1211)(K986P_V987P_ H1048Q_H1064N_ H1083N_H1101N) Foldon construct
MFVFLVLLPLVSSQCVNLTTRTQLPPAYTNSFTRGVYYPDKVFRSSVLHSTQDLFLPFFSNVTWFHAIHVSGTNGTKRFDNPVLPFNDGVYFASTEKSNIIRGWIFGTTLDSKTQSLLIVNNATNVVIKVCEFQFCNDPFLGVYYHKNNKSWMESEFRVYSSANNCTFEYVSQPFLMDLEGKQGNFKNLREFVFKNIDGYFKIYSKHTPINLVRDLPQGFSALEPLVDLPIGINITRFQTLLALHRSYLTPGDSSSGWTAGAAAYYVGYLQPRTFLLKYNENGTITDAVDCALDPLSETKCTLKSFTVEKGIYQTSNFRVQPTESIVRFPNITNLCPFGEVFNATRFASVYAWNRKRISNCVADYSVLYNSASFSTFKCYGVSPTKLNDLCFTNVYADSFVIRGDEVRQIAPGQTGKIADYNYKLPDDFTGCVISWNSNNLDSKVGGNYNYLYRLFRKSNLKPFERDISTEIYQAGSTPCNGVEGFNCYFPLQSYGFQPTNGVGYQPYRVVVLSFELLHAPATVCGPKKSTNLVKNKCVNFNFNGLTGTGVLTESNKKFLPFQQFGRDIADTTDAVRDPQTLEILDITPCSFGGVSVITPGTNTSNQVAVLYQGVNCTEVPVAIHADQLTPTWRVYSTGSNVFQTRAGCLIGAEHVNNSYECDIPIGAGICASYQTQTNSPRRARSVASQSIIAYTMSLGAENSVAYSNNSIAIPTNFTISVTTEILPVSMTKTSVDCTMYICGDSTECSNLLLQYGSFCTQLNRALTGIAVEQDKNTQEVFAQVKQIYKTPPIKDFGGFNFSQILPDPSKPSKRSFIEDLLFNKVTLADAGFIKQYGDCLGDIAARDLICAQKFNGLTVLPPLLTDEMIAQYTSALLAGTITSGWTFGAGAALQIPFAMQMAYRFNGIGVTQNVLYENQKLIANQFNSAIGKIQDSLSSTASALGKLQDVVNQNAQALNTLVKQLSSNFGAISSVLNDILSRLDPPEAEVQIDRLITGRLQSLQTYVTQQLIRAAEIRASANLAATKMSECVLGQSKRVDFCGKGYQLMSFPQSAPHGVVFLNVTYVPAQEKNFTTAPAICNDGKAHFPREGVFVSNGTNWFVTQRNFYEPQIITTDNTFVSGNCDVVIGIVNNTVYDPLQPELDSFKEELDKYFKNHTSPDVDLGDISGINASVVNIQKEIDRLNEVAKNLNESLIDLQELGKYEQYIKGGSGYIPEAPRDGQAYVRKDGEWVLLSTFL

SEQ ID NO: 5933 - protein, 1241 aa, Artificial Sequence
  SARS-CoV-2/France/GE1977/2020__EPI_ISL_414632 spike protein (1-1211)(K986P_V987P_ H1048Q_H1064N_ H1083N_H1101N) Foldon construct
MFVFLVLLPLVSSQCVNLTTRTQLPPAYTNSFTRGVYYPDKVFRSSVLHSTQDLFLPFFSNVTWFHAIHVSGTNGTKRFDNPVLPFNDGVYFASTEKSNIIRGWIFGTTLDSKTQSLLIVNNATNVVIKVCEFQFCNDPFLGVYYHKNNKSWMESEFRVYSSANNCTFEYVSQPFLMDLEGKQGNFKNLREFVFKNIDGYFKIYSKHTPINLVRDLPQGFSALEPLVDLPIGINITRFQTLLALHRSYLTPGDSSSGWTAGAAAYYVGYLQPRTFLLKYNENGTITDAVDCALDPLSETKCTLKSFTVEKGIYQTSNFRVQPTESIVRFPNITNLCPFGEVFNATRFASVYAWNRKRISNCVADYSVLYNSASFSTFKCYGVSPTKLNDLCFTNVYADSFVIRGDEVRQIAPGQTGKIADYNYKLPDDFTGCVIAWNSNNLDSKVGGNYNYLYRLFRKSNLKPFERDISTEIYQAGSTPCNGVEGFNCYFPLQSYGFQPTNGVGYQPYRVVVLSFELLHAPATVCGPKKSTNLVKNKCVNFNFNGLTGTGVLTESNKKFLPFQQFGRDIADTTDAVRDPQTLEILDITPCSFGGVSVITPGTNTSNQVAVLYQGVNCTEVPVAIHADQLTPTWRVYSTGSNVFQTRAGCLIGAEHVNNSYECDIPIGAGICASYQTQTNSPRRARSVASQSIIAYTMSLGAENSVAYSNNSIAIPTNFTISVTTEILPVSMTKTSVDCTMYICGDSTECSNLLLQYGSFCTQLNRALTGIAVEQDKNTQEVFAQVKQIYKTPPIKDFGGFNFSQILPDPSKPSKRSFIEDLLFNKVTLADAGFIKQYGDCLGDIAARDLICAQKFNGLTVLPPLLTDEMIAQYTSALLAGTITSGWTFGAGAALQIPFAMQMAYRFNGIGVTQNVLYENQKLIANQFNSAIGKIQDSLFSTASALGKLQDVVNQNAQALNTLVKQLSSNFGAISSVLNDILSRLDPPEAEVQIDRLITGRLQSLQTYVTQQLIRAAEIRASANLAATKMSECVLGQSKRVDFCGKGYQLMSFPQSAPHGVVFLNVTYVPAQEKNFTTAPAICNDGKAHFPREGVFVSNGTNWFVTQRNFYEPQIITTDNTFVSGNCDVVIGIVNNTVYDPLQPELDSFKEELDKYFKNHTSPDVDLGDISGINASVVNIQKEIDRLNEVAKNLNESLIDLQELGKYEQYIKGGSGYIPEAPRDGQAYVRKDGEWVLLSTFL

SEQ ID NO: 5934 - protein, 1241 aa, Artificial Sequence
  SARS-CoV-2/Finland/FIN-313/2020__EPI_ISL_414641 spike protein (1-1211)(K986P_V987P_ H1048Q_H1064N_ H1083N_H1101N) Foldon construct
MFVFLVLLPLVSSQCVNLTTRTQLPPAYTNSFTRGVYYPDKVFRSSVLHSTQDLFLPFFSNVTWFHAIHVSGTNGTKRFDNPVLPFNDGVYFASTEKSNIIRGWIFGTTLDSKTQSLLIVNNATNVVIKVCEFQFCNDPFLGVYYHKNNKSWMESEFRVYSSANNCTFEYVSQPFLMDLEGKQGNFKNLREFVFKNIDGYFKIYSKHTPINLVRDLPQGFSALEPLVDLPIGINITRFKTLLALHRSYLTPGDSSSGWTAGAAAYYVGYLQPRTFLLKYNENGTITDAVDCALDPLSETKCTLKSFTVEKGIYQTSNFRVQPTESIVRFPNITNLCPFGEVFNATRFASVYAWNRKRISNCVADYSVLYNSASFSTFKCYGVSPTKLNDLCFTNVYADSFVIRGDEVRQIAPGQTGKIADYNYKLPDDFTGCVIAWNSNNLDSKVGGNYNYLYRLFRKSNLKPFERDISTEIYQAGSTPCNGVEGFNCYFPLQSYGFQPTNGVGYQPYRVVVLSFELLHAPATVCGPKKSTNLVKNKCVNFNFNGLTGTGVLTESNKKFLPFQQFGRDIADTTDAVRDPQTLEILDITPCSFGGVSVITPGTNTSNQVAVLYQGVNCTEVPVAIHADQLTPTWRVYSTGSNVFQTRAGCLIGAEHVNNSYECDIPIGAGICASYQTQTNSPRRARSVASQSIIAYTMSLGAENSVAYSNNSIAIPTNFTISVTTEILPVSMTKTSVDCTMYICGDSTECSNLLLQYGSFCTQLNRALTGIAVEQDKNTQEVFAQVKQIYKTPPIKDFGGFNFSQILPDPSKPSKRSFIEDLLFNKVTLADAGFIKQYGDCLGDIAARDLICAQKFNGLTVLPPLLTDEMIAQYTSALLAGTITSGWTFGAGAALQIPFAMQMAYRFNGIGVTQNVLYENQKLIANQFNSAIGKIQDSLSSTASALGKLQDVVNQNAQALNTLVKQLSSNFGAISSVLNDILSRLDPPEAEVQIDRLITGRLQSLQTYVTQQLIRAAEIRASANLAATKMSECVLGQSKRVDFCGKGYQLMSFPQSAPHGVVFLNVTYVPAQEKNFTTAPAICNDGKAHFPREGVFVSNGTNWFVTQRNFYEPQIITTDNTFVSGNCDVVIGIVNNTVYDPLQPELDSFKEELDKYFKNHTSPDVDLGDISGINASVVNIQKEIDRLNEVAKNLNESLIDLQELGKYEQYIKGGSGYIPEAPRDGQAYVRKDGEWVLLSTFL

SEQ ID NO: 5935 - protein, 1241 aa, Artificial Sequence
  SARS-CoV-2/Netherlands/ZuidHolland_2/2020__EPI_ISL_414556 spike protein (1-1211)(K986P_V987P_ H1048Q_H1064N_ H1083N_H1101N) Foldon construct
MFVFLVLLPLVSSQCVNLTTRTQLPPAYTNSFTRGVYYPDKVFRSSVLHSTQDLFLPFFSNVTWFHAIHVSGTNGTKRFDNPVLPFNDGVYFASTEKSNIIRGWIFGTTLDSKTQSLLIVNNATNVVIKVCEFQFCNDPFLGVYYHKNNKSWMESEFRVYSSANNCTFEYVSQPFLMDLEGKQGNFKNLREFVFKNIDGYFKIYSKHTPINLVRDLPQGFSALEPLVDLPIGINITRFQTLLALHRSYLTPGDSSSGWTAGAAAYYVGYLQPRTFLLKYNENGTITDAVDCALDPLSETKCTLKSFTVEKGIYQTSNFRVQPTESIVRFPNITNLCPFGEVFNATRFASVYAWNRKRISNCVADYSVLYNSASFSTFKCYGVSPTKLNDLCFTNVYADSFVIRGDEVRQIAPGQTGKIADYNYKLPDDFTGCVIAWNSNNLDSKVGGNYNYLYRLFRKSNLKPFERDISTEIYQAGSTPCNGVEGFNCYFPLQSYGFQPTNGVGYQPYRVVVLSFELLHAPATVCGPKKSTNLVKNKCVNFNFNGLTGTGVLTESNKKFLPFQQFGRDIADTTDAVRDPQTLEILDITPCSFGGVSVITPGTNTSNQVAVLYQGVNCTEVPVAIHADQLTPTWRVYSTGSNVFQTRAGCLIGAEHVNNSYECDIPIGAGICASYQTQTNSPRRARSVASQSIIAYTMSLGAENSVAYSNNSIAIPTNFTISVTTEILPVSMTKTSVDCTMYICGDSTECSNLLLQYGSFCTQLNRALTGIALEQDKNTQEVFAQVKQIYKTPPIKDFGGFNFSQILPDPSKPSKRSFIEDLLFNKVTLADAGFIKQYGDCLGDIAARDLICAQKFNGLTVLPPLLTDEMIAQYTSALLAGTITSGWTFGAGAALQIPFAMQMAYRFNGIGVTQNVLYENQKLIANQFNSAIGKIQDSLSSTASALGKLQDVVNQNAQALNTLVKQLSSNFGAISSVLNDILSRLDPPEAEVQIDRLITGRLQSLQTYVTQQLIRAAEIRASANLAATKMSECVLGQSKRVDFCGKGYQLMSFPQSAPHGVVFLNVTYVPAQEKNFTTAPAICNDGKAHFPREGVFVSNGTNWFVTQRNFYEPQIITTDNTFVSGNCDVVIGIVNNTVYDPLQPELDSFKEELDKYFKNHTSPDVDLGDISGINASVVNIQKEIDRLNEVAKNLNESLIDLQELGKYEQYIKGGSGYIPEAPRDGQAYVRKDGEWVLLSTFL

SEQ ID NO: 5936 - protein, 1241 aa, Artificial Sequence
  SARS-CoV-2/USA/WA-UW31/2020__EPI_ISL_414618 spike protein (1-1211)(K986P_V987P_ H1048Q_H1064N_ H1083N_H1101N) Foldon construct
MFVFLVLLPLVSSQCVNLTTRTQLPPAYTNSFTRGVYYPDKVFRSSVLHSTQDLFLPFFSNVTWFHAIHVSGTNGTKRFDNPVLPFNDGVYFASTEKSNIIRGWIFGTTLDSKTQSLLIVNNATNVVIKVCEFQFCNDPFLGVYYHKNNKSWMESEFRVYSSANNCTFEYVSQPFLMDLEGKQGNFKNLREFVFKNIDGYFKIYSKHTPINLVRDLPQGFSALEPLVDLPIGINITRFQTLLALHRSYLTPGDSSSGWTAGAAAYYVGYLQPRTFLLKYNENGTITDAVDCALDPLSETKCTLKSFTVEKGIYQTSNFRVQPTESIVRFPNITNLCPFGEVFNATRFASVYAWNRKRISNCVADYSVLYNSASFSTFKCYGVSPTKLNDLCFTNVYADSFVIRGDEVRQIAPGQTGKIADYNYKLPDDFTGCVIAWNSNNLDSKVGGNYNYLYRLFRKSNLKPFERDISTEIYQAGSTPCNGAEGFNCYFPLQSYGFQPTNGVGYQPYRVVVLSFELLHAPATVCGPKKSTNLVKNKCVNFNFNGLTGTGVLTESNKKFLPFQQFGRDIADTTDAVRDPQTLEILDITPCSFGGVSVITPGTNTSNQVAVLYQDVNCTEVPVAIHADQLTPTWRVYSTGSNVFQTRAGCLIGAEHVNNSYECDIPIGAGICASYQTQTNSPRRARSVASQSIIAYTMSLGAENSVAYSNNSIAIPTNFTISVTTEILPVSMTKTSVDCTMYICGDSTECSNLLLQYGSFCTQLNRALTGIAVEQDKNTQEVFAQVKQIYKTPPIKDFGGFNFSQILPDPSKPSKRSFIEDLLFNKVTLADAGFIKQYGDCLGDIAARDLICAQKFNGLTVLPPLLTDEMIAQYTSALLAGTITSGWTFGAGAALQIPFAMQMAYRFNGIGVTQNVLYENQKLIANQFNSAIGKIQDSLSSTASALGKLQDVVNQNAQALNTLVKQLSSNFGAISSVLNDILSRLDPPEAEVQIDRLITGRLQSLQTYVTQQLIRAAEIRASANLAATKMSECVLGQSKRVDFCGKGYQLMSFPQSAPHGVVFLNVTYVPAQEKNFTTAPAICNDGKAHFPREGVFVSNGTNWFVTQRNFYEPQIITTDNTFVSGNCDVVIGIVNNTVYDPLQPELDSFKEELDKYFKNHTSPDVDLGDISGINASVVNIQKEIDRLNEVAKNLNESLIDLQELGKYEQYIKGGSGYIPEAPRDGQAYVRKDGEWVLLSTFL

SEQ ID NO: 5937 - protein, 1241 aa, Artificial Sequence
  SARS-CoV-2/South Korea/SNU01/2020__EPI_ISL_411929 spike protein (1-1211)(K986P_V987P_ H1048Q_H1064N_ H1083N_H1101N) Foldon construct
MFVFLVLLPLVSSQCVNLTTRTQLPPAYTNSFTRGVYYPDKVFRSSVLHSTQDLFLPFFSNVTWFHAIHVSGTNGTKRFDNPVLPFNDGVYFASTEKSNIIRGWIFGTTLDSKTQSLLIVNNATNVVIKVCEFQFCNDPFLGVYYHKNNKSWMESEFRVYSSANNCTFEYVSQPFLMDLEGKQGNFKNLREFVFKNIDGYFKIYSKHTPINLVRDLPQGFWALEPLVDLPIGINITRFQTLLALHRSYLTPGDSSSGWTAGAAAYYVGYLQPRTFLLKYNENGTITDAVDCALDPLSETKCTLKSFTVEKGIYQTSNFRVQPTESIVRFPNITNLCPFGEVFNATRFASVYAWNRKRISNCVADYSVLYNSASFSTFKCYGVSPTKLNDLCFTNVYADSFVIRGDEVRQIAPGQTGKIADYNYKLPDDFTGCVIAWNSNNLDSKVGGNYNYLYRLFRKSNLKPFERDISTEIYQAGSTPCNGVEGFNCYFPLQSYGFQPTNGVGYQPYRVVVLSFELLHAPATVCGPKKSTNLVKNKCVNFNFNGLTGTGVLTESNKKFLPFQQFGRDIADTTDAVRDPQTLEILDITPCSFGGVSVITPGTNTSNQVAVLYQDVNCTEVPVAIHADQLTPTWRVYSTGSNVFQTRAGCLIGAEHVNNSYECDIPIGAGICASYQTQTNSPRRARSVASQSIIAYTMSLGAENSVAYSNNSIAIPTNFTISVTTEILPVSMTKTSVDCTMYICGDSTECSNLLLQYGSFCTQLNRALTGIAVEQDKNTQEVFAQVKQIYKTPPIKDFGGFNFSQILPDPSKPSKRSFIEDLLFNKVTLADAGFIKQYGDCLGDIAARDLICAQKFNGLTVLPPLLTDEMIAQYTSALLAGTITSGWTFGAGAALQIPFAMQMAYRFNGIGVTQNVLYENQKLIANQFNSAIGKIQDSLSSTASALGKLQDVVNQNAQALNTLVKQLSSNFGAISSVLNDILSRLDPPEAEVQIDRLITGRLQSLQTYVTQQLIRAAEIRASANLAATKMSECVLGQSKRVDFCGKGYQLMSFPQSAPHGVVFLNVTYVPAQEKNFTTAPAICNDGKAHFPREGVFVSNGTNWFVTQRNFYEPQIITTDNTFVSGNCDVVIGIVNNTVYDPLQPELDSFKEELDKYFKNHTSPDVDLGDISGINASVVNIQKEIDRLNEVAKNLNESLIDLQELGKYEQYIKGGSGYIPEAPRDGQAYVRKDGEWVLLSTFL

SEQ ID NO: 5938 - protein, 1241 aa, Artificial Sequence
  SARS-CoV-2/China/WF0004/2020__EPI_ISL_413694 spike protein (1-1211)(K986P_V987P_ H1048Q_H1064N_ H1083N_H1101N) Foldon construct
MFVFLVLLPLVSSQCVNLTTRTQLPPAYTNSFTRGVYYPDKVFRSSVLHSTQDLFLPFFSNVTWFHAIHVSGTNGTKRFDNPVLPFNDGVYFASTEKSNIIRGWIFGTTLDSKTQSLLIVNNATNVVIKVCEFQFCNDPFLGVYYHKNNKSWTESEFRVYSSANNCTFEYVSQPFLMDLEGKQGNFKNLREFVFKNIDGYFKIYSKHTPINLVRDLPQGFSALEPLVDLPIGINITRFQTLLALHRSYLTPGDSSSGWTAGAAAYYVGYLQPRTFLLKYNENGTITDAVDCALDPLSETKCTLKSFTVEKGIYQTSNFRVQPTESIVRFPNITNLCPFGEVFNATRFASVYAWNRKRISNCVADYSVLYNSASFSTFKCYGVSPTKLNDLCFTNVYADSFVIRGDEVRQIAPGQTGKIADYNYKLPDDFTGCVIAWNSNNLDSKVGGNYNYLYRLFRKSNLKPFERDISTEIYQAGSTPCNGVEGFNCYFPLQSYGFQPTNGVGYQPYRVVVLSFELLHAPATVCGPKKSTNLVKNKCVNFNFNGLTGTGVLTESNKKFLPFQQFGRDIADTTDAVRDPQTLEILDITPCSFGGVSVITPGTNTSNQVAVLYQDVNCTEVPVAIHADQLTPTWRVYSTGSNVFQTRAGCLIGAEHVNNSYECDIPIGAGICASYQTQTNSPRRARSVASQSIIAYTMSLGAENSVAYSNNSIAIPTNFTISVTTEILPVSMTKTSVDCTMYICGDSTECSNLLLQYGSFCTQLNRALTGIAVEQDKNTQEVFAQVKQIYKTPPIKDFGGFNFSQILPDPSKPSKRSFIEDLLFNKVTLADAGFIKQYGDCLGDIAARDLICAQKFNGLTVLPPLLTDEMIAQYTSALLAGTITSGWTFGAGAALQIPFAMQMAYRFNGIGVTQNVLYENQKLIANQFNSAIGKIQDSLSSTASALGKLQDVVNQNAQALNTLVKQLSSNFGAISSVLNDILSRLDPPEAEVQIDRLITGRLQSLQTYVTQQLIRAAEIRASANLAATKMSECVLGQSKRFDFCGKGYQLMSFPQSAPHGVVFLNVTYVPAQEKNFTTAPAICNDGKAHFPREGVFVSNGTNWFVTQRNFYEPQIITTDNTFVSGNCDVVIGIVNNTVYDPLQPELDSFKEELDKYFKNHTSPDVDLGDISGINASVVNIQKEIDRLNEVAKNLNESLIDLQELGKYEQYIKGGSGYIPEAPRDGQAYVRKDGEWVLLSTFL

SEQ ID NO: 5939 - protein, 1241 aa, Artificial Sequence
  SARS-CoV-2/China/WF0028/2020__EPI_ISL_413791 spike protein (1-1211)(K986P_V987P_ H1048Q_H1064N_ H1083N_H1101N) Foldon construct
MFVFLVLLPLVSSQCVNLTTRTQLPPAYTNSFTRGVYYPDKVFRSSVLHSTQDLFLPFFSNVTWFHAIHVSGTNGTKRFDNPVLPFNDGVYFASTEKSNIIRGWIFGTTLDSKTQSLLIVNNATNVVIKVCEFQFCNDPFLGVYYHKNNKSWMESEFRVYSSANNCTFEYVSQPFLMDLEGKQGNFKNLREFVFKNIDGYFKIYSKHTPINLVRDLPQGFSALEPLVDLPIGINITRFQTLLALHRSYLTPGDSSSGWTAGAAAYYVGYLQPRTFLLKYNENGTITDAVDCALDPLSETKCTLKSFTVEKGIYQTSNFRVQPTESIVRFPNITNLCPFGEVFNATRFASVYAWNRKRISNCVADYSVLYNSASFSTFKCYGVSPTKLNDLCFTNVYADSFVIRGDEVRQIAPGQTGKIADYNYKLPDDFTGCVIAWNSNNLDSKVGGNYNYLYRLFRKSNLKPFERDISTEIYQAGSTPCNGVEGFNCYFPLQSYGFQPTNGVGYQPYRVVVLSFELLHAPATVCGPKKSTNLVKNKCVNFNFNGLTGTGVLTESNKKFLPFQQFGRDIADTTDAVRDPQTLEILDITPCSFGGVSVITPGTNTSNQVAVLYQDVNCTEVPVAIHADQLTPTWRVYSTGSNVFQTRAGCLIGAEHVNNSYECDIPIGAGICASYQTQTNSPRRARSVASQSIIAYTMSLGAENSVAYSNNSIAIPTNFTISVTTEILPVSMTKTSVDCTMYICGDSTECSNLLLQYGSFCTQLNRALTGIAVEQDKNTQEVFAQVKQIYKTPPIKDFGGFNFSQILPDPSKPSKRSFIEDLLFNKVTLADAGFIKQYGDCLGDIAARDLICAQKFNGLTVLPPLLTDEMIAQYTSALLAGTITSGWTFGAGAALQIPFAMQMAYRFNGIGVTQNVLYENQKLIANQFNSAIGKIQDSLSSTASALGKLQDVVNQNAQALNTLVKQLSSNFGAISSVLNDILSRLDPPEAEVQIDRLITGRLQSLQTYVTQQLIRAAEIRASANLAATKMSECVLGQSKRVDFCGKGYQLMSFPQSAPHGVVFLNVTYVPAQEKNFTTAPAICNDGKAHFPREGVFVSNGTNWFVTQRNFYEPQIITTDNTFVSGNCDVVIGIVNNTVYDPLQPELESFKEELDKYFKNHTSPDVDLGDISGINASVVNIQKEIDRLNEVAKNLNESLIDLQELGKYEQYIKGGSGYIPEAPRDGQAYVRKDGEWVLLSTFL

SEQ ID NO: 5940 - protein, 1241 aa, Artificial Sequence
  SARS-CoV-2/2019-nCoV/USA-CruiseA-18/2020__MT159716.1 spike protein (1-1211)(K986P_V987P_ H1048Q_H1064N_ H1083N_H1101N) Foldon construct
MFVFLVLLPLVSSQCVNLTTRTQLPPAYTNSFTRGVYYPDKVFRSSVLHSTQDLFLPFFSNVTWFHAIHVSGTNGTKRFDNPVLPFNDGVYFASTEKSNIIRGWIFGTTLDSKTQSLLIVNNATNVVIKVCEFQFCNDPFLGVYYHKNNKSWMESELRVYSSANNCTFEYVSQPFLMDLEGKQGNFKNLREFVFKNIDGYFKIYSKHTPINLVRDLPQGFSALEPLVDLPIGINITRFQTLLALHRSYLTPGDSSSGWTAGAAAYYVGYLQPRTFLLKYNENGTITDAVDCALDPLSETKCTLKSFTVEKGIYQTSNFRVQPTESIVRFPNITNLCPFGEVFNATRFASVYAWNRKRISNCVADYSVLYNSASFSTFKCYGVSPTKLNDLCFTNVYADSFVIRGDEVRQIAPGQTGKIADYNYKLPDDFTGCVIAWNSNNLDSKVGGNYNYLYRLFRKSNLKPFERDISTEIYQAGSTPCNGVEGFNCYFPLQSYGFQPTNGVGYQPYRVVVLSFELLHAPATVCGPKKSTNLVKNKCVNFNFNGLTGTGVLTESNKKFLPFQQFGRDIADTTDAVRDPQTLEILDITPCSFGGVSVITPGTNTSNQVAVLYQDVNCTEVPVAIHADQLTPTWRVYSTGSNVFQTRAGCLIGAEHVNNSYECDIPIGAGICASYQTQTNSPRRARSVASQSIIAYTMSLGAENSVAYSNNSIAIPTNFTISVTTEILPVSMTKTSVDCTMYICGDSTECSNLLLQYGSFCTQLNRALTGIAVEQDKNTQEVFAQVKQIYKTPPIKDFGGFNFSQILPDPSKPSKRSFIEDLLFNKVTLADAGFIKQYGDCLGDIAARDLICAQKFNGLTVLPPLLTDEMIAQYTSALLAGTITSGWTFGAGAALQIPFAMQMAYRFNGIGVTQNVLYENQKLIANQFNSAIGKIQDSLSSTASALGKLQDVVNQNAQALNTLVKQLSSNFGAISSVLNDILSRLDPPEAEVQIDRLITGRLQSLQTYVTQQLIRAAEIRASANLAATKMSECVLGQSKRVDFCGKGYQLMSFPQSAPHGVVFLNVTYVPAQEKNFTTAPAICNDGKAHFPREGVFVSNGTNWFVTQRNFYEPQIITTDNTFVSGNCDVVIGIVNNTVYDPLQPELDSFKEELDKYFKNHTSPDVDLGDISGINASVVNIQKEIDRLNEVAKNLNESLIDLQELGKYEQYIKGGSGYIPEAPRDGQAYVRKDGEWVLLSTFL

SEQ ID NO: 5941 - protein, 1241 aa, Artificial Sequence
  SARS-CoV-2/SARS-CoV-2/Yunnan-01/human/2020/CHN__MT049951.1 spike protein (1-1211)(K986P_V987P_ H1048Q_H1064N_ H1083N_H1101N) Foldon construct
MFVFLVLLPLVSSQCVNLTTRTQLPPANTNSFTRGVYYPDKVFRSSVLHSTQDLFLPFFSNVTWFHAIHVSGTNGTKRFDNPVLPFNDGVYFASTEKSNIIRGWIFGTTLDSKTQSLLIVNNATNVVIKVCEFQFCNDPFLGVYYHKNNKSWMESEFRVYSSANNCTFEYVSQPFLMDLEGKQGNFKNLREFVFKNIDGYFKIYSKHTPINLVRDLPQGFSALEPLVDLPIGINITRFQTLLALHRSYLTPGDSSSGWTAGAAAYYVGYLQPRTFLLKYNENGTITDAVDCALDPLSETKCTLKSFTVEKGIYQTSNFRVQPTESIVRFPNITNLCPFGEVFNATRFASVYAWNRKRISNCVADYSVLYNSASFSTFKCYGVSPTKLNDLCFTNVYADSFVIRGDEVRQIAPGQTGKIADYNYKLPDDFTGCVIAWNSNNLDSKVGGNYNYLYRLFRKSNLKPFERDISTEIYQAGSTPCNGVEGFNCYFPLQSYGFQPTNGVGYQPYRVVVLSFELLHAPATVCGPKKSTNLVKNKCVNFNFNGLTGTGVLTESNKKFLPFQQFGRDIADTTDAVRDPQTLEILDITPCSFGGVSVITPGTNTSNQVAVLYQDVNCTEVPVAIHADQLTPTWRVYSTGSNVFQTRAGCLIGAEHVNNSYECDIPIGAGICASYQTQTNSPRRARSVASQSIIAYTMSLGAENSVAYSNNSIAIPTNFTISVTTEILPVSMTKTSVDCTMYICGDSTECSNLLLQYGSFCTQLNRALTGIAVEQDKNTQEVFAQVKQIYKTPPIKDFGGFNFSQILPDPSKPSKRSFIEDLLFNKVTLADAGFIKQYGDCLGDIAARDLICAQKFNGLTVLPPLLTDEMIAQYTSALLAGTITSGWTFGAGAALQIPFAMQMAYRFNGIGVTQNVLYENQKLIANQFNSAIGKIQDSLSSTASALGKLQDVVNQNAQALNTLVKQLSSNFGAISSVLNDILSRLDPPEAEVQIDRLITGRLQSLQTYVTQQLIRAAEIRASANLAATKMSECVLGQSKRVDFCGKGYQLMSFPQSAPHGVVFLNVTYVPAQEKNFTTAPAICNDGKAHFPREGVFVSNGTNWFVTQRNFYEPQIITTDNTFVSGNCDVVIGIVNNTVYDPLQPELDSFKEELDKYFKNHTSPDVDLGDISGINASVVNIQKEIDRLNEVAKNLNESLIDLQELGKYEQYIKGGSGYIPEAPRDGQAYVRKDGEWVLLSTFL

SEQ ID NO: 5942 - protein, 1241 aa, Artificial Sequence
  SARS-CoV-2/USA/WA-UW292/2020__EPI_ISL_418077 spike protein (1-1211)(K986P_V987P_ H1048Q_H1064N_ H1083N_H1101N) Foldon construct
MFVFLVLLPLVSSQCVNLTTRTQLPPAYTNSFTRGVYYPDKVFRSSVLHSTQDLFLPFFSNVTWFHAIHVSGTNGTKRFDNPVLPFNDGVYFASTEKSNIIRGWIFGTTLDSKTQSLLIVNNATNVVIKVCEFQFCNDPFLGVYYHKNNKSWMESEFRVYSSANNCTFEYVSQPFLMDLEGKQGNFKNLREFVFKNIDGYFKIYSKHTPINLVRDLPQGFSALEPLVDLPIGINITRFQTLLALHRSYLTPGDSSSGWTAGAAAYYVGYLQPRTFLLKYNENGTITDAVDCALDPLSETKCTLKSFTVEKGIYQTSNFRVQPTESIVRFPNITNLCPFGEVFNATRFASVYAWNRKRISNCVADYSVLYNSASFSTFKCYGVSPTKLNDLCFTNVYADSFVIRGDEVRQIAPGQTGKIADYNYKLPDDFTGCVIAWNSNNLDSKVGGNYNYLYRLFRKSNLKPFERDISTEIYQASSTPCNGVEGFNCYFPLQSYGFQPTNGVGYQPYRVVVLSFELLHAPATVCGPKKSTNLVKNKCVNFNFNGLTGTGVLTESNKKFLPFQQFGRDIADTTDAVRDPQTLEILDITPCSFGGVSVITPGTNTSNQVAVLYQDVNCTEVPVAIHADQLTPTWRVYSTGSNVFQTRAGCLIGAEHVNNSYECDIPIGAGICASYQTQTNSPRRARSVASQSIIAYTMSLGAENSVAYSNNSIAIPTNFTISVTTEILPVSMTKTSVDCTMYICGDSTECSNLLLQYGSFCTQLNRALTGIAVEQDKNTQEVFAQVKQIYKTPPIKDFGGFNFSQILPDPSKPSKRSFIEDLLFNKVTLADAGFIKQYGDCLGDIAARDLICAQKFNGLTVLPPLLTDEMIAQYTSALLAGTITSGWTFGAGAALQIPFAMQMAYRFNGIGVTQNVLYENQKLIANQFNSAIGKIQDSLSSTASALGKLQDVVNQNAQALNTLVKQLSSNFGAISSVLNDILSRLDPPEAEVQIDRLITGRLQSLQTYVTQQLIRAAEIRASANLAATKMSECVLGQSKRVDFCGKGYQLMSFPQSAPHGVVFLNVTYVPAQEKNFTTAPAICNDGKAHFPREGVFVSNGTNWFVTQRNFYEPQIITTDNTFVSGNCDVVIGIVNNTVYDPLQPELDSFKEELDKYFKNHTSPDVDLGDISGINASVVNIQKEIDRLNEVAKNLNESLIDLQELGKYEQYIKGGSGYIPEAPRDGQAYVRKDGEWVLLSTFL

SEQ ID NO: 5943 - protein, 1241 aa, Artificial Sequence
  SARS-CoV-2/Iceland/192/2020__EPI_ISL_417819 spike protein (1-1211)(K986P_V987P_ H1048Q_H1064N_ H1083N_H1101N) Foldon construct
MFVFFVLLPLVSSQCVNLTTRTQLPPAYTNSFTRGVYYPDKVFRSSVLHSTQDLFLPFFSNVTWFHAIHVSGTNGTKRFDNPVLPFNDGVYFASTEKSNIIRGWIFGTTLDSKTQSLLIVNNATNVVIKVCEFQFCNDPFLGVYYHKNNKSWMESEFRVYSSANNCTFEYVSQPFLMDLEGKQGNFKNLREFVFKNIDGYFKIYSKHTPINLVRDLPQGFSALEPLVDLPIGINITRFQTLLALHRSYLTPGDSSSGWTAGAAAYYVGYLQPRTFLLKYNENGTITDAVDCALDPLSETKCTLKSFTVEKGIYQTSNFRVQPTESIVRFPNITNLCPFGEVFNATRFASVYAWNRKRISNCVADYSVLYNSASFSTFKCYGVSPTKLNDLCFTNVYADSFVIRGDEVRQIAPGQTGKIADYNYKLPDDFTGCVIAWNSNNLDSKVGGNYNYLYRLFRKSNLKPFERDISTEIYQAGSTPCNGVEGFNCYFPLQSYGFQPTNGVGYQPYRVVVLSFELLHAPATVCGPKKSTNLVKNKCVNFNFNGLTGTGVLTESNKKFLPFQQFGRDIADTTDAVRDPQTLEILDITPCSFGGVSVITPGTNTSNQVAVLYQGVNCTEVPVAIHADQLTPTWRVYSTGSNVFQTRAGCLIGAEHVNNSYECDIPIGAGICASYQTQTNSPRRARSVASQSIIAYTMSLGAENSVAYSNNSIAIPTNFTISVTTEILPVSMTKTSVDCTMYICGDSTECSNLLLQYGSFCTQLNRALTGIAVEQDKNTQEVFAQVKQIYKTPPIKDFGGFNFSQILPDPSKPSKRSFIEDLLFNKVTLADAGFIKQYGDCLGDIAARDLICAQKFNGLTVLPPLLTDEMIAQYTSALLAGTITSGWTFGAGAALQIPFAMQMAYRFNGIGVTQNVLYENQKLIANQFNSAIGKIQDSLSSTASALGKLQDVVNQNAQALNTLVKQLSSNFGAISSVLNDILSRLDPPEAEVQIDRLITGRLQSLQTYVTQQLIRAAEIRASANLAATKMSECVLGQSKRVDFCGKGYQLMSFPQSAPHGVVFLNVTYVPAQEKNFTTAPAICNDGKAHFPREGVFVSNGTNWFVTQRNFYEPQIITTDNTFVSGNCDVVIGIVNNTVYDPLQPELDSFKEELDKYFKNHTSPDVDLGDISGINASVVNIQKEIDRLNEVAKNLNESLIDLQELGKYEQYIKGGSGYIPEAPRDGQAYVRKDGEWVLLSTFL

SEQ ID NO: 5944 - protein, 1241 aa, Artificial Sequence
  SARS-CoV-2/Belgium/ULG-6939/2020__EPI_ISL_417020 spike protein (1-1211)(K986P_V987P_ H1048Q_H1064N_ H1083N_H1101N) Foldon construct
MFVFLVLLPLVSSQCVNLTTRTQLPPAYTNSFTRGVYYPDKVFRSSVLHSTQDLFLPFFSNVTWFHAIHVSGTNGTKRFDNPVLPFNDGVYFASTEKSNIIRGWIFGTTLDSKTQSLLIVNNATNVVIKVCEFQFCNDPFLGVYYHKNNKSWMESEFRVYSSANNCTFEYVSQPFLMDLEGKQGNFKNLREFVFKNIDGYFKIYSKHTPINLVRDLPQGFSALEPLVDLPIGINITRFQTLLALHRSYLTPGDSSSGWTAGAAAYYVGYLQPRTFLLKYNENGTITDAVDCALDPLSETKCTLKSFTVEKGIYQTSNFRVQPTESIVRFPNITNLCPFGEVFNATRFASVYAWNRKRISNCVADYSVLYNSASFSTFKCYGVSPTKLNDLCFTNVYADSFVIRGDEVRQIAPGQTGKIADYNYKLPDDFTGCVIAWNSNNLDSKVGGNYNYLYRLFRKSNLKPFERDISTEIYQAGSTPCNGVEGFNCYFPLQSYGFQPTNGVGYQPYRVVVLSFELLHAPATVCGPKKSTNLVKNKCVNFNFNGLTGTGVLTESNKKFLPFQQFGRDIADTTDAVRDPQTLEILDITPCSFGGVSVITPGTNTSNQVAVLYQGVNCTEVPVAIHADQLTPTWRVYSTGSNVFQTRAGCLIGAEHVNNSYECDIPIGAGICASYQTQTNSPRRARSVASQSIIAYTMSLGAENSVVYSNNSIAIPTNFTISVTTEILPVSMTKTSVDCTMYICGDSTECSNLLLQYGSFCTQLNRALTGIAVEQDKNTQEVFAQVKQIYKTPPIKDFGGFNFSQILPDPSKPSKRSFIEDLLFNKVTLADAGFIKQYGDCLGDIAARDLICAQKFNGLTVLPPLLTDEMIAQYTSALLAGTITSGWTFGAGAALQIPFAMQMAYRFNGIGVTQNVLYENQKLIANQFNSAIGKIQDSLSSTASALGKLQDVVNQNAQALNTLVKQLSSNFGAISSVLNDILSRLDPPEAEVQIDRLITGRLQSLQTYVTQQLIRAAEIRASANLAATKMSECVLGQSKRVDFCGKGYQLMSFPQSAPHGVVFLNVTYVPAQEKNFTTAPAICNDGKAHFPREGVFVSNGTNWFVTQRNFYEPQIITTDNTFVSGNCDVVIGIVNNTVYDPLQPELDSFKEELDKYFKNHTSPDVDLGDISGINASVVNIQKEIDRLNEVAKNLNESLIDLQELGKYEQYIKGGSGYIPEAPRDGQAYVRKDGEWVLLSTFL

SEQ ID NO: 5945 - protein, 1241 aa, Artificial Sequence
  SARS-CoV-2/France/HF2496/2020__EPI_ISL_418231 spike protein (1-1211)(K986P_V987P_ H1048Q_H1064N_ H1083N_H1101N) Foldon construct
MFVFLVLLPLVSSQCVNLTTRTQLPPAYTNSFTRGVYYPDKVFRSSVLHSTQDLFLPFFSNVTWFHAIHVSGTNGTKRFDNPVLPFNDGVYFASTEKSNIIRGWIFGTTLDSKTQSLLIVNNATNVVIKVCEFQFCNDPFLGVYYHKNNKSWMESEFRVYSSANNCTFEYVSQPFLMDLEGKQGNFKNLREFVFKNIDGYFKIYSKHTPINLVRDLPQGFSALEPLVDLPIGINITRFQTLLALHRSYLTPGDSSSGWTAGAAAYYVGYLQPRTFLLKYNENGTITDAVDCALDPLSETKCTLKSFTVEKGIYQTSNFRVQPTESIVRFPNITNLCPFGEVFNATRFASVYAWNRKRISNCVADYSVLYNSASFSTFKCYGVSPTKLNDLCFTNVYADSFVIRGDEVRQIAPGQTGKIADYNYKLPDDFTGCVIAWNSNNLDSKVGGNYNYLYRLFRKSNLKPFERDISTEIYQAGSTPCNGVEGFNCYFPLQSYGFQPTNGVGYQPYRVVVLSFELLHAPATVCGPKKSTNLVKNKCVNFNFNGLTGTGVLTESNKKFLPFQQFGRDIADTTDAVRDPQTLEILDITPCSFGGVSVITPGTNTSNQVAVLYQGVNCTEVPVAIHADQLTPTWRVYSTGSNVFQTRAGCLIGAEHVNNSYECDIPIGAGICASYQTQTNSPRRARSVASQSIIAYTMSLGAENSVAYSNNSIAIPTNFTISVTTEILPVSMTKTSVDCTMYICGDSTECSNLLLQYGSFCTQLNRALTGIAVEQDKNTQEVFAQVKQIYKTPPIKDFGGFNFSQILPDPSKPSKRSFIEDLLFNKVTLADAGFIKQYGDCLGDIVARDLICAQKFNGLTVLPPLLTDEMIAQYTSALLAGTITSGWTFGAGAALQIPFAMQMAYRFNGIGVTQNVLYENQKLIANQFNSAIGKIQDSLSSTASALGKLQDVVNQNAQALNTLVKQLSSNFGAISSVLNDILSRLDPPEAEVQIDRLITGRLQSLQTYVTQQLIRAAEIRASANLAATKMSECVLGQSKRVDFCGKGYQLMSFPQSAPHGVVFLNVTYVPAQEKNFTTAPAICNDGKAHFPREGVFVSNGTNWFVTQRNFYEPQIITTDNTFVSGNCDVVIGIVNNTVYDPLQPELDSFKEELDKYFKNHTSPDVDLGDISGINASVVNIQKEIDRLNEVAKNLNESLIDLQELGKYEQYIKGGSGYIPEAPRDGQAYVRKDGEWVLLSTFL

SEQ ID NO: 5946 - protein, 1241 aa, Artificial Sequence
  SARS-CoV-2/USA/WA-UW291/2020__EPI_ISL_418076 spike protein (1-1211)(K986P_V987P_ H1048Q_H1064N_ H1083N_H1101N) Foldon construct
MFVFLVLLPLVSSQCVNLTTRTQLPPAYTNSFTRGVYYPDKVFRSSVLHSTQDLFLPFFSNVTWFHAIHVSGTNGTKRFDNPVLPFNDGVYFASTEKSNIIRGWIFGTTLDSKTQSLLIVNNATNVVIKVCEFQFCNDPFLGVYYHKNNKSWMESEFRVYSSANNCTFEYVSQPFLMDLEGKQGNFKNLREFVFKNIDGYFKIYSKHTPINLVRDLPQGFSALEPLVDLPIGINITRFQTLLALHRSYLTPGDSSSGWTAGAAAYYVGYLQPRTFLLKYNENGTITDAVDCALDPLSETKCTLKSFTVEKGIYQTSNFRVQPTESIVRFPNITNLCPFGEVFNATRFASVYAWNRKRISNCVADYSVLYNSASFSTFKCYGVSPTKLNDLCFTNVYADSFVIRGDEVRQIAPGQTGKIADYNYKLPDDFTGCVIAWNSNNLDSKVGGNYNYLYRLFRKSNLKPFERDISTEIYQAGSTPCNGVEGFNCYFPLQSYGFQPTNGVGYQPYRVVVLSFELLHAPATVCGPKKSTNLVKNKCVNFNFNGLTGTGVLTESNKKFLPFQQFGRDIADTTDAVRDPQTLEILDITPCSFGGVSVITPGTNTSNQVAVLYQGVNCTEVPVAIHADQLTPTWRVYSTGSNVFQTRAGCLIGAEHVNNSYECDIPIGAGICASYQTQTNSPRRARSVASQSIIAYTMSLGAENSVAYSNNSIAIPTNFTISVTTEILPVSMTKTSVDCTMYICGDSTECSNLLLQYGSFCTQLNRALTGIAVEQDKNTQEVFAQVKQIYKTPPIKDFGGFNFSQILPDPSKPSKRSFIEDLLFNKVTLADAGFIKQYGDCLGDIAARDLICAQKFNGLTVLPPLLTDEMIAQYTSALLAGTITSGWTFGAGAALQIPFAMQMAYRFNGIGVTQNVLYENQKLIANQFNSAIGKIQYSLSSTASALGKLQDVVNQNAQALNTLVKQLSSNFGAISSVLNDILSRLDPPEAEVQIDRLITGRLQSLQTYVTQQLIRAAEIRASANLAATKMSECVLGQSKRVDFCGKGYQLMSFPQSAPHGVVFLNVTYVPAQEKNFTTAPAICNDGKAHFPREGVFVSNGTNWFVTQRNFYEPQIITTDNTFVSGNCDVVIGIVNNTVYDPLQPELDSFKEELDKYFKNHTSPDVDLGDISGINASVVNIQKEIDRLNEVAKNLNESLIDLQELGKYEQYIKGGSGYIPEAPRDGQAYVRKDGEWVLLSTFL

SEQ ID NO: 5947 - protein, 1241 aa, Artificial Sequence; identical to SEQ ID NO: 5910
  SARS-CoV-2/Portugal/PT0034/2020__EPI_ISL_418019 spike protein (1-1211)(K986P_V987P_ H1048Q_H1064N_ H1083N_H1101N) Foldon construct

SEQ ID NO: 5948 - protein, 1241 aa, Artificial Sequence
  SARS-CoV-2/Iceland/202/2020__EPI_ISL_417750 spike protein (1-1211)(K986P_V987P_ H1048Q_H1064N_ H1083N_H1101N) Foldon construct
MFVFLVLLPLVSSQCVNLTTRTQLPPAYTNSFTRGVYYPDKVFRSSVLHSTQDLFLPFFSNVTWFHAIHVSGTNGTKRFDNPVLPFNDGVYFASTEKSNIIRGWIFGTTLDSKTQSLLIVNNATNVVIKVCEFQFCNDPFLGVYYHKNNKSWMESEFRVYSSANNCTFEYVSQPFLMDLEGKQGNFKNLREFVFKNIDGYFKIYSKHTPINLVRDLPQGFSALEPLVDLPIGINITRFQTLLALHRSYLTPGDSSSGWTAGAAAYYVGYLQPRTFLLKYNENGTITDAVDCALDPLSETKCTLKSFTVEKGIYQTSNFRVQPTESIVRFPNITNLCPFGEVFNATRFASVYAWNRKRISNCVADYSVLYNSASFSTFKCYGVSPTKLNDLCFTNVYADSFVIRGDEVRQIAPGQTGKIADYNYKLPDDFTGCVIAWNSNNLDSKVGGNYNYLYRLFRKSNLKPFERDISTEIYQAGSTPCNGVEGFNCYFPLQSYGFQPTNGVGYQPYRVVVLSFELLHAPATVCGPKKSTNLVKNKCVNFNFNGLTGTGVLTESNKKFLPFQQFGRDIADTTDAVRDPQTLEILDITPCSFGGVSVITPGTNTSNQVAVLYQDVNCTEVPVAIHADQLTPTWRVYSTGSNVFQTRAGCLIGAEHVNNSYECDIPIGAGICASYQTQTNSPRRARSVASQSIIAYTMSLGAENSVAYSNNSIAIPTNFTISVTTEILPVSMTKTSVDCTMYICGDSTECSNLLLQYGSFCTQLNRALTGIAVEQDKNTQEVFAQVKQIYKTPPIKDFGGFNFSQILPDPSKPSKRSFIEDLLFNKVTLADAGFIKQYGDCLGDIAARDLICAQKFNGLTVLPPLLTDEMIAQYTSALLAGTITSGWTFGAGAALQIPFAMQMAYRFNGIGVTQNVLYENQKLIANQFNSAIGKIQDSLSSTASALGKLQDVVNQNAQALNTLVKQLSSNFGAISSVLNDILSRLDPPEAEVQIDRLITGRLQSLQTYVTQQLIRAAEIRASANLAATKMSECVLGQSKRVDFCGKGYQLMSFPQSAPHGVVFLNVTYVPAQEKNFTTAPAICNDGKAHFPREGVFVSNGTNWFVTQRNFYEPQIITTDNTFVSGNCDVVIGIVNNTVYDPLQPELDSFKEELDKYFKNHTSPDVDLGDIPGINASVVNIQKEIDRLNEVAKNLNESLIDLQELGKYEQYIKGGSGYIPEAPRDGQAYVRKDGEWVLLSTFL

SEQ ID NO: 5949 - protein, 1241 aa, Artificial Sequence
  SARS-CoV-2/USA/WA-UW261/2020__EPI_ISL_418046 spike protein (1-1211)(K986P_V987P_ H1048Q_H1064N_ H1083N_H1101N) Foldon construct
MFVFLVLLPLVSSQCVNLTTRTQLPPAYTNSFTRGVYYPDKVFRSSVLHSTQDLFLPFFSNVTWFHAIHVSGTNGTKRFDNPVLPFNDGVYFASTEKSNIIRGWIFGTTLDSKTQSLLIVNNATNVVIKVCEFQFCNDPFLGVYYHKNNKSWMESEFRVYSSANNCTFEYVSQPFLMDLEGKQGNFKNLREFVFKNIDGYFKIYSKHTPINLVRDLPQGFSALEPLVDLPIGINITRFQTLLALHRSYLTPGDSSSGWTAGAAAYYVGYLQPRTFLLKYNENGTITDAVDCALDPLSETKCTLKSFTVEKGIYQTSNFRVQPTESIVRFPNITNLCPFGEVFNATRFTSVYAWNRKRISNCVADYSVLYNSASFSTFKCYGVSPTKLNDLCFTNVYADSFVIRGDEVRQIAPGQTGKIADYNYKLPDDFTGCVIAWNSNNLDSKVGGNYNYLYRLFRKSNLKPFERDISTEIYQAGSTPCNGVEGFNCYFPLQSYGFQPTNGVGYQPYRVVVLSFELLHAPATVCGPKKSTNLVKNKCVNFNFNGLTGTGVLTESNKKFLPFQQFGRDIADTTDAVRDPQTLEILDITPCSFGGVSVITPGTNTSNQVAVLYQDVNCTEVPVAIHADQLTPTWRVYSTGSNVFQTRAGCLIGAEHVNNSYECDIPIGAGICASYQTQTNSPRRARSVASQSIIAYTMSLGAENSVAYSNNSIAIPTNFTISVTTEILPVSMTKTSVDCTMYICGDSTECSNLLLQYGSFCTQLNRALTGIAVEQDKNTQEVFAQVKQIYKTPPIKDFGGFNFSQILPDPSKPSKRSFIEDLLFNKVTLADAGFIKQYGDCLGDIAARDLICAQKFNGLTVLPPLLTDEMIAQYTSALLAGTITSGWTFGAGAALQIPFAMQMAYRFNGIGVTQNVLYENQKLIANQFNSAIGKIQDSLSSTASALGKLQDVVNQNAQALNTLVKQLSSNFGAISSVLNDILSRLDPPEAEVQIDRLITGRLQSLQTYVTQQLIRAAEIRASANLAATKMSECVLGQSKRVDFCGKGYQLMSFPQSAPHGVVFLNVTYVPAQEKNFTTAPAICNDGKAHFPREGVFVSNGTNWFVTQRNFYEPQIITTDNTFVSGNCDVVIGIVNNTVYDPLQPELDSFKEELDKYFKNHTSPDVDLGDISGINASVVNIQKEIDRLNEVAKNLNESLIDLQELGKYEQYIKGGSGYIPEAPRDGQAYVRKDGEWVLLSTFL

SEQ ID NO: 5950 - protein, 1241 aa, Artificial Sequence
  SARS-CoV-2/Portugal/PT0035/2020__EPI_ISL_418020 spike protein (1-1211)(K986P_V987P_ H1048Q_H1064N_ H1083N_H1101N) Foldon construct
MFVFLVLLPLVSSQCVNLTTRTQLPPAYTNSFTRGVYYPDKVFRSSVLHSTQDLFLPFFSNVTWFHAIHVSGTNGTKRFDNPVLPFNDGVYFASTEKSNIIRGWIFGTTLDSKTQSLLIVNNATNVVIKVCEFQFCNDPFLGVYYHKNNKSWMESEFRVYSSANNCTFEYVSQPFLMDLEGKQGNFKNLREFVFKNIDGYFKIYSKHTPINLVRDLPQGFSALEPLVDLPIGINITRFQTLLALHRSYLTPGDSSSGWTAGAAAYYVGYLQPRTFLLKYNENGTITDAVDCALDPLSETKCTLKSFTVEKGIYQTSNFRVQPTESIVRFPNITNLCPFGEVFNATRFASVYAWNRKRISNCVADYSVLYNSASFSTFKCYGVSPTKLNDLCFTNVYADSFVIRGDEVRQIAPGQTGKIADYNYKLPDDFTGCVIAWNSNNLDSKVGGNYNYLYRLFRKSNLKPFERDISTEIYQAGSTPCNGVEGFNCYFPLQSYGFQPTNGVGYQPYRVVVLSFELLHAPATVCGPKKSTNLVKNKCVNFNFNGLTGTGVLTESNKKFLPFQQFGRDIADTTDAVRDPQTLEILDITPCSFGGVSVITPGTNTSNQVAVLYQDVNCTEVPVAIHADQLTPTWRVYSTGSNVFQTRAGCLIGAEHVNNSYECDIPIGAGICASYQTQTNSPRRARSVASQSIIAYTMSLGAENSVAYSNNSIAIPTNFTISVTTEILPVSMTKTSVDCTMYICGDSTECSNLLLQYGSFCTQLNRALTGIAVEQDKNTQEVFAQVKQIYKTPPIKDFGGFNFSQILPDPSKPSKRSFIEDLLFNKVTLADAGFIKQYGDCLGDISARDLICAQKFNGLTVLPPLLTDEMIAQYTSALLAGTITSGWTFGAGAALQIPFAMQMAYRFNGIGVTQNVLYENQKLIANQFNSAIGKIQDSLSSTASALGKLQDVVNQNAQALNTLVKQLSSNFGAISSVLNDILSRLDPPEAEVQIDRLITGRLQSLQTYVTQQLIRAAEIRASANLAATKMSECVLGQSKRVDFCGKGYQLMSFPQSAPHGVVFLNVTYVPAQEKNFTTAPAICNDGKAHFPREGVFVSNGTNWFVTQRNFYEPQIITTDNTFVSGNCDVVIGIVNNTVYDPLQPELDSFKEELDKYFKNHTSPDVDLGDISGINASVVNIQKEIDRLNEVAKNLNESLIDLQELGKYEQYIKGGSGYIPEAPRDGQAYVRKDGEWVLLSTFL

SEQ ID NO: 5951 - protein, 1241 aa, Artificial Sequence
  SARS-CoV-2/USA/NY-NYUMC7/2020__EPI_ISL_418192 spike protein (1-1211)(K986P_V987P_ H1048Q_H1064N_ H1083N_H1101N) Foldon construct
MFVFLVLLPLVSSQCVNLTTRTQLPPAYTNSFTRGVYYPDKVFRSSVLHSTQDLFLPFFSNVTWFHAIHVSGTNGTKRFDNPVLPFNDGVYFASTEKSNIIRGWIFGTTLDSKTQSLLIVNNATNVVIKVCEFQFCNDPFLGVYHHKNNKSWMESEFRVYSSANNCTFEYVSQPFLMDLEGKQGNFKNLREFVFKNIDGYFKIYSKHTPINLVRDLPQGFSALEPLVDLPIGINITRFQTLLALHRSYLTPGDSSSGWTAGAAAYYVGYLQPRTFLLKYNENGTITDAVDCALDPLSETKCTLKSFTVEKGIYQTSNFRVQPTESIVRFPNITNLCPFGEVFNATRFASVYAWNRKRISNCVADYSVLYNSASFSTFKCYGVSPTKLNDLCFTNVYADSFVIRGDEVRQIAPGQTGKIADYNYKLPDDFTGCVIAWNSNNLDSKVGGNYNYLYRLFRKSNLKPFERDISTEIYQAGSTPCNGVEGFNCYFPLQSYGFQPTNGVGYQPYRVVVLSFELLHAPATVCGPKKSTNLVKNKCVNFNFNGLTGTGVLTESNKKFLPFQQFGRDIADTTDAVRDPQTLEILDITPCSFGGVSVITPGTNTSNQVAVLYQGVNCTEVPVAIHADQLTPTWRVYSTGSNVFQTRAGCLIGAEHVNNSYECDIPIGAGICASYQTQTNSPRRARSVASQSIIAYTMSLGAENSVAYSNNSIAIPTNFTISVTTEILPVSMTKTSVDCTMYICGDSTECSNLLLQYGSFCTQLNRALTGIAVEQDKNTQEVFAQVKQIYKTPPIKDFGGFNFSQILPDPSKPSKRSFIEDLLFNKVTLADAGFIKQYGDCLGDIAARDLICAQKFNGLTVLPPLLTDEMIAQYTSALLAGTITSGWTFGAGAALQIPFAMQMAYRFNGIGVTQNVLYENQKLIANQFNSAIGKIQDSLSSTASALGKLQDVVNQNAQALNTLVKQLSSNFGAISSVLNDILSRLDPPEAEVQIDRLITGRLQSLQTYVTQQLIRAAEIRASANLAATKMSECVLGQSKRVDFCGKGYQLMSFPQSAPHGVVFLNVTYVPAQEKNFTTAPAICNDGKAHFPREGVFVSNGTNWFVTQRNFYEPQIITTDNTFVSGNCDVVIGIVNNTVYDPLQPELDSFKEELDKYFKNHTSPDVDLGDISGINASVVNIQKEIDRLNEVAKNLNESLIDLQELGKYEQYIKGGSGYIPEAPRDGQAYVRKDGEWVLLSTFL

SEQ ID NO: 5952 - protein, 1241 aa, Artificial Sequence
  SARS-CoV-2/Iceland/189/2020__EPI_ISL_417709 spike protein (1-1211)(K986P_V987P_ H1048Q_H1064N_ H1083N_H1101N) Foldon construct
MFVFLVLLPLVSSQCVNLTTRTQLPPAYTNSFTRGVYYPDKVFRSSVLHSTQDLFLPFFSNVTWFHAIHVSGTNGTKRFDNPVLPFNDGVYFASTEKSNIIRGWIFGTTLDSKTQSLLIVNNATNVVIKVCEFQFCNDPFLGVYYHKNNKSWMESEFRVYSSANNCTFEYVSQPFLMDLEGKQGNFKNLREFVFKNIDGYFKIYSKHTPINLVRDLPQGFSALEPLVDLPIGINITRFQTLLALHRSYLTPGDSSSGWTAGAAAYYVGYLQPRTFLLKYNENGTITDAVDCALDPLSETKCTLKSFTVEKGIYQTSNFRVQPTESIVRFPNITNLCPFGEVFNATRFASVYAWNRKRISNCVADYSVLYNSASFSTFKCYGVSPTKLNDLCFTNVYADSFVIRGDEVRQIAPGQTGKIADYNYKLPDDFTGCVIAWNSNNLDSKVGGNYNYLYRLFRKSNLKPFERDISTEIYQAGSTPCNGVEGFNCYFPLQSYGFQPTNGVGYQPYRVVVLSFELLHAPATVCGPKKSTNLVKNKCVNFNFNGLTGTGVLTESNKKFLPFQQFGRDIADTTDAVRDPQTLEILDITPCSFGGVSVITPGTNTSNQVAVLYQGVNCTEVPVAIHADQLTPTWRVYSTGSNVFQTRAGCLIGAEHVNNSYECDIPIGAGICASYQTQTNSPRRARSVASQSIIAYTMSLGAENSVAYSNNSIAIPTNFTISVTTEILPVSMTKTSVDCTMYICGDSTECSNLLLQYGSFCTQLNRALTGIAVEQDKNTQEVFAQVKQIYKTPPIKDFGGFNFSQILPDPSKPSKRSFIEDLLFNKVTLADAGFTKQYGDCLGDIAARDLICAQKFNGLTVLPPLLTDEMIAQYTSALLAGTITSGWTFGAGAALQIPFAMQMAYRFNGIGVTQNVLYENQKLIANQFNSAIGKIQDSLSSTASALGKLQDVVNQNAQALNTLVKQLSSNFGAISSVLNDILSRLDPPEAEVQIDRLITGRLQSLQTYVTQQLIRAAEIRASANLAATKMSECVLGQSKRVDFCGKGYQLMSFPQSAPHGVVFLNVTYVPAQEKNFTTAPAICNDGKAHFPREGVFVSNGTNWFVTQRNFYEPQIITTDNTFVSGNCDVVIGIVNNTVYDPLQPELDSFKEELDKYFKNHTSPDVDLGDISGINASVVNIQKEIDRLNEVAKNLNESLIDLQELGKYEQYIKGGSGYIPEAPRDGQAYVRKDGEWVLLSTFL

SEQ ID NO: 5953 - protein, 1241 aa, Artificial Sequence
  SARS-CoV-2/Australia/NSW56/2020__EPI_ISL_417408 spike protein (1-1211)(K986P_V987P_ H1048Q_H1064N_ H1083N_H1101N) Foldon construct
MFVFLVLLPLVSSQCVNLTTRTQLPPAYTNSFTRGVYYPDKVFRSSVLHSTQDLFLPFFSNVTWFHAIHVSGTNGTKRFDNPVLPFNDGVYFASTEKSNIIRGWIFGTTLDSKTQSLLIVNNATNVVIKVCEFQFCNDPFLGVYYHKNNKSWMESEFRVYSSANNCTFEYVSQPFLMDLEGKQGNFKNLREFVFKNIDGYFKIYSKHTPINLVRDLPQGFSALEPLVDLPIGINITRFQTLLALHRSYLTPGDSSSGWTAGAAAYYVGYLQPRTFLLKYNENGTITDAVDCALDPLSETKCTLKSFTVEKGIYQTSNFRVQPTESIVRFPNITNLCPFGEVFNATRFASVYAWNRKRISNCVADYSVLYNSASFSTFKCYGVSPTKLNDLCFTNVYADSFVIRGDEVRQIAPGQTGKIADYNYKLPDDFTGCVIAWNSNNLDSKVGGNYNYLYRLFRKSNLKPFERDISTEIYQAGSTPCNGVEGFNCYFPLQSYGFQPTNGVGYQPYRVVVLSFELLHAPATVCGPKKSTNLVKNKCVNFNFNGLTGTGVLTESNKKFLPFQQFGRDIADTTDAVRDPQTLEILDITPCSFGGVSVITPGTNTSNQVAVLYQDVNCTEVPVAIHADQLTPTWRVYSTGSNVFQTRAGCLIGAEHVNNSYECDIPIGAGICASYQTQTNSPRRARSVASQSIIAYTMSLGAENSVAYSNNSIAIPTNFTISVTTEILPVSMTKTSVDCTMYICGDSTECSNLLLQYGSFCTQLNRALTGIAVEQDKNTQEVFAQVKQIYKTPPIKDFGGFNFSQILPDSSKPSKRSFIEDLLFNKVTLADAGFIKQYGDCLGDIAARDLICAQKFNGLTVLPPLLTDEMIAQYTSALLAGTITSGWTFGAGAALQIPFAMQMAYRFNGIGVTQNVLYENQKLIANQFNSAIGKIQDSLSSTASALGKLQDVVNQNAQALNTLVKQLSSNFGAISSVLNDILSRLDPPEAEVQIDRLITGRLQSLQTYVTQQLIRAAEIRASANLAATKMSECVLGQSKRVDFCGKGYQLMSFPQSAPHGVVFLNVTYVPAQEKNFTTAPAICNDGKAHFPREGVFVSNGTNWFVTQRNFYEPQIITTDNTFVSGNCDVVIGIVNNTVYDPLQPELDSFKEELDKYFKNHTSPDVDLGDISGINASVVNIQKEIDRLNEVAKNLNESLIDLQELGKYEQYIKGGSGYIPEAPRDGQAYVRKDGEWVLLSTFL

SEQ ID NO: 5954 - protein, 1241 aa, Artificial Sequence
  SARS-CoV-2/Iceland/280/2020__EPI_ISL_417608 spike protein (1-1211)(K986P_V987P_ H1048Q_H1064N_ H1083N_H1101N) Foldon construct
MFVFLVLLPLVSSQCVNLTTRTQLPPAYTNSFTRGVYYPDKVFRSSVLHSTQDLFLPFFSNVTWFHAIHVSGTNGTKRFDNPVLPFNDGVYFASTEKSNIIRGWIFGTTLDSKTQSLLIVNNATNVVIKVCEFQFCNDPFLGVYYHKNNKSWMESEFRVYSSANNCTFEYVSQPFLMDLEGKQGNFKNLREFVFKNIDGYFKIYSKHTPINLVRDLPQGFSALEPLVDLPIGINITRFQTLLALHRSYLTPGDSSSGWTAGAAAYYVGYLQPRTFLLKYNENGTITDAVDCALDPLSETKCTLKSFTVEKGIYQTSNFRVQPTESIVRFPNITNLCPFGEVFNATRFASVYAWNRKRISNCVADYSVLYNSASFSTFKCYGVSPTKLNDLCFTNVYADSFVIRGDEVRQIAPGQTGKIADYNYKLPDDFTGCVIAWNSNNLDSKVGGNYNYLYRLFRKSNLKPFERDISTEIYQAGSTPCNGVEGFNCYFPLQSYGFQPTNGVGYQPYRVVVLSFELLHAPATVCGPKKSTNLVKNKCVNFNFNGLTGTGVLTESNKKFLPFQQFGRDIADTTDAVRDPQTLEILDITPCSFGGVSVITPGTNTSNQVAVLYQGVNCTEVPVAIHADQLTPTWRVYSTGSNVFQTRAGCLIGAEHVNNSYECDIPIGAGICASYHTQTNSPRRARSVASQSIIAYTMSLGAENSVAYSNNSIAIPTNFTISVTTEILPVSMTKTSVDCTMYICGDSTECSNLLLQYGSFCTQLNRALTGIAVEQDKNTQEVFAQVKQIYKTPPIKDFGGFNFSQILPDPSKPSKRSFIEDLLFNKVTLADAGFIKQYGDCLGDIAARDLICAQKFNGLTVLPPLLTDEMIAQYTSALLAGTITSGWTFGAGAALQIPFAMQMAYRFNGIGVTQNVLYENQKLIANQFNSAIGKIQDSLSSTASALGKLQDVVNQNAQALNTLVKQLSSNFGAISSVLNDILSRLDPPEAEVQIDRLITGRLQSLQTYVTQQLIRAAEIRASANLAATKMSECVLGQSKRVDFCGKGYQLMSFPQSAPHGVVFLNVTYVPAQEKNFTTAPAICNDGKAHFPREGVFVSNGTNWFVTQRNFYEPQIITTDNTFVSGNCDVVIGIVNNTVYDPLQPELDSFKEELDKYFKNHTSPDVDLGDISGINASVVNIQKEIDRLNEVAKNLNESLIDLQELGKYEQYIKGGSGYIPEAPRDGQAYVRKDGEWVLLSTFL

SEQ ID NO: 5955 - protein, 1241 aa, Artificial Sequence; identical to SEQ ID NO: 5910
  SARS-CoV-2/Iceland/247/2020__EPI_ISL_417575 spike protein (1-1211)(K986P_V987P_ H1048Q_H1064N_ H1083N_H1101N) Foldon construct

SEQ ID NO: 5956 - protein, 1241 aa, Artificial Sequence
  SARS-CoV-2/Iceland/238/2020__EPI_ISL_417566 spike protein (1-1211)(K986P_V987P_ H1048Q_H1064N_ H1083N_H1101N) Foldon construct
MFVFLVLLPLVSSQCVNLTTRTQLPPAYTNSFTRGVYYPDKVFRSSVLHSTQDLFLPFFSNVTWFHAIHVSGTNGTKRFDNPVLPFNDGVYFASTEKSNIIRGWIFGTTLDSKTQSLLIVNNATNVVIKVCEFQFCNDPFLGVYYHKNNKSWMESEFRVYSSANNCTFEYVSQPFLMDLEGKQGNFKNLREFVFKNIDGYFKIYSKHTPINLVRDLPQGFSALEPLVDLPIGINITRFQTLLALHRSYLTPGDSSSGWTAGAAAYYVGYLQPRTFLLKYNENGTITDAVDCALDPLSETKCTLKSFTVEKGIYQTSNFRVQPTESIVRFPNITNLCPFGEVFNATRFASVYAWNRKRISNCVADYSVLYNSASFSTFKCYGVSPTKLNDLCFTNVYADSFVIRGDEVRQIAPGQTGKIADYNYKLPDDFTGCVIAWNSNNLDSKVGGNYNYLYRLFRKSNLKPFERDISTEIYQAGSTPCNGVEGFNCYFPLQSYGFQPTNGVGYQPYRVVVLSFELLHAPATVCGPKKSTNLVKNKCVNFNFNGLTGTGVLTESNKKFLPFQQFGRDIADTTDAVRDPQTLEILDITPCSFGGVSVITPGTNTSNQVAVLYQGVNCTEVPVAIHADQLTPTWRVYSTGSNVFQTRAGCLIGAEHVNNSYECDIPIGAGICASYQTQTNSPRRARSVASQSIIAYTMSLGAENSVAYSNNSIAIPTNFTISVTTEILPVSMTKTSVDCTMYICGDSTECSNLLLQYGSFCTQLNRALTGIAVEQDKNTQEVFAQVKQIYKTPPIKDFGGFNFSQILPDPSKPSKRSFIEDLLFNKVTLADVGFIKQYGDCLGDIAARDLICAQKFNGLTVLPPLLTDEMIAQYTSALLAGTITSGWTFGAGAALQIPFAMQMAYRFNGIGVTQNVLYENQKLIANQFNSAIGKIQDSLSSTASALGKLQDVVNQNAQALNTLVKQLSSNFGAISSVLNDILSRLDPPEAEVQIDRLITGRLQSLQTYVTQQLIRAAEIRASANLAATKMSECVLGQSKRVDFCGKGYQLMSFPQSAPHGVVFLNVTYVPAQEKNFTTAPAICNDGKAHFPREGVFVSNGTNWFVTQRNFYEPQIITTDNTFVSGNCDVVIGIVNNTVYDPLQPELDSFKEELDKYFKNHTSPDVDLGDISGINASVVNIQKEIDRLNEVAKNLNESLIDLQELGKYEQYIKGGSGYIPEAPRDGQAYVRKDGEWVLLSTFL

SEQ ID NO: 5957 - protein, 1241 aa, Artificial Sequence
  SARS-CoV-2/Greece/16/2020__EPI_ISL_418265 spike protein (1-1211)(K986P_V987P_ H1048Q_H1064N_ H1083N_H1101N) Foldon construct
MFVFLVLLPLVSSQCVNLTTRTQLPPAYTNSFTRGVYYPDKVFRSSVLHSTQDLFLPFFSNVTWFHAIHVSGTNGTKRFDNPVLPFNDGVYFASTEKSNIIRGWIFGTTLDSKTQSLLIVNNATNVVIKVCEFQFCNDPFLGVYYHKNNKSWMESEFRVYSSANNCTFEYVSQPFLMDLEGKQGNFKNLREFVFKNVDGYFKIYSKHTPINLVRDLPQGFSALEPLVDLPIGINITRFQTLLALHRSYLTPGDSSSGWTAGAAAYYVGYLQPRTFLLKYNENGTITDAVDCALDPLSETKCTLKSFTVEKGIYQTSNFRVQPTESIVRFPNITNLCPFGEVFNATRFASVYAWNRKRISNCVADYSVLYNSASFSTFKCYGVSPTKLNDLCFTNVYADSFVIRGDEVRQIAPGQTGKIADYNYKLPDDFTGCVIAWNSNNLDSKVGGNYNYLYRLFRKSNLKPFERDISTEIYQAGSTPCNGVEGFNCYFPLQSYGFQPTNGVGYQPYRVVVLSFELLHAPATVCGPKKSTNLVKNKCVNFNFNGLTGTGVLTESNKKFLPFQQFGRDIADTTDAVRDPQTLEILDITPCSFGGVSVITPGTNTSNQVAVLYQDVNCTEVPVAIHADQLTPTWRVYSTGSNVFQTRAGCLIGAEHVNNSYECDIPIGAGICASYQTQTNSPRRARSVASQSIIAYTMSLGAENSVAYSNNSIAIPTNFTISVTTEILPVSMTKTSVDCTMYICGDSTECSNLLLQYGSFCTQLNRALTGIAVEQDKNTQEVFAQVKQIYKTPPIKDFGGFNFSQILPDPSKPSKRSFIEDLLFNKVTLADAGFIKQYGDCLGDIAARDLICAQKFNGLTVLPPLLTDEMIAQYTSALLAGTITSGWTFGAGAALQIPFAMQMAYRFNGIGVTQNVLYENQKLIANQFNSAIGKIQDSLSSTASALGKLQDVVNQNAQALNTLVKQLSSNFGAISSVLNDILSRLDPPEAEVQIDRLITGRLQSLQTYVTQQLIRAAEIRASANLAATKMSECVLGQSKRVDFCGKGYQLMSFPQSAPHGVVFLNVTYVPAQEKNFTTAPAICNDGKAHFPREGVFVSNGTNWFVTQRNFYEPQIITTDNTFVSGNCDVVIGIVNNTVYDPLQPELDSFKEELDKYFKNHTSPDVDLGDISGINASVVNIQKEIDRLNEVAKNLNESLIDLQELGKYEQYIKGGSGYIPEAPRDGQAYVRKDGEWVLLSTFL

SEQ ID NO: 5958 - protein, 1241 aa, Artificial Sequence
  SARS-CoV-2/Iceland/319/2020__EPI_ISL_417648 spike protein (1-1211)(K986P_V987P_ H1048Q_H1064N_ H1083N_H1101N) Foldon construct
MFVFLVLLPLVSSQCVNLTTRTQLPPAYTNSFTRGVYYPDKVFRSSVLHSTQDLFLPFFSNVTWFHAIHVSGTNGTKRFDNPVLPFNDGVYFASTEKSNIIRGWIFGTTLDSKTQSLLIVNNATNVVIKVCEFQFCNDPFLGVYYHKNNKSWMESEFRVYSSANNCTFEYVSQPFLIDLEGKQGNFKNLREFVFKNIDGYFKIYSKHTPINLVRDLPQGFSALEPLVDLPIGINITRFQTLLALHRSYLTPGDSSSGWTAGAAAYYVGYLQPRTFLLKYNENGTITDAVDCALDPLSETKCTLKSFTVEKGIYQTSNFRVQPTESIVRFPNITNLCPFGEVFNATRFASVYAWNRKRISNCVADYSVLYNSASFSTFKCYGVSPTKLNDLCFTNVYADSFVIRGDEVRQIAPGQTGKIADYNYKLPDDFTGCVIAWNSNNLDSKVGGNYNYLYRLFRKSNLKPFERDISTEIYQAGSTPCNGVEGFNCYFPLQSYGFQPTNGVGYQPYRVVVLSFELLHAPATVCGPKKSTNLVKNKCVNFNFNGLTGTGVLTESNKKFLPFQQFGRDIADTTDAVRDPQTLEILDITPCSFGGVSVITPGTNTSNQVAVLYQGVNCTEVPVAIHADQLTPTWRVYSTGSNVFQTRAGCLIGAEHVNNSYECDIPIGAGICASYQTQTNSPRRARSVASQSIIAYTMSLGAENSVAYSNNSIAIPTNFTISVTTEILPVSMTKTSVDCTMYICGDSTECSNLLLQYGSFCTQLNRALTGIAVEQDKNTQEVFAQVKQIYKTPPIKDFGGFNFSQILPDPSKPSKRSFIEDLLFNKVTLADAGFIKQYGDCLGDIAARDLICAQKFNGLTVLPPLLTDEMIAQYTSALLAGTITSGWTFGAGAALQIPFAMQMAYRFNGIGVTQNVLYENQKLIANQFNSAIGKIQDSLSSTASALGKLQDVVNQNAQALNTLVKQLSSNFGAISSVLNDILSRLDPPEAEVQIDRLITGRLQSLQTYVTQQLIRAAEIRASANLAATKMSECVLGQSKRVDFCGKGYQLMSFPQSAPHGVVFLNVTYVPAQEKNFTTAPAICNDGKAHFPREGVFVSNGTNWFVTQRNFYEPQIITTDNTFVSGNCDVVIGIVNNTVYDPLQPELDSFKEELDKYFKNHTSPDVDLGDISGINASVVNIQKEIDRLNEVAKNLNESLIDLQELGKYEQYIKGGSGYIPEAPRDGQAYVRKDGEWVLLSTFL

SEQ ID NO: 5959 - protein, 1241 aa, Artificial Sequence
  SARS-CoV-2/Congo/94/2020__EPI_ISL_417947 spike protein (1-1211)(K986P_V987P_ H1048Q_H1064N_ H1083N_H1101N) Foldon construct
MFVFLVLLPLVSSQCVNLTTRTQLPPAYTNSFTRGVYYPDKVFRSSVLHSTQDLFLPFFSNVTWFHAIHVSGTNGTKRFDNPVLPFNDGVYFASTEKSNIIRGWIFGTTLDSKTQSLLIVNNATNVVIKVCEFQFCNDPFLGVYYHKNNKSWMESEFRVYSSANNCTFEYVSQPFLMDLEGKQGNFKNLREFVFKNIDGYFKIYSKHTPINLVRDLPQGFSALEPLVDLPIGINITRFQTLLALHRSYLTPGDSSSGWTAGAAAYYVGYLQPRTFLLKYNENGTITDAVDCALDPLSETKCTLKSFTVEKGIYQTSNFRVQPTESIVRFPNITNLCPFGEVFNATRFASVYAWNRKRISNCVADYSVLYNSASFSTFKCYGVSPTKLNDLCFTNVYADSFVIRGDEVRQIAPGQTGKIADYNYKLPDDFTGCVIAWNSNNLDSKVGGNYNYLYRLFRKSNLKPFERDISTEIYQAGSTPCNGVEGFNCYFPLQSYGFQPTNGVGYQPYRVVVLSFELLHAPATVCGPKKSTNLVKNKCVNFNFNGLTGTGVLTESNKKFLPFQQFGRDIADTTDAVRDPQTLEILDITPCSFGGVSVITPGTNTSNQVAVLYQGVNCTEVPVAIHADQLTPTWRVYSTGSNVFQTRAGCLIGAEHVNNSYECDIPIGAGICASYQTQTNSPRRARSVASQSIIAYTMSLGAENSVAYSNNSIAIPTNFTISVTTEILPVSMTKTSVDCTMYICGDSTECSNLLLQYGSFCTQLNRALTGIAVEQDKNTQEVFAQVKQIYKTPPIKDFGGFNFSQILPDPSKPSKRSFIEDILFNKVTLADAGFIKQYGDCLGDIAARDLICAQKFNGLTVLPPLLTDEMIAQYTSALLAGTITSGWTFGAGAALQIPFAMQMAYRFNGIGVTQNVLYENQKLIANQFNSAIGKIQDSLSSTASALGKLQDVVNQNAQALNTLVKQLSSNFGAISSVLNDILSRLDPPEAEVQIDRLITGRLQSLQTYVTQQLIRAAEIRASANLAATKMSECVLGQSKRVDFCGKGYQLMSFPQSAPHGVVFLNVTYVPAQEKNFTTAPAICNDGKAHFPREGVFVSNGTNWFVTQRNFYEPQIITTDNTFVSGNCDVVIGIVNNTVYDPLQPELDSFKEELDKYFKNHTSPDVDLGDISGINASVVNIQKEIDRLNEVAKNLNESLIDLQELGKYEQYIKGGSGYIPEAPRDGQAYVRKDGEWVLLSTFL

SEQ ID NO: 5960 - protein, 1241 aa, Artificial Sequence
  SARS-CoV-2/Congo/158/2020__EPI_ISL_417950 spike protein (1-1211)(K986P_V987P_ H1048Q_H1064N_ H1083N_H1101N) Foldon construct
MFVFLVLLPLVSSQCVNLTTRTQLPPAYTNSFTRGVYYPDKVFRSSVLHSTQDLFLPFFSNVTWFHAIHVSGTNGTKRFDNPVLPFNDGVYFASTEKSNIIRGWIFGTTLDSKTQSLLIVNNATNVVIKVCEFQFCNDPFLGVYYHKNNKSWMESEFRVYSSANNCTFEYVSQPFLMDLEGKQGNFKNLREFVFKNIDGYFKIYSKHTPINLVRDLPQGFSALEPLVDLPIGINITRFQTLLALHRSYLTPGDSSSGWTAGAAAYYVGYLQPRTFLLKYNENGTITDAVDCALDPLSETKCTLKSFTVEKGIYQTSNFRVQPTESIVRFPNITNLCPFGEVFNATRFASVYAWNRKRISNCVADYSVLYNSASFSTFKCYGVSPTKLNDLCFTNVYADSFVIRGDEVRQIAPGQTGKIADYNYKLPDDFTGCVIAWNSNNLDSKVGGNYNYLYRLFRKSNLKPFERDISTEIYQAGSTPCNGVEGFNCYFPLQSYGFQPTNGVGYQPYRVVVLSFELLHAPATVCGPKKSTNLVKNKCVNFNFNGLTGTGVLTESNKKFLPFQQFGRDIADTTDAVRDPQTLEILDITPCSFGGVSVITPGTNTSNQVAVLYQDVNCTEVPVAIHADQLTPTWRVYSTGSNVFQTRAGCLIGAEHVNNSYECDIPIGAGICASYQTQTNSPRRARSVASQSIIAYTMSLGAENSVAYSNNSIAIPTNFTISVTTEILPVSMTKTSVDCTMYICGDSTECSNLLLQYGSFCTQLNRALTGIAVEQDKNTQEVFAQVKQIYKTPPIKDFGGFNFSQILPDPSKPSKRSFIEDLLFNKVTLADAGFIKQYGDCLGDIAARDLICAQKFNGLTVLPPLLTDEMIAQYTSALLAGTITSGWTFGAGAALQIPFAMQMAYRFNGIGVTQNVLYENQKLIANQFNSAIGKIQDSLSSTASALGKLQDVVNQNAQALNTLVKQLSSNFGAISSVLNDILSRLDPPEAEVQIDRLITGRLQSLQTYVTQQLIRAAEIRASANLAATKMSECVLGQSKRVDFCGKGYQLMSFPQSAPHGVVFLNVTYVPAQEKNFTTAPAICNDGKAHFPREGVFVSNGTNWFVTQRNFYEPQIITTDNTFLSGNCDVVIGIVNNTVYDPLQPELDSFKEELDKYFKNHTSPDVDLGDISGINASVVNIQKEIDRLNEVAKNLNESLIDLQELGKYEQYIKGGSGYIPEAPRDGQAYVRKDGEWVLLSTFL

SEQ ID NO: 5961 - protein, 1241 aa, Artificial Sequence
  SARS-CoV-2/USA/UT-00034/2020__EPI_ISL_417977 spike protein (1-1211)(K986P_V987P_ H1048Q_H1064N_ H1083N_H1101N) Foldon construct
MFVFLVLLPLVSSQCVNLTTRTQLPPAYTNSFTRGVYYPDKVFRSSVLHSTQDLFLPFFSNVTWFHAIHVSGTNGTKRFDNPVLPFNDGVYFASTEKSNIIRGWIFGTTLDSKTQSLLIVNNATNVVIKVCEFQFCNDPFLGVYYYKNNKSWMESEFRVYSSANNCTFEYVSQPFLMDLEGKQGNFKNLREFVFKNIDGYFKIYSKHTPINLVRDLPQGFSALEPLVDLPIGINITRFQTLLALHRSYLTPGDSSSGWTAGAAAYYVGYLQPRTFLLKYNENGTITDAVDCALDPLSETKCTLKSFTVEKGIYQTSNFRVQPTESIVRFPNITNLCPFGEVFNATRFASVYAWNRKRISNCVADYSVLYNSASFSTFKCYGVSPTKLNDLCFTNVYADSFVIRGDEVRQIAPGQTGKIADYNYKLPDDFTGCVIAWNSNNLDSKVGGNYNYLYRLFRKSNLKPFERDISTEIYQAGSTPCNGVEGFNCYFPLQSYGFQPTNGVGYQPYRVVVLSFELLHAPATVCGPKKSTNLVKNKCVNFNFNGLTGTGVLTESNKKFLPFQQFGRDIADTTDAVRDPQTLEILDITPCSFGGVSVITPGTNTSNQVAVLYQGVNCTEVPVAIHADQLTPTWRVYSTGSNVFQTRAGCLIGAEHVNNSYECDIPIGAGICASYQTQTNSPRRARSVASQSIIAYTMSLGAENSVAYSNNSIAIPTNFTISVTTEILPVSMTKTSVDCTMYICGDSTECSNLLLQYGSFCTQLNRALTGIAVEQDKNTQEVFAQVKQIYKTPPIKDFGGFNFSQILPDPSKPSKRSFIEDLLFNKVTLADAGFIKQYGDCLGDIAARDLICAQKFNGLTVLPPLLTDEMIAQYTSALLAGTITSGWTFGAGAALQIPFAMQMAYRFNGIGVTQNVLYENQKLIANQFNSAIGKIQDSLSSTASALGKLQDVVNQNAQALNTLVKQLSSNFGAISSVLNDILSRLDPPEAEVQIDRLITGRLQSLQTYVTQQLIRAAEIRASANLAATKMSECVLGQSKRVDFCGKGYQLMSFPQSAPHGVVFLNVTYVPAQEKNFTTAPAICNDGKAHFPREGVFVSNGTNWFVTQRNFYEPQIITTDNTFVSGNCDVVIGIVNNTVYDPLQPELDSFKEELDKYFKNHTSPDVDLGDISGINASVVNIQKEIDRLNEVAKNLNESLIDLQELGKYEQYIKGGSGYIPEAPRDGQAYVRKDGEWVLLSTFL

SEQ ID NO: 5962 - protein, 1241 aa, Artificial Sequence
  SARS-CoV-2/USA/UT-00033/2020__EPI_ISL_417976 spike protein (1-1211)(K986P_V987P_ H1048Q_H1064N_ H1083N_H1101N) Foldon construct
MFVFLVLLPLVSSQCVNLTTRTQLPPAYTNSFTRGVYYPDKVFRSSVLHSTQDLFLPFFSNVTWFHAIHVSGTNGTKRFDNPVLPFNDGVYFASTEKSNIIRGWIFGTTLDSKTQSLLIVNNATNVVIKVCEFQFCNDPFLGVYYHKNNKSWMESEFRVYSSANNCTFEYVSQPFLMDLEGKQGNFKNLREFVFKNIDGYFKIYSKHTPINLVRDLPQGFSALEPLVDLPIGINITRFQTLLALHRSYLTPGDSSSGLTAGAAAYYVGYLQPRTFLLKYNENGTITDAVDCALDPLSETKCTLKSFTVEKGIYQTSNFRVQPTESIVRFPNITNLCPFGEVFNATRFASVYAWNRKRISNCVADYSVLYNSASFSTFKCYGVSPTKLNDLCFTNVYADSFVIRGDEVRQIAPGQTGKIADYNYKLPDDFTGCVIAWNSNNLDSKVGGNYNYLYRLFRKSNLKPFERDISTEIYQAGSTPCNGVEGFNCYFPLQSYGFQPTNGVGYQPYRVVVLSFELLHAPATVCGPKKSTNLVKNKCVNFNFNGLTGTGVLTESNKKFLPFQQFGRDIADTTDAVRDPQTLEILDITPCSFGGVSVITPGTNTSNQVAVLYQGVNCTEVPVAIHADQLTPTWRVYSTGSNVFQTRAGCLIGAEHVNNSYECDIPIGAGICASYQTQTNSPRRARSVASQSIIAYTMSLGAENSVAYSNNSIAIPTNFTISVTTEILPVSMTKTSVDCTMYICGDSTECSNLLLQYGSFCTQLNRALTGIAVEQDKNTQEVFAQVKQIYKTPPIKDFGGFNFSQILPDPSKPSKRSFIEDLLFNKVTLADAGFIKQYGDCLGDIAARDLICAQKFNGLTVLPPLLTDEMIAQYTSALLAGTITSGWTFGAGAALQIPFAMQMAYRFNGIGVTQNVLYENQKLIANQFNSAIGKIQDSLSSTASALGKLQDVVNQNAQALNTLVKQLSSNFGAISSVLNDILSRLDPPEAEVQIDRLITGRLQSLQTYVTQQLIRAAEIRASANLAATKMSECVLGQSKRVDFCGKGYQLMSFPQSAPHGVVFLNVTYVPAQEKNFTTAPAICNDGKAHFPREGVFVSNGTNWFVTQRNFYEPQIITTDNTFVSGNCDVVIGIVNNTVYDPLQPELDSFKEELDKYFKNHTSPDVDLGDISGINASVVNIQKEIDRLNEVAKNLNESLIDLQELGKYEQYIKGGSGYIPEAPRDGQAYVRKDGEWVLLSTFL

SEQ ID NO: 5963 - protein, 1241 aa, Artificial Sequence
  SARS-CoV-2/USA/WI-13/2020__EPI_ISL_417516 spike protein (1-1211)(K986P_V987P_ H1048Q_H1064N_ H1083N_H1101N) Foldon construct
MFVFLVLLPLVSSQCVNLTTRTQLPPAYTNSFTRGVYYPDKVFRSSVLHSTQDLFLPFFSNVTWFHAIHVSGTNGTKRFDNPVLPFNDGVYFASTEKSNIIRGWIFGTTLDSKTQSLLIVNNATNVVIKVCEFQFCNDPFLGVYYHKNNKSWMESEFRVYSSANNCTFEYVSQPFLMDLEGKQGNFKNLREFVFKNIDGYFKIYSKHTPINLVRDLPQGFSALEPLVDLPIGINITRFQTLLALHRSYLTPGDSSSGWTAGAAAYYVGYLQPRTFLLKYNENGTITDAVDCALDPLSETKCTLKSFTVEKGIYQTSNFRVLPTESIVRFPNITNLCPFGEVFNATRFASVYAWNRKRISNCVADYSVLYNSASFSTFKCYGVSPTKLNDLCFTNVYADSFVIRGDEVRQIAPGQTGKIADYNYKLPDDFTGCVIAWNSNNLDSKVGGNYNYLYRLFRKSNLKPFERDISTEIYQAGSTPCNGVEGFNCYFPLQSYGFQPTNGVGYQPYRVVVLSFELLHAPATVCGPKKSTNLVKNKCVNFNFNGLTGTGVLTESNKKFLPFQQFGRDIADTTDAVRDPQTLEILDITPCSFGGVSVITPGTNTSNQVAVLYQGVNCTEVPVAIHADQLTPTWRVYSTGSNVFQTRAGCLIGAEHVNNSYECDIPIGAGICASYQTQTNSPRRARSVASQSIIAYTMSLGAENSVAYSNNSIAIPTNFTISVTTEILPVSMTKTSVDCTMYICGDSTECSNLLLQYGSFCTQLNRALTGIAVEQDKNTQEVFAQVKQIYKTPPIKDFGGFNFSQILPDPSKPSKRSFIEDLLFNKVTLADAGFIKQYGDCLGDIAARDLICAQKFNGLTVLPPLLTDEMIAQYTSALLAGTITSGWTFGAGAALQIPFAMQMAYRFNGIGVTQNVLYENQKLIANQFNSAIGKIQDSLSSTASALGKLQDVVNQNAQALNTLVKQLSSNFGAISSVLNDILSRLDPPEAEVQIDRLITGRLQSLQTYVTQQLIRAAEIRASANLAATKMSECVLGQSKRVDFCGKGYQLMSFPQSAPHGVVFLNVTYVPAQEKNFTTAPAICNDGKAHFPREGVFVSNGTNWFVTQRNFYEPQIITTDNTFVSGNCDVVIGIVNNTVYDPLQPELDSFKEELDKYFKNHTSPDVDLGDISGINASVVNIQKEIDRLNEVAKNLNESLIDLQELGKYEQYIKGGSGYIPEAPRDGQAYVRKDGEWVLLSTFL

SEQ ID NO: 5964 - protein, 1240 aa, Artificial Sequence
  SARS-CoV-2/India/1-27/2020__EPI_ISL_413522 spike protein (1-1210)(K985P_V986P_ H1047Q_H1063N_ H1082N_H1100N) Foldon construct
MFVFLVLLPLVSSQCVNLTTRTQLPPAYTNSFTRGVYYPDKVFRSSVLHSTQDLFLPFFSNVTWFHAIHVSGTNGTKRFDNPVLPFNDGVYFASTEKSNIIRGWIFGTTLDSKTQSLLIVNNATNVVIKVCEFQFCNDPFLGVYHKNNKSWMESEFRVYSSANNCTFEYVSQPFLMDLEGKQGNFKNLREFVFKNIDGYFKIYSKHTPINLVRDLPQGFSALEPLVDLPIGINITRFQTLLALHRSYLTPGDSSSGWTAGAAAYYVGYLQPRTFLLKYNENGTITDAVDCALDPLSETKCTLKSFTVEKGIYQTSNFRVQPTESIVRFPNITNLCPFGEVFNATRFASVYAWNRKRISNCVADYSVLYNSASFSTFKCYGVSPTKLNDLCFTNVYADSFVIRGDEVIQIAPGQTGKIADYNYKLPDDFTGCVIAWNSNNLDSKVGGNYNYLYRLFRKSNLKPFERDISTEIYQAGSTPCNGVEGFNCYFPLQSYGFQPTNGVGYQPYRVVVLSFELLHAPATVCGPKKSTNLVKNKCVNFNFNGLTGTGVLTESNKKFLPFQQFGRDIADTTDAVRDPQTLEILDITPCSFGGVSVITPGTNTSNQVAVLYQDVNCTEVPVAIHADQLTPTWRVYSTGSNVFQTRAGCLIGAEHVNNSYECDIPIGAGICASYQTQTNSPRRARSVASQSIIAYTMSLGAENSVAYSNNSIAIPTNFTISVTTEILPVSMTKTSVDCTMYICGDSTECSNLLLQYGSFCTQLNRALTGIAVEQDKNTQEVFAQVKQIYKTPPIKDFGGFNFSQILPDPSKPSKRSFIEDLLFNKVTLADAGFIKQYGDCLGDIAARDLICAQKFNGLTVLPPLLTDEMIAQYTSALLAGTITSGWTFGAGAALQIPFAMQMAYRFNGIGVTQNVLYENQKLIANQFNSAIGKIQDSLSSTASALGKLQDVVNQNAQALNTLVKQLSSNFGAISSVLNDILSRLDPPEAEVQIDRLITGRLQSLQTYVTQQLIRAAEIRASANLAATKMSECVLGQSKRVDFCGKGYQLMSFPQSAPHGVVFLNVTYVPAQEKNFTTAPAICNDGKAHFPREGVFVSNGTNWFVTQRNFYEPQIITTDNTFVSGNCDVVIGIVNNTVYDPLQPELDSFKEELDKYFKNHTSPDVDLGDISGINASVVNIQKEIDRLNEVAKNLNESLIDLQELGKYEQYIKGGSGYIPEAPRDGQAYVRKDGEWVLLSTFL

SEQ ID NO: 5965 - protein, 1235 aa, Artificial Sequence
  SARS-CoV-2/pangolin/Guangxi/P4L/2017__EPI_ISL_410538 spike protein (1-1205)(K980P_V981P_ H1042Q_H1058N_ H1077N_H1095N) Foldon construct
MFVFLFVLPLVSSQCVNLTTRTGIPPGYTNSSTRGVYYPDKVFRSSILHLTQDLFLPFFSNVTWFNTINYQGGFKKFDNPVLPFNDGVYFASTEKSNIIRGWIFGTTLDARTQSLLIVNNATNVVIKVCEFQFCTDPFLGVYYHNNNKTWVENEFRVYSSANNCTFEYISQPFLMDLEGKQGNFKNLREFVFKNVDGYFKIYSKHTPIDLVRDLPRGFAALEPLVDLPIGINITRFQTLLALHRSYLTPGNLESGWTTGAAAYYVGYLQQRTFLLSYNQNGTITDAVDCSLDPLSETKCTLKSLTVEKGIYQTSNFRVQPTISIVRFPNITNLCPFGEVFNASKFASVYAWNRKRISNCVADYSVLYNSTSFSTFKCYGVSPTKLNDLCFTNVYADSFVVKGDEVRQIAPGQTGVIADYNYKLPDDFTGCVIAWNSVKQDALTGGNYGYLYRLFRKSKLKPFERDISTEIYQAGSTPCNGQVGLNCYYPLERYGFHPTTGVNYQPFRVVVLSFELLNGPATVCGPKLSTTLVKDKCVNFNFNGLTGTGVLTTSKKQFLPFQQFGRDISDTTDAVRDPQTLEILDITPCSFGGVSVITPGTNTSNQVAVLYQDVNCTEVPMAIHAEQLTPAWRVYSAGANVFQTRAGCLVGAEHVNNSYECDIPVGAGICASYHSMSSLRSVNQRSIIAYTMSLGAENSVAYSNNSIAIPTNFTISVTTEILPVSMTKTSVDCTMYICGDSIECSNLLLQYGSFCTQLNRALTGIAVEQDKNTQEVFAQVKQIYKTPPIKDFGGFNFSQILPDPSKPSKRSFIEDLLFNKVTLADAGFIKQYGDCLGDIAARDLICAQKFNGLTVLPPLLTDEMIAQYTSALLAGTITSGWTFGAGAALQIPFAMQMAYRFNGIGVTQNVLYENQKLIANQFNSAIGKIQDSLSSTASALGKLQDVVNQNAQALNTLVKQLSSNFGAISSVLNDILSRLDPPEAEVQIDRLITGRLQSLQTYVTQQLIRAAEIRASANLAATKMSECVLGQSKRVDFCGKGYQLMSFPQSAPHGVVFLNVTYVPAQEKNFTTAPAICNEGKAHFPREGVFVSNGTNWFITQRNFYEPQIITTDNTFVSGSCDVVIGIVNNTVYDPLQPELDSFKEELDKYFKNHTSPDVDLGDISGINASVVNIQKEIDRLNEVAKNLNESPIDLQELGKYEQYIKGGSGYIPEAPRDGQAYVRKDGEWVLLSTFL

SEQ ID NO: 5966 - protein, 1235 aa, Artificial Sequence
  SARS-CoV-2/pangolin/Guangxi/P5L/2017__EPI_ISL_410540 spike protein (1-1205)(K980P_V981P_ H1042Q_H1058N_ H1077N_H1095N) Foldon construct
MFVFLFVLPLVSSQCVNLTTRTGIPPGYTNSSTRGVYYPDKVFRSSILHLTQDLFLPFFSNVTWFNTINYQGGFKKFDNPVLPFNDGVYFASTEKSNIIRGWIFGTTLDARTQSLLIVNNATNVVIKVCEFQFCTDPFLGVYYHNNNKTWVENEFRVYSSANNCTFEYISQPFLMDLEGKQGNFKNLREFVFKNVDGYFKIYSKHTPIDLVRDLPRGFAALEPLVDLPIGINITRFQTLLALHRSYLTPGKLESGWTTGAAAYYVGYLQQRTFLLSYNQNGTITDAVDCSLDPLSETKCTLKSLTVEKGIYQTSNFRVQPTISIVRFPNITNLCPFGEVFNASKFASVYAWNRKRISNCVADYSVLYNSTSFSTFKCYGVSPTKLNDLCFTNVYADSFVVKGDEVRQIAPGQTGVIADYNYKLPDDFTGCVIAWNSVKQDALTGGNYGYLYRLFRKSKLKPFERDISTEIYQAGSTPCNGQVGLNCYYPLERYGFHPTTGVNYQPFRVVVLSFELLNGPATVCGPKLSTTLVKDKCVNFNFNGLTGTGVLTTSKKQFLPFQQFGRDISDTTDAVRDPQTLEILDITPCSFGGVSVITPGTNTSNQVAVLYQDVNCTEVPMAIHAEQLTPAWRVYSAGANVFQTRAGCLVGAEHVNNSYECDIPVGAGICASYHSMSSFRSVNQRSIIAYTMSLGAENSVAYSNNSIAIPTNFTISVTTEILPVSMTKTSVDCTMYICGDSIECSNLLLQYGSFCTQLNRALTGIAVEQDKNTQEVFAQVKQIYKTPPIKDFGGFNFSQILPDPSKPSKRSFIEDLLFNKVTLADAGFIKQYGDCLGDIAARDLICAQKFNGLTVLPPLLTDEMIAQYTSALLAGTITSGWTFGAGAALQIPFAMQMAYRFNGIGVTQNVLYENQKLIANQFNSAIGKIQDSLSSTASALGKLQDVVNQNAQALNTLVKQLSSNFGAISSVLNDILSRLDPPEAEVQIDRLITGRLQSLQTYVTQQLIRAAEIRASANLAATKMSECVLGQSKRVDFCGKGYQLMSFPQSAPHGVVFLNVTYVPAQEKNFTTAPAICNEGKAHFPREGVFVSNGTNWFITQRNFYEPQIITTDNTFVSGSCDVVIGIVNNTVYDPLQPELDSFKEELDKYFKNHTSPDVDLGDISGINASVVNIQKEIDRLNEVAKNLNESLIDLQELGKYEQYIKGGSGYIPEAPRDGQAYVRKDGEWVLLSTFL

SEQ ID NO: 5967 - protein, 1235 aa, Artificial Sequence
  SARS-CoV-2/pangolin/Guangxi/P5E/2017__EPI_ISL_410541 spike protein (1-1205)(K980P_V981P_ H1042Q_H1058N_ H1077N_H1095N) Foldon construct
MFVFLFVLPLVSSQCVNLTTRTGIPPGYTNSSTRGVYYPDKVFRSSILHLTQDLFLPFFSNVTWFNTITYQGGSKKFDNPVLPFNDGVYFASTEKSNIIRGWIFGTTLDARTQSLLIVNNATNVVIKVCEFQFCTDPFLGVYYHNNNKTWVENEFRVYSSANNCTFEYISQPFLMDLEGKQGNFKNLREFVFKNVDGYFKIYSKHTPIDLVRDLPRGFAALEPLVDLPIGINITRFQTLLALHRSYLTPGKLESGWTTGAAAYYVGYLQQRTFLLSYNQNGTITDAVDCSLDPLSETKCTLKSLTVEKGIYQTSNFRVQPTISIVRFPNITNLCPFGEVFNASKFASVYAWNRKRISNCVADYSVLYNSTSFSTFKCYGVSPTKLNDLCFTNVYADSFVVKGDEVRQIAPGQTGVIADYNYKLPDDFTGCVIAWNSVKQDALTGDNYGYLYRLFRKSKLKPFERDISTEIYQAGSTPCNGQVGLNCYYPLERYGFHPTTGVNYQPFRVVVLSFELLNGPATVCGPKLSTTLVKDKCVNFNFNGLTGTGVLTTSKKQFLPFQQFGRDISDTTDAVRDPQTLEILDITPCSFGGVSVITPGTNTSNQVAVLYQDVNCTEVPMAIHAEQLTPAWRVYSAGANVFQTRAGCLVGAEHVNNSYECDIPVGAGICASYHSMSSFRSVNQRSIIAYTMSLGAENSVAYSNNSIAIPTNFTISVTTEILPVSMTKTSVDCTMYICGDSIECSNLLLQYGSFCTQLNRALTGIAVEQDKNTQEVFAQVKQIYKTPPIKDFGGFNFSQILPDPSKPSKRSFIEDLLFNKVTLADAGFIKQYGDCLGDIAARDLICAQKFNGLTVLPPLLTDEMIAQYTSALLAGTITSGWTFGAGAALQIPFAMQMAYRFNGIGVTQNVLYENQKLIANQFNSAIGKIQDSLSSTASALGKLQDVVNQNAQALNTLVKQLSSNFGAISSVLNDILSRLDPPEAEVQIDRLITGRLQSLQTYVTQQLIRAAEIRASANLAATKMSECVLGQSKRVDFCGKGYQLMSFPQSAPHGVVFLNVTYVPAQEKNFTTAPAICNEGKAHFPREGVFVSNGTNWFITQRNFYEPQIITTDNTFVSGSCDVVIGIVNNTVYDPLQPELDSFKEELDKYFKNHTSPDVDLGDISGINASVVNIQKEIDRLNEVAKNLNESLIDLQELGKYEQYIKGGSGYIPEAPRDGQAYVRKDGEWVLLSTFL

SEQ ID NO: 5968 - protein, 1233 aa, Artificial Sequence
  SARS-CoV-2/pangolin/Guangxi/P1E/2017__EPI_ISL_410539 spike protein (1-1203)(K978P_V979P_ H1040Q_H1056N_ H1075N_H1093N) Foldon construct
MFVFLFVLPLVSSQCVNLTTRTGIQPGYTNSSTRGVYYPDKVFRSSILHLTQDLFLPFFSNVTWFNTINYQGGFKKFDNPVLPFNDGVYFASTEKSNIIRGWIFGTTLDARTQSLLIVNNATNVVIKVCEFQFCTDPFLGVYYHNNNKTWVENEFRVYSSANNCTFEYISQPFLMDLEGKQGNFKNLREFVFKNVDGYFKIYSKHTPIDLVRDLPRGFAALEPLVDLPIGINITRFQTLLALHRSYLTPGKLESGWTTGAAAYYVGYLQQRTFLLSYNQNGTITDAVDCSLDPLSETKCTLKSLTVEKGIYQTSNFRVQPTISIVRFPNITNLCPFGEVFNASKFASVYAWNRKRISNCVADYSVLYNSTSFSTFKCYGVSPTKLNDLCFTNVYADSFVVKGDEVRQIAPGQTGVIADYNYKLPDDFTGCVIAWNSVKQDALTGGNYLYRLFRKSKLKPFERDISTEIYQAGSTPCNGQVGLNCYYPLERYGFHPTTGVNYQPFRVVVLSFELLNGPATVCGPKLSTTLVKDKCVNFNFNGLTGTGVLTTSKKQFLPFQQFGRDISDTTDAVRDPQTLEILDITPCSFGGVSVITPGTNTSNQVAVLYQDVNCTEVPMAIHAEQLTPAWRVYSAGANVFQTRAGCLVGAEHVNNSYECDIPVGAGICASYHSMSSLRSVNQRSIIAYTMSLGAENSVAYSNNSIAIPTNFTISVTTEILPVSMTKTSVDCTMYICGDSIECSNLLLQYGSFCTQLNRALTGIAVEQDKNTQEVFAQVKQIYKTPPIKDFGGFNFSQILPDPSKPSKRSFIEDLLFNKVTLADAGFIKQYGDCLGDIAARDLICAQKFNGLTVLPPLLTDEMIAQYTSALLAGTITSGWTFGAGAALQIPFAMQMAYRFNGIGVTQNVLYENQKLIANQFNSAIGKIQDSLSSTASALGKLQDVVNQNAQALNTLVKQLSSNFGAISSVLNDILSRLDPPEAEVQIDRLITGRLQSLQTYVTQQLIRAAEIRASANLAATKMSECVLGQSKRVDFCGKGYQLMSFPQSAPHGVVFLNVTYVPAQEKNFTTAPAICNEGKAHFPREGVFVSNGTNWFITQRNFYEPQIITTDNTFVSGSCDVVIGIVNNTVYDPLQPELDSFKEELDKYFKNHTSPDVDLGDISGINASVVNIQKEIDRLNEVAKNLNESLIDLQELGKYEQYIKGGSGYIPEAPRDGQAYVRKDGEWVLLSTFL

SEQ ID NO: 5969 - protein, 1241 aa, Artificial Sequence
  SARS-CoV-2/Wuhan/WIV05/2019__EPI_ISL_402128 spike protein (1-1211)(I712C_T1077C) Foldon construct
MFVFLVLLPLVSSQCVNLTTRTQLPPAYTNSFTRGVYYPDKVFRSSVLHSTQDLFLPFFSNVTWFHAIHVSGTNGTKRFDNPVLPFNDGVYFASTEKSNIIRGWIFGTTLDSKTQSLLIVNNATNVVIKVCEFQFCNDPFLGVYYHKNNKSWMESEFRVYSSANNCTFEYVSQPFLMDLEGKQGNFKNLREFVFKNIDGYFKIYSKHTPINLVRDLPQGFSALEPLVDLPIGINITRFQTLLALHRSYLTPGDSSSGWTAGAAAYYVGYLQPRTFLLKYNENGTITDAVDCALDPLSETKCTLKSFTVEKGIYQTSNFRVQPTESIVRFPNITNLCPFGEVFNATRFASVYAWNRKRISNCVADYSVLYNSASFSTFKCYGVSPTKLNDLCFTNVYADSFVIRGDEVRQIAPGQTGKIADYNYKLPDDFTGCVIAWNSNNLDSKVGGNYNYLYRLFRKSNLKPFERDISTEIYQAGSTPCNGVEGFNCYFPLQSYGFQPTNGVGYQPYRVVVLSFELLHAPATVCGPKKSTNLVKNKCVNFNFNGLTGTGVLTESNKKFLPFQQFGRDIADTTDAVRDPQTLEILDITPCSFGGVSVITPGTNTSNQVAVLYQDVNCTEVPVAIHADQLTPTWRVYSTGSNVFQTRAGCLIGAEHVNNSYECDIPIGAGICASYQTQTNSPRRARSVASQSIIAYTMSLGAENSVAYSNNSCAIPTNFTISVTTEILPVSMTKTSVDCTMYICGDSTECSNLLLQYGSFCTQLNRALTGIAVEQDKNTQEVFAQVKQIYKTPPIKDFGGFNFSQILPDPSKPSKRSFIEDLLFNKVTLADAGFIKQYGDCLGDIAARDLICAQKFNGLTVLPPLLTDEMIAQYTSALLAGTITSGWTFGAGAALQIPFAMQMAYRFNGIGVTQNVLYENQKLIANQFNSAIGKIQDSLSSTASALGKLQDVVNQNAQALNTLVKQLSSNFGAISSVLNDILSRLDKVEAEVQIDRLITGRLQSLQTYVTQQLIRAAEIRASANLAATKMSECVLGQSKRVDFCGKGYHLMSFPQSAPHGVVFLHVTYVPAQEKNFTCAPAICHDGKAHFPREGVFVSNGTHWFVTQRNFYEPQIITTDNTFVSGNCDVVIGIVNNTVYDPLQPELDSFKEELDKYFKNHTSPDVDLGDISGINASVVNIQKEIDRLNEVAKNLNESLIDLQELGKYEQYIKGGSGYIPEAPRDGQAYVRKDGEWVLLSTFL

SEQ ID NO: 5970 - protein, 1237 aa, Artificial Sequence
  SARS-CoV-2/bat/Yunnan/RaTG13/2013__EPI_ISL_402131 spike protein (1-1207)(I708C_T1073C) Foldon construct
MFVFLVLLPLVSSQCVNLTTRTQLPPAYTNSSTRGVYYPDKVFRSSVLHLTQDLFLPFFSNVTWFHAIHVSGTNGIKRFDNPVLPFNDGVYFASTEKSNIIRGWIFGTTLDSKTQSLLIVNNATNVVIKVCEFQFCNDPFLGVYYHKNNKSWMESEFRVYSSANNCTFEYVSQPFLMDLEGKQGNFKNLREFVFKNIDGYFKIYSKHTPINLVRDLPPGFSALEPLVDLPIGINITRFQTLLALHRSYLTPGDSSSGWTAGAAAYYVGYLQPRTFLLKYNENGTITDAVDCALDPLSETKCTLKSFTVEKGIYQTSNFRVQPTDSIVRFPNITNLCPFGEVFNATTFASVYAWNRKRISNCVADYSVLYNSTSFSTFKCYGVSPTKLNDLCFTNVYADSFVITGDEVRQIAPGQTGKIADYNYKLPDDFTGCVIAWNSKHIDAKEGGNFNYLYRLFRKANLKPFERDISTEIYQAGSKPCNGQTGLNCYYPLYRYGFYPTDGVGHQPYRVVVLSFELLNAPATVCGPKKSTNLVKNKCVNFNFNGLTGTGVLTESNKKFLPFQQFGRDIADTTDAVRDPQTLEILDITPCSFGGVSVITPGTNASNQVAVLYQDVNCTEVPVAIHADQLTPTWRVYSTGSNVFQTRAGCLIGAEHVNNSYECDIPIGAGICASYQTQTNSRSVASQSIIAYTMSLGAENSVAYSNNSCAIPTNFTISVTTEILPVSMTKTSVDCTMYICGDSTECSNLLLQYGSFCTQLNRALTGIAVEQDKNTQEVFAQVKQIYKTPPIKDFGGFNFSQILPDPSKPSKRSFIEDLLFNKVTLADAGFIKQYGDCLGDIAARDLICAQKFNGLTVLPPLLTDEMIAQYTSALLAGTITSGWTFGAGAALQIPFAMQMAYRFNGIGVTQNVLYENQKLIANQFNSAIGKIQDSLSSTASALGKLQDVVNQNAQALNTLVKQLSSNFGAISSVLNDILSRLDKVEAEVQIDRLITGRLQSLQTYVTQQLIRAAEIRASANLAATKMSECVLGQSKRVDFCGKGYHLMSFPQSAPHGVVFLHVTYVPAQEKNFTCAPAICHDGKAHFPREGVFVSNGTHWFVTQRNFYEPQIITTDNTFVSGSCDVVIGIVNNTVYDPLQPELDSFKEELDKYFKNHTSPDVDLGDISGINASVVNIQKEIDRLNEVAKNLNESLIDLQELGKYEQYIKGGSGYIPEAPRDGQAYVRKDGEWVLLSTFL

SEQ ID NO: 5971 - protein, 1241 aa, Artificial Sequence
  SARS-CoV-2/Wuhan/HBCDC-HB-01/2019__EPI_ISL_402132 spike protein (1-1211)(I712C_T1077C) Foldon construct
MFVFLVLLPLVSSQCVNLTTRTQLPPAYTNSITRGVYYPDKVFRSSVLHSTQDLFLPFFSNVTWFHAIHVSGTNGTKRFDNPVLPFNDGVYFASTEKSNIIRGWIFGTTLDSKTQSLLIVNNATNVVIKVCEFQFCNDPFLGVYYHKNNKSWMESEFRVYSSANNCTFEYVSQPFLMDLEGKQGNFKNLREFVFKNIDGYFKIYSKHTPINLVRDLPQGFSALEPLVDLPIGINITRFQTLLALHRSYLTPGDSSSGWTAGAAAYYVGYLQPRTFLLKYNENGTITDAVDCALDPLSETKCTLKSFTVEKGIYQTSNFRVQPTESIVRFPNITNLCPFGEVFNATRFASVYAWNRKRISNCVADYSVLYNSASFSTFKCYGVSPTKLNDLCFTNVYADSFVIRGDEVRQIAPGQTGKIADYNYKLPDDFTGCVIAWNSNNLDSKVGGNYNYLYRLFRKSNLKPFERDISTEIYQAGSTPCNGVEGFNCYFPLQSYGFQPTNGVGYQPYRVVVLSFELLHAPATVCGPKKSTNLVKNKCVNFNFNGLTGTGVLTESNKKFLPFQQFGRDIADTTDAVRDPQTLEILDITPCSFGGVSVITPGTNTSNQVAVLYQDVNCTEVPVAIHADQLTPTWRVYSTGSNVFQTRAGCLIGAEHVNNSYECDIPIGAGICASYQTQTNSPRRARSVASQSIIAYTMSLGAENSVAYSNNSCAIPTNFTISVTTEILPVSMTKTSVDCTMYICGDSTECSNLLLQYGSFCTQLNRALTGIAVEQDKNTQEVFAQVKQIYKTPPIKDFGGFNFSQILPDPSKPSKRSFIEDLLFNKVTLADAGFIKQYGDCLGDIAARDLICAQKFNGLTVLPPLLTDEMIAQYTSALLAGTITSGWTFGAGAALQIPFAMQMAYRFNGIGVTQNVLYENQKLIANQFNSAIGKIQDSLSSTASALGKLQDVVNQNAQALNTLVKQLSSNFGAISSVLNDILSRLDKVEAEVQIDRLITGRLQSLQTYVTQQLIRAAEIRASANLAATKMSECVLGQSKRVDFCGKGYHLMSFPQSAPHGVVFLHVTYVPAQEKNFTCAPAICHDGKAHFPREGVFVSNGTHWFVTQRNFYEPQIITTDNTFVSGNCDVVIGIVNNTVYDPLQPELDSFKEELDKYFKNHTSPDVDLGDISGINASVVNIQKEIDRLNEVAKNLNESLIDLQELGKYEQYIKGGSGYIPEAPRDGQAYVRKDGEWVLLSTFL

SEQ ID NO: 5972 - protein, 1241 aa, Artificial Sequence
  SARS-CoV-2/Guangdong/20SF028/2020__EPI_ISL_403936 spike protein (1-1211)(I712C_T1077C) Foldon construct
MFVFLVLLPLVSSQCVNLTTRTQLPPAYTNSFTRGVYYPDKVFRSSVLYSTQDLFLPFFSNVTWFHAIHVSGTNGTKRFDNPVLPFNDGVYFASTEKSNIIRGWIFGTTLDSKTQSLLIVNNATNVVIKVCEFQFCNDPFLGVYYHKNNKSWMESEFRVYSSANNCTFEYVSQPFLMDLEGKQGNFKNLREFVFKNIDGYFKIYSKHTPINLVRDLPQGFSALEPLVDLPIGINITRFQTLLALHRSYLTPGDSSSGWTAGAAAYYVGYLQPRTFLLKYNENGTITDAVDCALDPLSETKCTLKSFTVEKGIYQTSNFRVQPTESIVRFPNITNLCPFGEVFNATRFASVYAWNRKRISNCVADYSVLYNSASFSTFKCYGVSPTKLNDLCFTNVYADSFVIRGDEVRQIAPGQTGKIADYNYKLPDDFTGCVIAWNSNNLDSKVGGNYNYLYRLFRKSNLKPFERDISTEIYQAGSTPCNGVEGFNCYFPLQSYGFQPTNGVGYQPYRVVVLSFELLHAPATVCGPKKSTNLVKNKCVNFNFNGLTGTGVLTESNKKFLPFQQFGRDIADTTDAVRDPQTLEILDITPCSFGGVSVITPGTNTSNQVAVLYQDVNCTEVPVAIHADQLTPTWRVYSTGSNVFQTRAGCLIGAEHVNNSYECDIPIGAGICASYQTQTNSPRRARSVASQSIIAYTMSLGAENSVAYSNNSCAIPTNFTISVTTEILPVSMTKTSVDCTMYICGDSTECSNLLLQYGSFCTQLNRALTGIAVEQDKNTQEVFAQVKQIYKTPPIKDFGGFNFSQILPDPSKPSKRSFIEDLLFNKVTLADAGFIKQYGDCLGDIAARDLICAQKFNGLTVLPPLLTDEMIAQYTSALLAGTITSGWTFGAGAALQIPFAMQMAYRFNGIGVTQNVLYENQKLIANQFNSAIGKIQDSLSSTASALGKLQDVVNQNAQALNTLVKQLSSNFGAISSVLNDILSRLDKVEAEVQIDRLITGRLQSLQTYVTQQLIRAAEIRASANLAATKMSECVLGQSKRVDFCGKGYHLMSFPQSAPHGVVFLHVTYVPAQEKNFTCAPAICHDGKAHFPREGVFVSNGTHWFVTQRNFYEPQIITTDNTFVSGNCDVVIGIVNNTVYDPLQPELDSFKEELDKYFKNHTSPDVDLGDISGINASVVNIQKEIDRLNEVAKNLNESLIDLQELGKYEQYIKGGSGYIPEAPRDGQAYVRKDGEWVLLSTFL

SEQ ID NO: 5973 - protein, 1241 aa, Artificial Sequence
  SARS-CoV-2/Shenzhen/SZTH-001/2020__EPI_ISL_406592 spike protein (1-1211)(I712C_T1077C) Foldon construct
MFVFLVLLPLVSSQCVNLTTRTQLPPAYTNSFTRGVYYPDKVFRSSVLHSTQDLFLPFFSNVTWFHAIHVSGTNGTKRFDNPVLPFNDGVYFASTEKSNIIRGWIFGTTLDSKTQSLLIVNNATNVVIKVCEFQFCNDPFLGVYYHKNNKSWMESEFRVYSSANNCTFEYVSQPFLMDLEGKQGNFKNLREFVFKNIDGYFKIYSKHTPINLVRDLPQGFSALEPLVDLPIGINITRFQTLLALHRSYLTPGDSSSGWTAGAAAYYVGYLQPRTFLLKYNENGTITDAVDCALDPLSETKCTLKSFTVEKGIYQTSNFRVQPTESIVRFPNITNLCPFGEVFNATRFASVYAWNRKRISNCVADYSVLYNSASFSTFKCYGVSPTKLNDLCFTNVYADSFVIRGDEVRQIAPGQTGKIADYNYKLPDDFTGCVIAWNSNNLDSKVGGNYNYLYRLFRKSNLKPFERDISTEIYQAGSTPCNGVEGFNCYFPLQSYGFQPTNGVGYQPYRVVVLSFELLHAPATVCGPKKSTNLVKNKCVNFNFNGLTGTGVLTESNKKFLPFQQFGRDIADTTDAVRDPQTLEILDITPCSFGGVSVITPGTNTSNQVAVLYQDVNCTEVPVAIHADQLTPTWRVYSTGSNVFQTRAGCLIGAEHVNNSYECDIPIGAGICASYQTQTNSPRRARSVASQSIIAYTMSLGAENSVAYSNNSCAIPTNFTISVTTEILPVSMTKTSVDCTMYICGDSTECSNLLLQYGSFCTQLNRALTGIAVEQDKNTQEVFAQVKQIYKTPPIKDFGGFNFSQILPDPSKPSKRSFIEDLLFNKVTLADAGFIKQYGDCLGDIAARDLICAQKFNGLTVLPPLLTDEMIAQYTSALLAGTITSGWTFGAGAALQIPFAMQMAYRFNGIGVTQNVLYENQKLIANQFNSAIGKIQDSLSSTASALGKLQDVVNQNAQALNTLVKQLSSNFGAISSVLNDILSRLDKVEAEVQIDRLITGRLQSLQTYVTQQLIRAAEIRASANLAATKMSECVLGQSKRVDFCGKGYHLMSFPQSAPHGVVFLHVTYVPAQEKNFTCAPAICHDGKAHFPREGVFVSNGTHWFVTQRNFYEPQIITTDNTFVSGNCDVLIGIVNNTVYDPLQPELDSFKEELDKYFKNHTSPDVDLGDISGINASVVNIQKEIDRLNEVAKNLNESLIDLQELGKYEQYIKGGSGYIPEAPRDGQAYVRKDGEWVLLSTFL

SEQ ID NO: 5974 - protein, 1241 aa, Artificial Sequence
  SARS-CoV-2/Shenzhen/SZTH-004/2020__EPI_ISL_406595 spike protein (1-1211)(I712C_T1077C) Foldon construct
MFVFLVLLPLVSSQCVNLTTRTQLPPAYTNSFTRGVYYPDKVFRSSVLHSTQDLFLPFFSNVTWFHAIHVSGTNGTKRFDNPVLPFNDGVYFASTEKSNIIRGWIFGTTLDSKTQSLLIVNNATNVVIKVCEFQFCNDPFLGVYYHKNNKSWMESEFRVYSSANNCTFEYVSQPFLMDLEGKQGNFKNLREFVFKNIDGYFKIYSKHTPINLVRDLPQGFSALEPLVDLPIGINITRFQTLLALHRSYLTPGDSSSGWTAGAAAYYVGYLQPRTFLLKYNENGTITDAVDCALDPLSETKCTLKSFTVEKGIYQTSNFRVQPTESIVRFPNITNLCPFGEVFNATRFASVYAWDRKRISNCVAYYSVLYNSASFSTFKCYGVSPTKLNDLCFTNVYADSFVIRGDEVRQIAPGQTGKIADYNYKLPDDFTGCVIAWNSNNLDSKVGGNYNYLYRLFRKSNLKPFERDISTEIYQAGSTPCNGVEGFNCYFPLQSYGFQPTNGVGYQPYRVVVLSFELLHAPATVCGPKKSTNLVKNKCVNFNFNGLTGTGVLTESNKKFLPFQQFGRDIADTTDAVRDPQTLEILDITPCSFGGVSVITPGTNTSNQVAVLYQDVNCTEVPVAIHADQLTPTWRVYSTGSNVFQTRAGCLIGAEHVNNSYECDIPIGAGICASYQTQTNSPRRARSVASQSIIAYTMSLGAENSVAYSNNSCAIPTNFTISVTTEILPVSMTKTSVDCTMYICGDSTECSNLLLQYGSFCTQLNRALTGIAVEQDKNTQEVFAQVKQIYKTPPIKDFGGFNFSQILPDPSKPSKRSFIEDLLFNKVTLADAGFIKQYGDCLGDIAARDLICAQKFNGLTVLPPLLTDEMIAQYTSALLAGTITSGWTFGAGAALQIPFAMQMAYRFNGIGVTQNVLYENQKLIANQFNSAIGKIQDSLSSTASALGKLQDVVNQNAQALNTLVKQLSSNFGAISSVLNDILSRLDKVEAEVQIDRLITGRLQSLQTYVTQQLIRAAEIRASANLAATKMSECVLGQSKRVDFCGKGYHLMSFPQSAPHGVVFLHVTYVPAQEKNFTCAPAICHDGKAHFPREGVFVSNGTHWFVTQRNFYEPQIITTDNTFVSGNCDVVIGIVNNTVYDPLQPELDSFKEELDKYFKNHTSPDVDLGDISGINASVVNIQKEIDRLNEVAKNLNESLIDLQELGKYEQYIKGGSGYIPEAPRDGQAYVRKDGEWVLLSTFL

SEQ ID NO: 5975 - protein, 1241 aa, Artificial Sequence
  SARS-CoV-2/France/IDF0372/2020__EPI_ISL_406596 spike protein (1-1211)(I712C_T1077C) Foldon construct
MFVFLVLLPLVSSQCVNLTTRTQLPPAYTNSFTRGVYYPDKVFRSSVLHSTQDLFLPFFSNVTWFHAIHVSGTNGTKRFDNPVLPFNDGVYFASTEKSNIIRGWIFGTTLDSKTQSLLIVNNATNVVIKVCEFQFCNDPFLGVYYHKNNKSWMESEFRVYSSANNCTFEYVSQPFLMDLEGKQGNFKNLREFVFKNIDGYFKIYSKHTPINLVRDLPQGFSALEPLVDLPIGINITRFQTLLALHRSYLTPGDSSSGWTAGAAAYYVGYLQPRTFLLKYNENGTITDAVDCALDPLSETKCTLKSFTVEKGIYQTSNFRVQPTESIVRFPNITNLCPFGEVFNATRFASVYAWNRKRISNCVADYSFLYNSASFSTFKCYGVSPTKLNDLCFTNVYADSFVIRGDEVRQIAPGQTGKIADYNYKLPDDFTGCVIAWNSNNLDSKVGGNYNYLYRLFRKSNLKPFERDISTEIYQAGSTPCNGVEGFNCYFPLQSYGFQPTNGVGYQPYRVVVLSFELLHAPATVCGPKKSTNLVKNKCVNFNFNGLTGTGVLTESNKKFLPFQQFGRDIADTTDAVRDPQTLEILDITPCSFGGVSVITPGTNTSNQVAVLYQDVNCTEVPVAIHADQLTPTWRVYSTGSNVFQTRAGCLIGAEHVNNSYECDIPIGAGICASYQTQTNSPRRARSVASQSIIAYTMSLGAENSVAYSNNSCAIPTNFTISVTTEILPVSMTKTSVDCTMYICGDSTECSNLLLQYGSFCTQLNRALTGIAVEQDKNTQEVFAQVKQIYKTPPIKDFGGFNFSQILPDPSKPSKRSFIEDLLFNKVTLADAGFIKQYGDCLGDIAARDLICAQKFNGLTVLPPLLTDEMIAQYTSALLAGTITSGWTFGAGAALQIPFAMQMAYRFNGIGVTQNVLYENQKLIANQFNSAIGKIQDSLSSTASALGKLQDVVNQNAQALNTLVKQLSSNFGAISSVLNDILSRLDKVEAEVQIDRLITGRLQSLQTYVTQQLIRAAEIRASANLAATKMSECVLGQSKRVDFCGKGYHLMSFPQSAPHGVVFLHVTYVPAQEKNFTCAPAICHDGKAHFPREGVFVSNGTHWFVTQRNFYEPQIITTDNTFVSGNCDVVIGIVNNTVYDPLQPELDSFKEELDKYFKNHTSPDVDLGDISGINASVVNIQKEIDRLNEVAKNLNESLIDLQELGKYEQYIKGGSGYIPEAPRDGQAYVRKDGEWVLLSTFL

SEQ ID NO: 5976 - protein, 1241 aa, Artificial Sequence
  SARS-CoV-2/Australia/VIC01/2020__EPI_ISL_406844 spike protein (1-1211)(I712C_T1077C) Foldon construct
MFVFLVLLPLVSSQCVNLTTRTQLPPAYTNSFTRGVYYPDKVFRSSVLHSTQDLFLPFFSNVTWFHAIHVSGTNGTKRFDNPVLPFNDGVYFASTEKSNIIRGWIFGTTLDSKTQSLLIVNNATNVVIKVCEFQFCNDPFLGVYYHKNNKSWMESEFRVYSSANNCTFEYVSQPFLMDLEGKQGNFKNLREFVFKNIDGYFKIYSKHTPINLVRDLPQGFSALEPLVDLPIGINITRFQTLLALHRRYLTPGDSSSGWTAGAAAYYVGYLQPRTFLLKYNENGTITDAVDCALDPLSETKCTLKSFTVEKGIYQTSNFRVQPTESIVRFPNITNLCPFGEVFNATRFASVYAWNRKRISNCVADYSVLYNSASFSTFKCYGVSPTKLNDLCFTNVYADSFVIRGDEVRQIAPGQTGKIADYNYKLPDDFTGCVIAWNSNNLDSKVGGNYNYLYRLFRKSNLKPFERDISTEIYQAGSTPCNGVEGFNCYFPLQSYGFQPTNGVGYQPYRVVVLSFELLHAPATVCGPKKSTNLVKNKCVNFNFNGLTGTGVLTESNKKFLPFQQFGRDIADTTDAVRDPQTLEILDITPCSFGGVSVITPGTNTSNQVAVLYQDVNCTEVPVAIHADQLTPTWRVYSTGSNVFQTRAGCLIGAEHVNNSYECDIPIGAGICASYQTQTNSPRRARSVASQSIIAYTMSLGAENSVAYSNNSCAIPTNFTISVTTEILPVSMTKTSVDCTMYICGDSTECSNLLLQYGSFCTQLNRALTGIAVEQDKNTQEVFAQVKQIYKTPPIKDFGGFNFSQILPDPSKPSKRSFIEDLLFNKVTLADAGFIKQYGDCLGDIAARDLICAQKFNGLTVLPPLLTDEMIAQYTSALLAGTITSGWTFGAGAALQIPFAMQMAYRFNGIGVTQNVLYENQKLIANQFNSAIGKIQDSLSSTASALGKLQDVVNQNAQALNTLVKQLSSNFGAISSVLNDILSRLDKVEAEVQIDRLITGRLQSLQTYVTQQLIRAAEIRASANLAATKMSECVLGQSKRVDFCGKGYHLMSFPQSAPHGVVFLHVTYVPAQEKNFTCAPAICHDGKAHFPREGVFVSNGTHWFVTQRNFYEPQIITTDNTFVSGNCDVVIGIVNNTVYDPLQPELDSFKEELDKYFKNHTSPDVDLGDISGINASVVNIQKEIDRLNEVAKNLNESLIDLQELGKYEQYIKGGSGYIPEAPRDGQAYVRKDGEWVLLSTFL

SEQ ID NO: 5977 - protein, 1241 aa, Artificial Sequence
  SARS-CoV-2/Germany/BavPat1/2020__EPI_ISL_406862 spike protein (1-1211)(I712C_T1077C) Foldon construct
MFVFLVLLPLVSSQCVNLTTRTQLPPAYTNSFTRGVYYPDKVFRSSVLHSTQDLFLPFFSNVTWFHAIHVSGTNGTKRFDNPVLPFNDGVYFASTEKSNIIRGWIFGTTLDSKTQSLLIVNNATNVVIKVCEFQFCNDPFLGVYYHKNNKSWMESEFRVYSSANNCTFEYVSQPFLMDLEGKQGNFKNLREFVFKNIDGYFKIYSKHTPINLVRDLPQGFSALEPLVDLPIGINITRFQTLLALHRSYLTPGDSSSGWTAGAAAYYVGYLQPRTFLLKYNENGTITDAVDCALDPLSETKCTLKSFTVEKGIYQTSNFRVQPTESIVRFPNITNLCPFGEVFNATRFASVYAWNRKRISNCVADYSVLYNSASFSTFKCYGVSPTKLNDLCFTNVYADSFVIRGDEVRQIAPGQTGKIADYNYKLPDDFTGCVIAWNSNNLDSKVGGNYNYLYRLFRKSNLKPFERDISTEIYQAGSTPCNGVEGFNCYFPLQSYGFQPTNGVGYQPYRVVVLSFELLHAPATVCGPKKSTNLVKNKCVNFNFNGLTGTGVLTESNKKFLPFQQFGRDIADTTDAVRDPQTLEILDITPCSFGGVSVITPGTNTSNQVAVLYQGVNCTEVPVAIHADQLTPTWRVYSTGSNVFQTRAGCLIGAEHVNNSYECDIPIGAGICASYQTQTNSPRRARSVASQSIIAYTMSLGAENSVAYSNNSCAIPTNFTISVTTEILPVSMTKTSVDCTMYICGDSTECSNLLLQYGSFCTQLNRALTGIAVEQDKNTQEVFAQVKQIYKTPPIKDFGGFNFSQILPDPSKPSKRSFIEDLLFNKVTLADAGFIKQYGDCLGDIAARDLICAQKFNGLTVLPPLLTDEMIAQYTSALLAGTITSGWTFGAGAALQIPFAMQMAYRFNGIGVTQNVLYENQKLIANQFNSAIGKIQDSLSSTASALGKLQDVVNQNAQALNTLVKQLSSNFGAISSVLNDILSRLDKVEAEVQIDRLITGRLQSLQTYVTQQLIRAAEIRASANLAATKMSECVLGQSKRVDFCGKGYHLMSFPQSAPHGVVFLHVTYVPAQEKNFTCAPAICHDGKAHFPREGVFVSNGTHWFVTQRNFYEPQIITTDNTFVSGNCDVVIGIVNNTVYDPLQPELDSFKEELDKYFKNHTSPDVDLGDISGINASVVNIQKEIDRLNEVAKNLNESLIDLQELGKYEQYIKGGSGYIPEAPRDGQAYVRKDGEWVLLSTFL

SEQ ID NO: 5978 - protein, 1241 aa, Artificial Sequence
  SARS-CoV-2/Wuhan/HBCDC-HB-02/2020__EPI_ISL_412978 spike protein (1-1211)(I712C_T1077C) Foldon construct
MFVFLVLLPLVSSQCVNLTTRTQLPPAYTNSFTRGVYYPDKVFRSSVLHSTQDLFLPFFSNVTWFHAIHVSGTNGTKRFDNPVLPFNDGVYFASTEKSNIIRGWIFGTTLDSKTQSLLIVNNATNVVIKVCEFQFCNDPFLGVYYHKNNKSWMESEFRVYSSANNCTFEYVSQPFLMDLEGKQGNFKNLREFVFKNIDGYFKIYSKHTPINLVRDLPQGFSALEPLVDLPIGINITRFQTLLALHRSYLTPGDSSSGWTAGAAAYYVGYLQPRTFLLKYNENGTITDAVDCALDPLSETKCTLKSFTVEKGIYQTSNFRVQPTESIVRFPNITNLCPFGEVFNATRFASVYAWNRKRISNCVADYSVLYNSASFSTFKCYGVSPTKLNDLCFTNVYADSFVIRGDEVRQIAPGQTGKIADYNYKLPDDFTGCVIAWNSNNLDSKVGGNYNYLYRLFRKSNLKPFERDISTEIYQAGSTPCNGVEGFNCYFPLQSYGFQPTNGVGYQPYRVVVLSFELLHAPATVCGPKKSTNLVKNKCVNFNFNGLTGTGVLTESNKKFLPFQQFGRDIADTTDAVRDPQTLEILDITPCSFGGVSVITPGTNTSNQVAVLYQDVNCTEVPVAIHADQLTPTWRVYSTGSNVFQTRAGCLIGAEHVNNSYECDIPIGAGICASYQTQTNSPRRARSVASQSIIAYTMSLGAENSVAYSNNSCAIPTNFTISVTTEILPVSMTKTSVDCTMYICGDSTECSNFLLQYGSFCTQLNRALTGIAVEQDKNTQEVFAQVKQIYKTPPIKDFGGFNFSQILPDPSKPSKRSFIEDLLFNKVTLADAGFIKQYGDCLGDIAARDLICAQKFNGLTVLPPLLTDEMIAQYTSALLAGTITSGWTFGAGAALQIPFAMQMAYRFNGIGVTQNVLYENQKLIANQFNSAIGKIQDSLSSTASALGKLQDVVNQNAQALNTLVKQLSSNFGAISSVLNDILSRLDKVEAEVQIDRLITGRLQSLQTYVTQQLIRAAEIRASANLAATKMSECVLGQSKRVDFCGKGYHLMSFPQSAPHGVVFLHVTYVPAQEKNFTCAPAICHDGKAHFPREGVFVSNGTHWFVTQRNFYEPQIITTDNTFVSGNCDVVIGIVNNTVYDPLQPELDSFKEELDKYFKNHTSPDVDLGDISGINASVVNIQKEIDRLNEVAKNLNESLIDLQELGKYEQYIKGGSGYIPEAPRDGQAYVRKDGEWVLLSTFL

SEQ ID NO: 5979 - protein, 1241 aa, Artificial Sequence
  SARS-CoV-2/Australia/QLD02/2020__EPI_ISL_407896 spike protein (1-1211)(I712C_T1077C) Foldon construct
MFVFLVLLPLVSSQCVNLTTRTQLPPAYTNSFTRGVYYPDKVFRSSVLHSTQDLFLPFFSNVTWFHAIHVSGTNGTKRFDNPVLPFNDGVYFASTEKSNIIRGWIFGTTLDSKTQSLLIVNNATNVVIKVCEFQFCNDPFLGVYYHKNNKSWMESEFRVYSSANNCTFEYVSQPFLMDLEGKQGNFKNLREFVFKNIDGYFKIYSKHTPINLVRDLPQGFSALEPLVDLPIGINITRFQTLLALHRSYLTPGDSSSGWTAGAAAYYVGYLQPRTFLLKYNENGTITDAVDCALDPLSETKCTLKSFTVEKGIYQTSNFRVQPTESIVRFPNITNLCPFGEVFNATRFASVYAWNRKRISNCVADYSVLYNSASFSTFKCYGVSPTKLNDLCFTNVYADSFVIRGDEVRQIAPGQTGKIADYNYKLPDDFTGCVIAWNSNNLDSKVGGNYNYLYRLFRKSNLKPFERDISTEIYQAGSTPCNGVEGFNCYFPLQSYGFQPTNGVGYQPYRVVVLSFELLHAPATVCGPKKSTNLVKNKCVNFNFNGLTGTGVLTESNKKFLPFQQFGRDIADTTDAVRDPQTLEILDITPCSFGGVSVITPGTNTSNQVAVLYQDVNCTEVPVAIHADQLTPTWRVYSTGSNVFQTRAGCLIGAEHVNNSYECDIPIGAGICASYQTQTNSPRRARSVASQSIIAYTMSLGAENSVAYSNNSCAIPTNFTISVTTEILPVSMTKTSVDCTMYICGDSTECSNLLLQYGSFCTQLNRALTGIAVEQDKNTQEVFAQVKQIYKTPPIKDFGGFNFSQILPDPSKPSKRSFIEDLLFNKVTLADAGFIKQYGDCLGDIAARDLICAQKFNGLTVLPPLLTDEMIAQYTSALLAGTITSGWTFGAGAALQIPFAMQMAYRFNGIGVTQNVLYENQKLIANQFNSAIGKIQDSLSSTASALGKLQDVVNQNAQALNTLVKQLSSNFGAISSVLNDILSRLDKVEAEVQIDRLITGRLQSLQTYVTQQLIRAAEIRASANLAATKMSECVLGQSKRVDFCGKGYHLMSFPQSAPHGVVFLHVTYVPAQEKNFTCAPAICHDGKAHFPREGVFVSNGTHWFVTQRNFYEPQIITTDNTFVSGNCDVVIGIVNNTVYDPLQLELDSFKEELDKYFKNHTSPDVDLGDISGINASVVNIQKEIDRLNEVAKNLNESLIDLQELGKYEQYIKGGSGYIPEAPRDGQAYVRKDGEWVLLSTFL

SEQ ID NO: 5980 - protein, 1241 aa, Artificial Sequence
  SARS-CoV-2/India/1-31/2020__EPI_ISL_413523 spike protein (1-1211)(I712C_T1077C) Foldon construct
MFVFLVLLPLVSSQCVNLTTRTQLPPAYTNSFTRGVYYPDKVFRSSVLHSTQDLFLPFFSNVTWFHAIHVSGTNGTKRFDNPVLPFNDGVYFASTEKSNIIRGWIFGTTLDSKTQSLLIVNNATNVVIKVCEFQFCNDPFLGVYYHKNNKSWMESEFRVYSSANNCTFEYVSQPFLMDLEGKQGNFKNLREFVFKNIDGYFKIYSKHTPINLVRDLPQGFSALEPLVDLPIGINITRFQTLLALHRSYLTPGDSSSGWTAGAAAYYVGYLQPRTFLLKYNENGTITDAVDCALDPLSETKCTLKSFTVEKGIYQTSNFRVQPTESIVRFPNITNLCPFGEVFNATRFASVYAWNRKRISNCVADYSVLYNSASFSTFKCYGVSPTKLNDLCFTNVYADSFVIRGDEVRQIAPGQTGKIADYNYKLPDDFTGCVIAWNSNNLDSKVGGNYNYLYRLFRKSNLKPFERDISTEIYQAGSTPCNGVEGFNCYFPLQSYGFQPTNGVGYQPYRVVVLSFELLHAPATVCGPKKSTNLVKNKCVNFNFNGLTGTGVLTESNKKFLPFQQFGRDIADTTDAVRDPQTLEILDITPCSFGGVSVITPGTNTSNQVAVLYQDVNCTEVPVAIHADQLTPTWRVYSTGSNVFQTRAGCLIGAEHVNNSYECDIPIGAGICASYQTQTNSPRRARSVASQSIIAYTMSLGAENSVAYSNNSCAIPTNFTISVTTEILPVSMTKTSVDCTMYICGDSTECSNLLLQYGSFCTQLNRALTGIAVEQDKNTQEVFAQVKQIYKTPPIKDFGGFNFSQILPDPSKPSKRSFIEDLLFNKVTLADAGFIKQYGDCLGDIAARDLICAQKFNGLTVLPPLLTDEMIAQYTSALLAGTITSGWTFGAGAALQIPFAMQMAYRFNGIGVTQNVLYENQKLIANQFNSVIGKIQDSLSSTASALGKLQDVVNQNAQALNTLVKQLSSNFGAISSVLNDILSRLDKVEAEVQIDRLITGRLQSLQTYVTQQLIRAAEIRASANLAATKMSECVLGQSKRVDFCGKGYHLMSFPQSAPHGVVFLHVTYVPAQEKNFTCAPAICHDGKAHFPREGVFVSNGTHWFVTQRNFYEPQIITTDNTFVSGNCDVVIGIVNNTVYDPLQPELDSFKEELDKYFKNHTSPDVDLGDISGINASVVNIQKEIDRLNEVAKNLNESLIDLQELGKYEQYIKGGSGYIPEAPRDGQAYVRKDGEWVLLSTFL

SEQ ID NO: 5981 - protein, 1241 aa, Artificial Sequence
  SARS-CoV-2/Guangdong/GD2020087-P0008/2020__EPI_ISL_413863 spike protein (1-1211)(I712C_T1077C) Foldon construct
MFVFLVLLPLVSSQCVNLTTRTQLPPAYTNSFTRGVYYPDKVFRSSVLHSTQDLFLPFFSNVTWFHAIHVSGTNGTKRFDNPVLPFNDGVYFASTEKSNIIRGWIFGTTLDSKTQSLLIVNNATNVVIKVCEFQFCNDPFLGVYYHKNNKSWMESEFRVYSSANNCTFEYVSQPFLMDLEGKQGNFKNLREFVFKNIDGYFKIYSKHTPINLVRDLPQGFSALEPLVDLPIGINITRFQTLLALHRSYLTPGDSSSGWTAGAAAYYVGYLQPRTFLLKYNENGTITDAVDCALDPLSETKCTLKSFTVEKGIYQTSNFRVQPTESIVRFPNITNLCPFGEVFNATRFASVYAWNRKRISNCVADYSVLYNSASFSTFKCYGVSPTKLNDLCFTNVYADSFVIRGDEVREIAPGQTGKIADYNYKLPDDFTGCVIAWNSNNLDSKVGGNYNYLYRLFRKSNLKPFERDISTEIYQAGSTPCNGVEGFNCYFPLQSYGFQPTNGVGYQPYRVVVLSFELLHAPATVCGPKKSTNLVKNKCVNFNFNGLTGTGVLTESNKKFLPFQQFGRDIADTTDAVRDPQTLEILDITPCSFGGVSVITPGTNTSNQVAVLYQDVNCTEVPVAIHADQLTPTWRVYSTGSNVFQTRAGCLIGAEHVNNSYECDIPIGAGICASYQTQTNSPRRARSVASQSIIAYTMSLGAENSVAYSNNSCAIPTNFTISVTTEILPVSMTKTSVDCTMYICGDSTECSNLLLQYGSFCTQLNRALTGIAVEQDKNTQEVFAQVKQIYKTPPIKDFGGFNFSQILPDPSKPSKRSFIEDLLFNKVTLADAGFIKQYGDCLGDIAARDLICAQKFNGLTVLPPLLTDEMIAQYTSALLAGTITSGWTFGAGAALQIPFAMQMAYRFNGIGVTQNVLYENQKLIANQFNSAIGKIQDSLSSTASALGKLQDVVNQNAQALNTLVKQLSSNFGAISSVLNDILSRLDKVEAEVQIDRLITGRLQSLQTYVTQQLIRAAEIRASANLAATKMSECVLGQSKRVDFCGKGYHLMSFPQSAPHGVVFLHVTYVPAQEKNFTCAPAICHDGKAHFPREGVFVSNGTHWFVTQRNFYEPQIITTDNTFVSGNCDVVIGIVNNTVYDPLQPELDSFKEELDKYFKNHTSPDVDLGDISGINASVVNIQKEIDRLNEVAKNLNESLIDLQELGKYEQYIKGGSGYIPEAPRDGQAYVRKDGEWVLLSTFL

SEQ ID NO: 5982 - protein, 1241 aa, Artificial Sequence
  SARS-CoV-2/Sweden/01/2020__EPI_ISL_411951 spike protein (1-1211)(I712C_T1077C) Foldon construct
MFVFLVLLPLVSSQCVNLTTRTQLPPAYTNSFTRGVYYPDKVFRSSVLHSTQDLFLPFFSNVTWFHAIHVSGTNGTKRFDNPVLPFNDGVYFASTEKSNIIRGWIFGTTLDSKTQSLLIVNNATNVVIKVCEFQFCNDPFLGVYYHKNNKSWMESEFRVYSSANNCTFEYVSQPFLMDLEGKQGNFKNLREFVFKNIDGYFKIYSKHTPINLVRDLPQGFSALEPLVDLPIGINITRFQTLLALHRSYLTPGDSSSGWTAGAAAYYVGYLQPRTFLLKYNENGTITDAVDCALDPLSETKCTLKSFTVEKGIYQTSNFRVQPTESIVRFPNITNLCPFGEVFNATRFASVYAWNRKRISNCVADYSVLYNSASFSTFKCYGVSPTKLNDLCFTNVYADSFVIRGDEVRQIAPGQTGKIADYNYKLPDDFTGCVIAWNSNNLDSKVGGNYNYLYRLFRKSNLKPFERDISTEIYQAGSTPCNGVEGFNCYFPLQSYGFQPTNGVGYQPYRVVVLSFELLHAPATVCGPKKSTNLVKNKCVNFNFNGLTGTGVLTESNKKFLPFQQFGRDIADTTDAVRDPQTLEILDITPCSFGGVSVITPGTNTSNQVAVLYQDVNCTEVPVAIHADQLTPTWRVYSTGSNVFQTRAGCLIGAEHVNNSYECDIPIGAGICASYQTQTNSPRRARSVASQSIIAYTMSLGAENSVAYSNNSCAIPTNFTISVTTEILPVSMTKTSVDCTMYICGDSTECSNLLLQYGSFCTQLNRALTGIAVEQDKNTQEVFAQVKQIYKTPPIKDCGGFNFSQILPDPSKPSKRSFIEDLLFNKVTLADAGFIKQYGDCLGDIAARDLICAQKFNGLTVLPPLLTDEMIAQYTSALLAGTITSGWTFGAGAALQIPFAMQMAYRFNGIGVTQNVLYENQKLIANQFNSAIGKIQDSLSSTASALGKLQDVVNQNAQALNTLVKQLSSNFGAISSVLNDILSRLDKVEAEVQIDRLITGRLQSLQTYVTQQLIRAAEIRASANLAATKMSECVLGQSKRVDFCGKGYHLMSFPQSAPHGVVFLHVTYVPAQEKNFTCAPAICHDGKAHFPREGVFVSNGTHWFVTQRNFYEPQIITTDNTFVSGNCDVVIGIVNNTVYDPLQPELDSFKEELDKYFKNHTSPDVDLGDISGINASVVNIQKEIDRLNEVAKNLNESLIDLQELGKYEQYIKGGSGYIPEAPRDGQAYVRKDGEWVLLSTFL

SEQ ID NO: 5983 - protein, 1241 aa, Artificial Sequence
  SARS-CoV-2/Tianmen/HBCDC-HB-07/2020__EPI_ISL_412983 spike protein (1-1211)(I712C_T1077C) Foldon construct
MFVFLVLLPLVSSQCVNLTTRTQLPPAYTNSFTRGVYYPDKVFRSSVLHSTQDLFLPFFSNVTWFHAIHVSGTNGTKRFDNPVLPFNDGVYFASTEKSNIIRGWIFGTTLDSKTQSLLIVNNATNVVIKVCEFQFCNDPFLGVYYHKNNKSWMESEFRVYSSANNCTFEYVSQPFLMDLEGKQGNFKNLREFVFKNIDGYFKIYSKHTPINLVRDLPQGFSALEPLVDLPIGINITRFQTLLALHRSYLTPGDSSSGWTAGAAAYYVGYLQPRTFLLKYNENGTITDAVDCALDPLSETKCTLKSFTVEKGIYQTSNFRVQPTESIVRFPNITNLCPFGEVFNATRFASVYAWNRKRISNCVADYSVLYNSASFSTFKCYGVSPTKLNDLCFTNVYADSFVIRGDEVRQIAPGQTGKIADYNYKLPDDFTGCVIAWNSNNLDSKVGGNYNYLYRLFRKSNLKPFERDISTEIYQAGSTPCNGVEGFNCYFPLQSYGFQPTNGVGYQPYRVVVLSFELLHAPATVCGPKKSTNLVKNKCVNFNFNGLTGTGVLTESNKKFLPFQQFGRDIADTTDAVRDPQTLEILDITPCSFGGVSVITPGTNTSNQVAVLYQDLNCTEVPVAIHADQLTPTWRVYSTGSNVFQTRAGCLIGAEHVNNSYECDIPIGAGICASYQTQTNSPRRARSVASQSIIAYTMSLGAENSVAYSNNSCAIPTNFTISVTTEILPVSMTKTSVDCTMYICGDSTECSNLLLQYGSFCTQLNRALTGIAVEQDKNTQEVFAQVKQIYKTPPIKDFGGFNFSQILPDPSKPSKRSFIEDLLFNKVTLADAGFIKQYGDCLGDIAARDLICAQKFNGLTVLPPLLTDEMIAQYTSALLAGTITSGWTFGAGAALQIPFAMQMAYRFNGIGVTQNVLYENQKLIANQFNSAIGKIQDSLSSTASALGKLQDVVNQNAQALNTLVKQLSSNFGAISSVLNDILSRLDKVEAEVQIDRLITGRLQSLQTYVTQQLIRAAEIRASANLAATKMSECVLGQSKRVDFCGKGYHLMSFPQSAPHGVVFLHVTYVPAQEKNFTCAPAICHDGKAHFPREGVFVSNGTHWFVTQRNFYEPQIITTDNTFVSGNCDVVIGIVNNTVYDPLQPELDSFKEELDKYFKNHTSPDVDLGDISGINASVVNIQKEIDRLNEVAKNLNESLIDLQELGKYEQYIKGGSGYIPEAPRDGQAYVRKDGEWVLLSTFL

SEQ ID NO: 5984 - protein, 1241 aa, Artificial Sequence
  SARS-CoV-2/Hong Kong/case42_VM20002493/2020__EPI_ISL_414527 spike protein (1-1211)(I712C_T1077C) Foldon construct
MFVFLVLLPLVSSQCVNLTTRTQLPPAYTNSFTRGVYYPDKVFRSSVLHSTQDLFLPFFSNVTWFHAIHVSGTNGTKRFDNPVLPFNDGVYFASTEKSNIIRGWIFGTTLDSKTQSLLIVNNATNVVIKVCEFQFCNDPFLGVYYHKNNKSWMESEFRVYSSANNCTFEYVSQPFLMDLEGKQGNFKNLREFVFKNIDGYFKIYSKHTPINLVRDLPQGFSALEPLVDLPIGINITRFQTLLALHRSYLTPGDSSSGWTAGAAAYYVGYLQPRTFLLKYNENGTITDAVDCALDPLSETKCTLKSFTVEKGIYQTSNFRVQPTESIVRFPNITNLCPFGEVFNATRFASVYAWNRKRISNCVADYSVLYNSASFSTFKCYGVSPTKLNDLCFTNVYADSFVIRGDEVRQIAPGQTGKIADYNYKLPDDFTGCVIAWNSNNLDSKVGGNYNYLYRLFRKSNLKPFERDISTEIYQAGSTPCNGVEGFNCYFPLQSYGFQPTNGVGYQPYRVVVLSFELLHAPATVCGPKKSTNLVKNKCVNFNFNGLTGTGVLTESNKKFLPFQQFGRDIADTTDAVRDPQTLEILDITPCSFGGVSVITPGTNTSNQVAVLYQDVNCTEVPVAIHADQLTPTWRVYSTGSNVFQTRAGCLIGAEHVNNSYECDIPIGAGICASYQTQTNSPRRARSVASQSIIAYTMSLGAENSVAYSNNSCAIPTNFAISVTTEILPVSMTKTSVDCTMYICGDSTECSNLLLQYGSFCTQLNRALTGIAVEQDKNTQEVFAQVKQIYKTPPIKDFGGFNFSQILPDPSKPSKRSFIEDLLFNKVTLADAGFIKQYGDCLGDIAARDLICAQKFNGLTVLPPLLTDEMIAQYTSALLAGTITSGWTFGAGAALQIPFAMQMAYRFNGIGVTQNVLYENQKLIANQFNSAIGKIQDSLSSTASALGKLQDVVNQNAQALNTLVKQLSSNFGAISSVLNDILSRLDKVEAEVQIDRLITGRLQSLQTYVTQQLIRAAEIRASANLAATKMSECVLGQSKRVDFCGKGYHLMSFPQSAPHGVVFLHVTYVPAQEKNFTCAPAICHDGKAHFPREGVFVSNGTHWFVTQRNFYEPQIITTDNTFVSGNCDVVIGIVNNTVYDPLQPELDSFKEELDKYFKNHTSPDVDLGDISGINASVVNIQKEIDRLNEVAKNLNESLIDLQELGKYEQYIKGGSGYIPEAPRDGQAYVRKDGEWVLLSTFL

SEQ ID NO: 5985 - protein, 1241 aa, Artificial Sequence
  SARS-CoV-2/USA/CruiseA-23/2020__EPI_ISL_414482 spike protein (1-1211)(I712C_T1077C) Foldon construct
MFVFLVLLPLVSSQCVNLTTRTQLPPAYTNSFTRGVYYPDKVFRSSVLHSTQDLFLPFFSNVTWFHAIHVSGTNGTKRFDNPVLPFNDGVYFASTEKSNIIRGWIFGTTLDSKTQSLLIVNNATNVVIKVCEFQFCNDPFLGVYYHKNNKSWMESEFRVYSSANNCTFEYVSQPFLMDLEVKQGNFKNLREFVFKNIDGYFKIYSKHTPINLVRDLPQGFSALEPLVDLPIGINITRFQTLLALHRSYLTPGDSSSGWTAGAAAYYVGYLQPRTFLLKYNENGTITDAVDCALDPLSETKCTLKSFTVEKGIYQTSNFRVQPTESIVRFPNITNLCPFGEVFNATRFASVYAWNRKRISNCVADYSVLYNSASFSTFKCYGVSPTKLNDLCFTNVYADSFVIRGDEVRQIAPGQTGKIADYNYKLPDDFTGCVIAWNSNNLDSKVGGNYNYLYRLFRKSNLKPFERDISTEIYQAGSTPCNGVEGFNCYFPLQSYGFQPTNGVGYQPYRVVVLSFELLHAPATVCGPKKSTNLVKNKCVNFNFNGLTGTGVLTESNKKFLPFQQFGRDIADTTDAVRDPQTLEILDITPCSFGGVSVITPGTNTSNQVAVLYQDVNCTEVPVAIHADQLTPTWRVYSTGSNVFQTRAGCLIGAEHVNNSYECDIPIGAGICASYQTQTNSPRRARSVASQSIIAYTMSLGAENSVAYSNNSCAIPTNFTISVTTEILPVSMTKTSVDCTMYICGDSTECSNLLLQYGSFCTQLNRALTGIAVEQDKNTQEVFAQVKQIYKTPPIKDFGGFNFSQILPDPSKPSKRSFIEDLLFNKVTLADAGFIKQYGDCLGDIAARDLICAQKFNGLTVLPPLLTDEMIAQYTSALLAGTITSGWTFGAGAALQIPFAMQMAYRFNGIGVTQNVLYENQKLIANQFNSAIGKIQDSLSSTASALGKLQDVVNQNAQALNTLVKQLSSNFGAISSVLNDILSRLDKVEAEVQIDRLITGRLQSLQTYVTQQLIRAAEIRASANLAATKMSECVLGQSKRVDFCGKGYHLMSFPQSAPHGVVFLHVTYVPAQEKNFTCAPAICHDGKAHFPREGVFVSNGTHWFVTQRNFYEPQIITTDNTFVSGNCDVVIGIVNNTVYDPLQPELDSFKEELDKYFKNHTSPDVDLGDISGINASVVNIQKEIDRLNEVAKNLNESLIDLQELGKYEQYIKGGSGYIPEAPRDGQAYVRKDGEWVLLSTFL

SEQ ID NO: 5986 - protein, 1241 aa, Artificial Sequence
  SARS-CoV-2/Hong Kong/case85_VM20002868/2020__EPI_ISL_414519 spike protein (1-1211)(I712C_T1077C) Foldon construct
MFVFLVLVPLVSSQCVNLTTRTQLPPAYTNSFTRGVYYPDKVFRSSVLHSTQDLFLPFFSNVTWFHAIHVSGTNGTKRFDNPVLPFNDGVYFASTEKSNIIRGWIFGTTLDSKTQSLLIVNNATNVVIKVCEFQFCNDPFLGVYYHKNNKSWMESEFRVYSSANNCTFEYVSQPFLMDLEGKQGNFKNLREFVFKNIDGYFKIYSKHTPINLVRDLPQGFSALEPLVDLPIGINITRFQTLLALHRSYLTPGDSSSGWTAGAAAYYVGYLQPRTFLLKYNENGTITDAVDCALDPLSETKCTLKSFTVEKGIYQTSNFRVQPTESIVRFPNITNLCPFGEVFNATRFASVYAWNRKRISNCVADYSVLYNSASFSTFKCYGVSPTKLNDLCFTNVYADSFVIRGDEVRQIAPGQTGKIADYNYKLPDDFTGCVIAWNSNNLDSKVGGNYNYLYRLFRKSNLKPFERDISTEIYQAGSTPCNGVEGFNCYFPLQSYGFQPTNGVGYQPYRVVVLSFELLHAPATVCGPKKSTNLVKNKCVNFNFNGLTGTGVLTESNKKFLPFQQFGRDIADTTDAVRDPQTLEILDITPCSFGGVSVITPGTNTSNQVAVLYQDVNCTEVPVAIHADQLTPTWRVYSTGSNVFQTRAGCLIGAEHVNNSYECDIPIGAGICASYQTQTNSPRRARSVASQSIIAYTMSLGAENSVAYSNNSCAIPTNFTISVTTEILPVSMTKTSVDCTMYICGDSTECSNLLLQYGSFCTQLNRALTGIAVEQDKNTQEVFAQVKQIYKTPPIKDFGGFNFSQILPDPSKPSKRSFIEDLLFNKVTLADAGFIKQYGDCLGDIAARDLICAQKFNGLTVLPPLLTDEMIAQYTSALLAGTITSGWTFGAGAALQIPFAMQMAYRFNGIGVTQNVLYENQKLIANQFNSAIGKIQDSLSSTASALGKLQDVVNQNAQALNTLVKQLSSNFGAISSVLNDILSRLDKVEAEVQIDRLITGRLQSLQTYVTQQLIRAAEIRASANLAATKMSECVLGQSKRVDFCGKGYHLMSFPQSAPHGVVFLHVTYVPAQEKNFTCAPAICHDGKAHFPREGVFVSNGTHWFVTQRNFYEPQIITTDNTFVSGNCDVVIGIVNNTVYDPLQPELDSFKEELDKYFKNHTSPDVDLGDISGINASVVNIQKEIDRLNEVAKNLNESLIDLQELGKYEQYIKGGSGYIPEAPRDGQAYVRKDGEWVLLSTFL

SEQ ID NO: 5987 - protein, 1241 aa, Artificial Sequence; identical to SEQ ID NO: 5977
  SARS-CoV-2/England/200990660/2020__EPI_ISL_414523 spike protein (1-1211)(I712C_T1077C) Foldon construct

SEQ ID NO: 5988 - protein, 1241 aa, Artificial Sequence
  SARS-CoV-2/Australia/NSW09/2020__EPI_ISL_413595 spike protein (1-1211)(I712C_T1077C) Foldon construct
MFVFLVLLPLVSSQCVNLTTRTQLPPAYTNSFTRGVYYPDKVFRSSVLHSTQDLFLPFFSNVTWFHAIHVSGTNGTKRFDNPVLPFNDGVYFASTEKSNIIRGWIFGTTLDSKTQSLLIVNNATNVVIKVCEFQFCNDPFLGVYYHKNNKSWMESEFRVYSSANNCTFEYVSQPFLMDLEGKQGNFKNLREFVFKNIDGYFKIYSKHTPINLVRDLPQGFSALEPLVDLPIGINITRFQTLLALHRSYLTPGDSSSGWTAGAAAYYVGYLQPRTFLLKYNENGTITDAVDCALDPLSETKCTLKSFTVEKGIYQTSNFRVQPTESIVRFPNITNLCPFGEVFNATRFASVYAWNRKRISNCVADYSVLYNSASFSTFKCYGVSPTKLNDLCFTNVYADSFVIRGDEVRQIAPGQTGKIADYNYKLPDDFTGCVIAWNSNNLDSKVGGNYNYLYRLFRKSNLKPFERDISTEIYQAGSTPCNGVEGFNCYFPLQSYGFQPTNGVGYQPYRVVVLSFELLHAPATVCGPKKSTNLVKNKCVNFNFNGLTGTGVLTESNKKFLPFQQFGRDIADTTDAVRDPQTLEILDITPCSFGGVSVITPGTNTSNQVAVLYQDVNCTEVPVAIHADQLTPTWRVYSTGSNVFQTRAGCLIGAEHVNNSYECDIPIGAGICASYQTQTNSPRRARSVASQSIIAYTMSLGAENSVAYSNNSCAIPTNFTISVTTEILPVSMTKTSVDCTMYICGDSTECSNLLLQYGSFCTQLNRALTGIAVEQDKNTQEVFAQVKQIYKTPPIKDFGGFNFSQILPDPSKPSKRSFIEDLLFNKVTLADAGFIKQYGDCLGDIAARDLICAQKFNGLTVLPPLLTDEMIAQYTSALLAGTITSGWTFGAGAALQIPFAMQMAYRFNGIGVTQNVLYENQKLIANQFNSAIGKIQDSLSFTASALGKLQDVVNQNAQALNTLVKQLSSNFGAISSVLNDILSRLDKVEAEVQIDRLITGRLQSLQTYVTQQLIRAAEIRASANLAATKMSECVLGQSKRVDFCGKGYHLMSFPQSAPHGVVFLHVTYVPAQEKNFTCAPAICHDGKAHFPREGVFVSNGTHWFVTQRNFYEPQIITTDNTFVSGNCDVVIGIVNNTVYDPLQPELDSFKEELDKYFKNHTSPDVDLGDISGINASVVNIQKEIDRLNEVAKNLNESLIDLQELGKYEQYIKGGSGYIPEAPRDGQAYVRKDGEWVLLSTFL

SEQ ID NO: 5989 - protein, 1241 aa, Artificial Sequence; identical to SEQ ID NO: 5969
  SARS-CoV-2/Australia/NSW10/2020__EPI_ISL_413596 spike protein (1-1211)(I712C_T1077C) Foldon construct

SEQ ID NO: 5990 - protein, 1241 aa, Artificial Sequence
  SARS-CoV-2/Switzerland/1000477797/2020__EPI_ISL_413023 spike protein (1-1211)(I712C_T1077C) Foldon construct
MFVFLVLLPLVSSQCVNLTTRTQLPPAYTNSFTRGVYYPDKVFRSSVLHSTQDLFLPFFSNVTWFHAIHVSGTNGTKRFDNPVLPFNDGVYFASTEKSNIIRGWIFGTTLDSKTQSLLIVNNATNVVIKVCEFQFCNDPFLGVYYHKNNKSWMESEFRVYSSANNCTFEYVSQPFLMDLEGKQGNFKNLREFVFKNIDGYFNIYSKHTPINLVRDLPQGFSALEPLVDLPIGINITRFQTLLALHRSYLTPGDSSSGWTAGAAAYYVGYLQPRTFLLKYNENGTITDAVDCALDPLSETKCTLKSFTVEKGIYQTSNFRVQPTESIVRFPNITNLCPFGEVFNATRFASVYAWNRKRISNCVADYSVLYNSASFSTFKCYGVSPTKLNDLCFTNVYADSFVIRGDEVRQIAPGQTGKIADYNYKLPDDFTGCVIAWNSNNLDSKVGGNYNYLYRLFRKSNLKPFERDISTEIYQAGSTPCNGVEGFNCYFPLQSYGFQPTNGVGYQPYRVVVLSFELLHAPATVCGPKKSTNLVKNKCVNFNFNGLTGTGVLTESNKKFLPFQQFGRDIADTTDAVRDPQTLEILDITPCSFGGVSVITPGTNTSNQVAVLYQGVNCTEVPVAIHADQLTPTWRVYSTGSNVFQTRAGCLIGAEHVNNSYECDIPIGAGICASYQTQTNSPRRARSVASQSIIAYTMSLGAENSVAYSNNSCAIPTNFTISVTTEILPVSMTKTSVDCTMYICGDSTECSNLLLQYGSFCTQLNRALTGIAVEQDKNTQEVFAQVKQIYKTPPIKDFGGFNFSQILPDPSKPSKRSFIEDLLFNKVTLADAGFIKQYGDCLGDIAARDLICAQKFNGLTVLPPLLTDEMIAQYTSALLAGTITSGWTFGAGAALQIPFAMQMAYRFNGIGVTQNVLYENQKLIANQFNSAIGKIQDSLSSTASALGKLQDVVNQNAQALNTLVKQLSSNFGAISSVLNDILSRLDKVEAEVQIDRLITGRLQSLQTYVTQQLIRAAEIRASANLAATKMSECVLGQSKRVDFCGKGYHLMSFPQSAPHGVVFLHVTYVPAQEKNFTCAPAICHDGKAHFPREGVFVSNGTHWFVTQRNFYEPQIITTDNTFVSGNCDVVIGIVNNTVYDPLQPELDSFKEELDKYFKNHTSPDVDLGDISGINASVVNIQKEIDRLNEVAKNLNESLIDLQELGKYEQYIKGGSGYIPEAPRDGQAYVRKDGEWVLLSTFL

SEQ ID NO: 5991 - protein, 1241 aa, Artificial Sequence
  SARS-CoV-2/Belgium/BA-02291/2020__EPI_ISL_415159 spike protein (1-1211)(I712C_T1077C) Foldon construct
MFVFLVLLPLVSSQCVNLTTRTQLPPAYTNSFTRGVYYPDKVFRSSVLHSTQDLFLPFFSNVTWFHAIHVSGTNGTKRFDNPVLPFNDGVYFASTEKSNIIRGWIFGTTLDSKTQSLLIVNNATNVVIKVCEFQFCNDPFLGVYYHKNNKSWMESEFRVYSSANNCTFEYVSQPFLMDLEGKQGNFKNLREFVFKNIDGYFKIYSKHTPINLVRDLPQGFSALEPLVDLPIGINITRFQTLLALHRSYLTPGDSSSGWTAGAAAYYVGYLQPRTFLLKYNENGTITDAVDCALDPLSETKCTLKSFTVEKGIYQTSNFRVQPTESIVRFPNITNLCPFGEVFNATRFASVYAWNRKRISNCVADYSVLYNSASFSTFKCYGVSPTKLNDLCFTNVYADSFVIRGDEVRQIAPGQTGKIADYNYKLPDDFTGCVIAWNSNNLDSKVGGNYNYLYRLFRRSNLKPFERDISTEIYQAGSTPCNGVEGFNCYFPLQSYGFQPTNGVGYQPYRVVVLSFELLPAPATVCGPKKSTNLVKNKCVNFNFNGLTGTGVLTESNKKFLPFQQFGRDIADTTDAVRDPQTLEILDITPCSFGGVSVITPGTNTSNQVAVLYQGVNCTEVPVAIHADQLTPTWRVYSTGSNVFQTRAGCLIGAEHVNNSYECDIPIGAGICASYQTQTNSPRRARSVASQSIIAYTMSLGAENSVAYSNNSCAIPTNFTISVTTEILPVSMTKTSVDCTMYICGDSTECSNLLLQYGSFCTQLNRALTGIAVEQDKNTQEVFAQVKQIYKTPPIKDFGGFNFSQILPDPSKPSKRSFIEDLLFNKVTLADAGFIKQYGDCLGDIAARDLICAQKFNGLTVLPPLLTDEMIAQYTSALLAGTITSGWTFGAGAALQIPFAMQMAYRFNGIGVTQNVLYENQKLIANQFNSAIGKIQDSLSSAAPALGKLQDVVNQNAQALNTLVKQLSSNFGAISSVLNDILSRLDKVEAEVQIDRLITGRLQSLQTYVTQQLIRAAEIRASANLAATKMSECVLGQSKRVDFCGKGYHLMSFPQSAPHGVVFLHVTYVPAQEKNFTCAPAICHDGKAHFPREGVFVSNGTHWFVTQRNFYEPQIITTDNTFVSGNCDVVIGIVNNTVYDPLQPELDSFKEELDKYFKNHTSPDVDLGDISGINASVVNIQKEIDRLNEVAKNLNESLIDLQELGKYEQYIKGGSGYIPEAPRDGQAYVRKDGEWVLLSTFL

SEQ ID NO: 5992 - protein, 1241 aa, Artificial Sequence
  SARS-CoV-2/USA/WA8-UW5/2020__EPI_ISL_413486 spike protein (1-1211)(I712C_T1077C) Foldon construct
MFVFLVLLPLVSSQCVNLTTRTQLPPAYTNSFTRGVYYPDKVFRSSVLHSTQDLFLPFFSNVTWFHAIHVSGTNGTKRFDNPVLPFNDGVYFASTEKSNIIRGWIFGTTLDSKTQSLLIVNNATNVVIKVCEFQFCNDPFLGVYYHKNNKSWMESEFRVYSSANNCTFEYVSQPFLMDLEGKQGNFKNLREFVFKNIDGYFKIYSKHTPINLVRDLPQGFSALEPLVDLPIGINITRFQTLLALHRSYLTPGDSSSGWTAGAAAYYVGYLQPRTFLLKYNENGTITDAVDCALDPLSETKCTLKSFTVEKGIYQTSNFRVQPTESIVRFPNITNLCPFGEVFNATRFASVYAWNRKRISNCVADYSVLYNSASFSTFKCYGVSPTKLNDLCFTNVYADSFVIRGDEVRQIAPGQTGKIADYNYKLPDDFTGCVIAWNSNNLDSKVGGNYNYLYRLFRKSNLKPFERDISTEIYQAGSTPCNGVEGFNCYFPLQSYGFQPTNGVGYQPYRVVVLSFELLHAPATVCGPKKSTNLVKNKCVNFNFNGLTGTGVLTESNKKFLPFQQFGRDIADTTDAVRDPQTLEILDITPCSFGGVSVITPGTNTSNQVAVLYQDVNCTEVPVAIHADQLTPTWRVYSTGSNVFQTRAGCLIGAEYVNNSYECDIPIGAGICASYQTQTNSPRRARSVASQSIIAYTMSLGAENSVAYSNNSCAIPTNFTISVTTEILPVSMTKTSVDCTMYICGDSTECSNLLLQYGSFCTQLNRALTGIAVEQDKNTQEVFAQVKQIYKTPPIKDFGGFNFSQILPDPSKPSKRSFIEDLLFNKVTLADAGFIKQYGDCLGDIAARDLICAQKFNGLTVLPPLLTDEMIAQYTSALLAGTITSGWTFGAGAALQIPFAMQMAYRFNGIGVTQNVLYENQKLIANQFNSAIGKIQDSLSSTASALGKLQDVVNQNAQALNTLVKQLSSNFGAISSVLNDILSRLDKVEAEVQIDRLITGRLQSLQTYVTQQLIRAAEIRASANLAATKMSECVLGQSKRVDFCGKGYHLMSFPQSAPHGVVFLHVTYVPAQEKNFTCAPAICHDGKAHFPREGVFVSNGTHWFVTQRNFYEPQIITTDNTFVSGNCDVVIGIVNNTVYDPLQPELDSFKEELDKYFKNHTSPDVDLGDISGINASVVNIQKEIDRLNEVAKNLNESLIDLQELGKYEQYIKGGSGYIPEAPRDGQAYVRKDGEWVLLSTFL

SEQ ID NO: 5993 - protein, 1241 aa, Artificial Sequence
  SARS-CoV-2/England/20102000506/2020__EPI_ISL_415147 spike protein (1-1211)(I712C_T1077C) Foldon construct
MFVFLVLLPLVSSQCVNLTTRTQLPPAYTNSFTRGVYYPDKVFRSSVLHSTQDLFLPFFSNVTWFHAIHVSGTNGTKRFDNPVLPFNDGVYFASTEKSNIIRGWIFGTTLDSKTQSLLIVNNATNVVIKVCEFQFCNDPFLGVYYHKNNKSWMESEFRVYSSANNCTFEYVSQPFLMDLEGKQGNFKNLREFVFKNIDGYFKIYSKHTPINLVRDLPQGFSALEPLVDLPIGINITRFQTLLALHRSYLTPGDSSSGWTAGAAAYYVGYLQPRTFLLKYNENGTITDAVDCALDPLSETKCTLKSFTVEKGIYQTSNFRVQPTESIVRFPNITNLCPFGEVFNATRFASVYAWNRKRISNCVADYSVLYNSASFSTFKCYGVSPTKLNDLCFTNVYADSFVIRGDEVRQIAPGQTGKIADYNYKLPDDFTGCVIAWNSNNLDSKVGGNYNYLYRLFRKSNLKPFERDISTEIYQAGSTPCNGVEGFNCYFPLQSYGFQPTNGVGYQPYRVVVLSFELLHAPATVCGPKKSTNLVKNKCVNFNFNGLTGTGVLTESNKKFLPFQQFGRDIADTTDAVRDPQTLEILDITPCSFGGVSVITPGTNTSNQVAVLYQGVNCTEVPVAIHADQLTPTWRVYSTGSNVFQTRAGCLIGAEHVNNSYECDIPIGAGICASYQTQTNSPRRARSVASQSIIAYTMSLGAENSVAYSNNSCAIPTNFTISVTTEILPVSMTKTSVDCTMYICGDSTECSNLLLQYGSFCTQLNRALTGIAVEQDKNTQEVFAQVKQIYKTPPIKDFGGFNFSQILPDPSKPSKRSFIEDLLFNKVTLADAGFIKQYGYCLGDIAARDLICAQKFNGLTVLPPLLTDEMIAQYTSALLAGTITSGWTFGAGAALQIPFAMQMAYRFNGIGVTQNVLYENQKLIANQFNSAIGKIQDSLSSTASALGKLQDVVNQNAQALNTLVKQLSSNFGAISSVLNDILSRLDKVEAEVQIDRLITGRLQSLQTYVTQQLIRAAEIRASANLAATKMSECVLGQSKRVDFCGKGYHLMSFPQSAPHGVVFLHVTYVPAQEKNFTCAPAICHDGKAHFPREGVFVSNGTHWFVTQRNFYEPQIITTDNTFVSGNCDVVIGIVNNTVYDPLQPELDSFKEELDKYFKNHTSPDVDLGDISGINASVVNIQKEIDRLNEVAKNLNESLIDLQELGKYEQYIKGGSGYIPEAPRDGQAYVRKDGEWVLLSTFL

SEQ ID NO: 5994 - protein, 1241 aa, Artificial Sequence
  SARS-CoV-2/Belgium/VAG-03013/2020__EPI_ISL_415155 spike protein (1-1211)(I712C_T1077C) Foldon construct
MFVFLVLLPLVSSQCVNLTTRTQLPPAYTNSFTRGVYYPDKVFRSSVLHSTQDLFLPFFSNVTWFHAIHVSGTNGTKRFDNPVLPFNDGVYFASTEKSNIIRGWIFGTTLDSKTQSLLIVNNATNVVIKVCEFQFCNDPFLGVYYHKNNKSWMESEFRVYSSANNCTFEYVSQPFLMDLEGKQGNFKNLREFVFKNIDGYFKIYSKHTPINLVRDLPQGFSALEPLVDLPIGINITRFQTLLALHRSYLTPGDSSSGWTAGAAAYYVGYLQPRTFLLKYNENGTITDAVDCALDPLSETKCTLKSFTVEKGIYQTSNFRVQPTESIVRFPNITNLCPFGEVFNATRFASVYAWNRKRISNCVADYSVLYNSASFSTFKCYGVSPTKLNDLCFTNVYADSFVIRGDEVRQIAPGQTGKIADYNYKLPDDFTGCVIAWNSNNLDSKVGGNYNYLYRLFRKSNLKPFERDISTEIYQAGSTPCNGVEGFNCYFPLQSYGFQPTNGVGYQPYRVVVLSFELLHAPATVCGPKKSTNLVKNKCVNFNFNGLTGTGVLTESNKKFLPFQQFGRDIADTTDAVRDPQTLEILDITPCSFGGVSVITPGTNTSNQVAVLYQGVNCTEVPVAIHADQLTPTWRVYSTGSNVFQTRAGCLIGAEHVNNSYECDIPIGAGICASYQTQTNSPRRARSVASQSIIAYTMSLGAENSVAYSNNSCAIPTNFTISVTTEILPVSMTKTSVDCTMYICGDSTECSNLLLQYGSFCTQLNRALTGIAVEQDKNTQEVFAQVKQIYKTPPIKDFGGFNFSQILPDPSKPSKRSFIEDLLFNKVTLADAGFIKQYGDCLGDIAARDLICAQKFNGLTVLPPLLTDEMIAQYTSALLAGTITSGWTFGAGAALQIPFAMQMAYRFNGIGVTQNVLYENQKLIANQFNSAIGKIQDSLSSTATALGKLQDVVNQNAQALNTLVKQLSSNFGAISSVLNDILSRLDKVEAEVQIDRLITGRLQSLQTYVTQQLIRAAEIRASANLAATKMSECVLGQSKRVDFCGKGYHLMSFPQSAPHGVVFLHVTYVPAQEKNFTCAPAICHDGKAHFPREGVFVSNGTHWFVTQRNFYEPQIITTDNTFVSGNCDVVIGIVNNTVYDPLQPELDSFKEELDKYFKNHTSPDVDLGDISGINASVVNIQKEIDRLNEVAKNLNESLIDLQELGKYEQYIKGGSGYIPEAPRDGQAYVRKDGEWVLLSTFL

SEQ ID NO: 5995 - protein, 1241 aa, Artificial Sequence
  SARS-CoV-2/Belgium/BC-03016/2020__EPI_ISL_415157 spike protein (1-1211)(I712C_T1077C) Foldon construct
MFVFLVLLPLVSSQCVNLTTRTQLPPAYTNSFTRGVYYPDKVFRSSVLHSTQDLFLPFFSNVTWFHAIHVSGTNGTKRFDNPVLPFNDGVYFASTEKSNIIRGWIFGTTLDSKTQSLLIVNNATNVVIKVCEFQFCNDPFLGVYYHKNNKSWMESEFRVYSSANNCTFEYVSQPFLMDLEGKQGNFKNLREFVFKNIDGYFKIYSKHTPINLVRDLPQGFSALEPLVDLPIGINITRFQTLLALHRSYLTPGDSSSGWTAGAAAYYVGYLQPRTFLLKYNENGTITDAVDCALDPLSETKCTLKSFTVEKGIYQTSNFRVQPTESIVRFPNITNLCPFGEVFNATRFASVYAWNRKRISNCVADYSVLYNSASFSTFKCYGVSPTKLNDLCFTNVYADSFVIRGDEVRQIAPGQTGKIADYNYKLPDDFTGCVIAWNSNNLDSKVGGNYNYLYRLFRKSNLKPFERDISTEIYQAGSTPCNGVEGFNCYFPLQSYGFQPTNGVGYQPYRVVVLSFELLHAPATVCGPKKSTNLVKNKCVNFNFNGLTGTGVLTESNKKFLPFQQFGRDIADTTDAVRDPQTLEILDITPCSFGGVSVITPGTNTSNQVAVLYQGVNCTEVPVAIHADQLTPTWRVYSTGSNVFQTRAGCLIGAEHVNNSYECDIPIGAGICASYQTQTNSPRRARSVASQSIIAYTMSLGAENSVAYSNNSCAIPTNFTISVTTEILPVSMTKTSVDCTMYICGDSTECSNLLLQYGSFCTQLNRALTGIAVEQDKNTQEVFAQVKQIYKTPPIKDFGGFNFSQILPDPSKPSKRSFIEDLLFNKVTLADAGFIKQYGDCLGDIAARDLICAQKFNGLTVLPPLLTDEMIAQYTSALLAGTITSGWTFGAGAALQIPFAMQMAYRFNGIGVTQNVLYENQKLIANQFNSAIGKIQDSLSSTAPALGKLQDVVNQNAQALNTLVKQLSSNFGAISSVLNDILSRLDKVEAEVQIDRLITGRLQSLQTYVTQQLIRAAEIRASANLAATKMSECVLGQSKRVDFCGKGYHLMSFPQSAPHGVVFLHVTYVPAQEKNFTCAPAICHDGKAHFPREGVFVSNGTHWFVTQRNFYEPQIITTDNTFVSGNCDVVIGIVNNTVYDPLQPELDSFKEELDKYFKNHTSPDVDLGDISGINASVVNIQKEIDRLNEVAKNLNESLIDLQELGKYEQYIKGGSGYIPEAPRDGQAYVRKDGEWVLLSTFL

SEQ ID NO: 5996 - protein, 1241 aa, Artificial Sequence
  SARS-CoV-2/Germany/BavPat3/2020__EPI_ISL_414521 spike protein (1-1211)(I712C_T1077C) Foldon construct
MFVFLVLLPLVSSQCVNLTTRTQLPPAYTNSFTRGVYYPDKVFRSSVLHSTQDLFLPFFSNVTWFHAIHVSGTNGTKRFDNPVLPFNDGVYFASTEKSNIIRGWIFGTTLDSKTQSLLIVNNATNVVIKVCEFQFCNDPFLGVYYHKNNKSWMESEFRVYSSANNCTFEYVSQPFLMDLEGKQGNFKNLREFVFKNIDGYFKIYSKHTPINLVRDLPQGFSALEPLVDLPIGINITRFQTLLALHRSYLTPGDSSSGWTAGAAAYYVGYLQPRTFLLKYNENGTITDAVDCALDPLSETKCTLKSFTVEKGIYQTSNFRVQPTESIVRFPNITNLCPFGEVFNATRFASVYAWNRKRISNCVADYSVLYNSASFSTFKCYGVSPTKLNDLCFTNVYADSFVIRGDEVRQIAPGQTGKIADYNYKLPDDFTGCVIAWNSNNLDSKVGGNYNYLYRLFRKSNLKPFERDISTEIYQAGSTPCNGVEGFNCYFPLQSYGFQPTNGVGYQPYRVVVLSFELLHAPATVCGPKKSTNLVKNKCVNFNFNGLTGTGVLTESNKKFLPFQQFGRDIADTTDAVRDPQTLEILDITPCSFGGVSVITPGTNTSNQVAVLYQDVNCTEVPVAIHADQLTPTWRVYSTGSNVFQTRAGCLIGAEHVNNSYECDIPIGAGICASYQTQTNSPRRARSVASQSIIAYTMSLGAENSVAYSNNSCAIPTNFTISVTTEILPVSMTKTSVDCTMYICGDSTECSNLLLQYGSFCTQLNRALTGIAVEQDKNTQQVFAQVKQIYKTPPIKDFGGFNFSQILPDPSKPSKRSFIEDLLFNKVTLADAGFIKQYGDCLGDIAARDLICAQKFNGLTVLPPLLTDEMIAQYTSALLAGTITSGWTFGAGAALQIPFAMQMAYRFNGIGVTQNVLYENQKLIANQFNSAIGKIQDSLSSTASALGKLQDVVNQNAQALNTLVKQLSSNFGAISSVLNDILSRLDKVEAEVQIDRLITGRLQSLQTYVTQQLIRAAEIRASANLAATKMSECVLGQSKRVDFCGKGYHLMSFPQSAPHGVVFLHVTYVPAQEKNFTCAPAICHDGKAHFPREGVFVSNGTHWFVTQRNFYEPQIITTDNTFVSGNCDVVIGIVNNTVYDPLQPELDSFKEELDKYFKNHTSPDVDLGDISGINASVVNIQKEIDRLNEVAKNLNESLIDLQELGKYEQYIKGGSGYIPEAPRDGQAYVRKDGEWVLLSTFL

SEQ ID NO: 5997 - protein, 1241 aa, Artificial Sequence
  SARS-CoV-2/France/HF1805/2020__EPI_ISL_414628 spike protein (1-1211)(I712C_T1077C) Foldon construct
MFVFLVLLPLVSSQCVNLTTRTQLPPAYTNSFTRGVYYPDKVFRSSVLHSTQDLFLPFFSNVTWFHAIHVSGTNGTKRFDNPVLPFNDGVYFASTEKSNIIRGWIFGTTLDSKTQSLLIVNNATNVVIKVCEFQFCNDPFLGVYYHKNNKSWMESEFRVYSSANNCTFEYVSQPFLMDLEGKQGNFKNLREFVFKNIDGYFKIYSKHTPINLVRDLPQGFSALEPLVDLPIGINITRFQTLLALHRSYLTPGDSSSGWTAGAAAYYVGYLQPRTFLLKYNENGTITDAVDCALDPLSETKCTLKSFTVEKGIYQTSNFRVQPTESIVRFPNITNLCPFGEVFNATRFASVYAWNRKRISNCVADYSVLYNSASFSTFKCYGVSPTKLNDLCFTNVYADSFVIRGDEVRQIAPGQTGKIADYNYKLPDDFTGCVIAWNSNNLDSKVGGNYNYLYRLFRKSNLKPFERDISTEIYQAGSTPCNGVEGFNCYFPLQSYGFQPTNGVGYQPYRVVVLSFELLHAPATVCGPKKSTNLVKNKCVNFNFNGLTGTGVLTESNKKFLPFQQFGRDIADTTDAVRDPQTLEILDITPCSFGGVSVITPGTNTSNQVAVLYQGVNCTEVPVAIHADQLTPTWRVYSTGSNVFQTRAGCLIGAEHVNNSYECDIPIGAGICASYQTQTNSPRRARSVASQSIIAYTMSLGAENSVAYSNNSCAIPTNFTISVTTEILPVSMTKTSVDCTMYICGDSTECSNLLLQYGSFCTQLNRALTGIAVEQDKNTQEVFAQVKQIYKTPPIKDFGGFNFSQILPDPSKPSKRSFIEDLLFNKVTLADAGFIKQYGDCLGDIAARDLICAQKFNGLTVLPPLLTDEMIAQYTSALLAGTITSGWTFGAGAALQIPFAMQMAYRFNGIGVTQNVLYENQKLIANQFNSAIGKIQDSLSSTASALGKLQDVVNQNAQALNTLVKQLSSNFGAISSVLNDILSRLDKVEAEVQIDRLITGRLQSLQTYVTQQLIRAAEIRASANLAATKMSECVLGQSKRVDFCGKGYHLMSFPQSAPHGVVFLHVTYVPAQEKNFTCAPAICHDGKAHFPREGVFVSNGTHWFVTQRNFYEPQIITTDNTFVSGNCDVVIGVVNNTVYDPLQPELDSFKEELDKYFKNHTSPDVDLGDISGINASVVNIQKEIDRLNEVAKNLNESLIDLQELGKYEQYIKGGSGYIPEAPRDGQAYVRKDGEWVLLSTFL

SEQ ID NO: 5998 - protein, 1241 aa, Artificial Sequence
  SARS-CoV-2/Netherlands/ZuidHolland_9/2020__EPI_ISL_414445 spike protein (1-1211)(I712C_T1077C) Foldon construct
MFVFLVLLPLVSSQCVNLTTRTQLPPAYTNSFTRGVYYPDKVFRSSVLHSTQDLFLPFFSNVTWFHAIHVSGTNGTKRFDNPVLPFNDGVYFASTEKSNIIRGWIFGTTLDSKTQSLLIVNNATNVVIKVCEFQFCNDPFLGVYYHKNNKSWMESEFRVYSSANNCTFEYVSQPFLMDLEGKQGNFKNLREFVFKNIDGYFKIYSKHTPINLVRDLPQGFSALEPLVDLPIGINITRFQTLLALHRSYLTPGDSSSGWTAGAAAYYVGYLQPRTFLLKYNENGTITDAVDCALDPLSETKCTLKSFTVEKGIYQTSNFRVQPTESIVRFPNITNLCPFGEVFNATRFASVYAWNRKRISNCVADYSVLYNSASFSTFKCYGVSPTKLNDLCFTNVYADSFVIRGDEVRQIAPGQTGKIADYNYKLPDDFTGCVIAWNSNNLDSKVGGNYNYLYRLFRKSNLKPFERDISTEIYQAGSTPCNGVEGFNCYFPLQSYGFQPTNGVGYQPYRVVVLSFELLHAPATVCGPKKSTNLVKNKCVNFNFNGLTGTGVLTESNKKFLPFQQFGRDIADTTDAVRDPQTLEILDITPCSFGGVSVITPGTNTSNQVAVLYQGVNCTEVPVAIHADQLTPTWRVYSTGSNVFQTRAGCLIGAEHVNNSYECDIPIGAGICASYQTQTNSPRRARSVASQSIIAYTMSLGAENSVAYSNNSCAIPTNFTISVTTEILPVSMTKTSVDCTMYICGDSTECSNLLLQYGSFCTQLNRALTGIAVEQDKNTQEVFAQVKQIYKTPPIKDFGGFNFSQILPDPSKPSKRSFIEDLLFNKVTLADAGFIKQYGDCLGDIAARDLICVQKFNGLTVLPPLLTDEMIAQYTSALLAGTITSGWTFGAGAALQIPFAMQMAYRFNGIGVTQNVLYENQKLIANQFNSAIGKIQDSLSSTASALGKLQDVVNQNAQALNTLVKQLSSNFGAISSVLNDILSRLDKVEAEVQIDRLITGRLQSLQTYVTQQLIRAAEIRASANLAATKMSECVLGQSKRVDFCGKGYHLMSFPQSAPHGVVFLHVTYVPAQEKNFTCAPAICHDGKAHFPREGVFVSNGTHWFVTQRNFYEPQIITTDNTFVSGNCDVVIGIVNNTVYDPLQPELDSFKEELDKYFKNHTSPDVDLGDISGINASVVNIQKEIDRLNEVAKNLNESLIDLQELGKYEQYIKGGSGYIPEAPRDGQAYVRKDGEWVLLSTFL

SEQ ID NO: 5999 - protein, 1241 aa, Artificial Sequence
  SARS-CoV-2/Finland/FIN03032020A/2020__EPI_ISL_413602 spike protein (1-1211)(I712C_T1077C) Foldon construct
MFVFLVLLPLVSSQCVNLTTRTQLPPAYTNSFTRGVYYPDKVFRSSVLHSTQDLFLPFFSNVTWFHAIHVSGTNGTKRFDNPVLPFNDGVYFASTEKSNIIRGWIFGTTLDSKTQSLLIVNNATNVVIKVCEFQFCNDPFLGVYYHKNNKSWMESEFRVYSSANNCTFEYVSQPFLMDLEGKQGNFKNLREFVFKNIDGYFKIYSKHTPINLVRDLPQGFSALEPLVDLPIGINITRFQTLLALHRSYLTPGDSSSGWTAGAAAYYVGYLQPRTFLLKYNENGTITDAVDCALDPLSETKCTLKSFTVEKGIYQTSNFRVQPTESIVRFPNITNLCPFGEVFNATRFASVYAWNRKRISNCVADYSVLYNSASFSTFKCYGVSPTKLNDLCFTNVYADSFVIRGDEVRQIAPGQTGKIADYNYKLPDDFTGCVISWNSNNLDSKVGGNYNYLYRLFRKSNLKPFERDISTEIYQAGSTPCNGVEGFNCYFPLQSYGFQPTNGVGYQPYRVVVLSFELLHAPATVCGPKKSTNLVKNKCVNFNFNGLTGTGVLTESNKKFLPFQQFGRDIADTTDAVRDPQTLEILDITPCSFGGVSVITPGTNTSNQVAVLYQGVNCTEVPVAIHADQLTPTWRVYSTGSNVFQTRAGCLIGAEHVNNSYECDIPIGAGICASYQTQTNSPRRARSVASQSIIAYTMSLGAENSVAYSNNSCAIPTNFTISVTTEILPVSMTKTSVDCTMYICGDSTECSNLLLQYGSFCTQLNRALTGIAVEQDKNTQEVFAQVKQIYKTPPIKDFGGFNFSQILPDPSKPSKRSFIEDLLFNKVTLADAGFIKQYGDCLGDIAARDLICAQKFNGLTVLPPLLTDEMIAQYTSALLAGTITSGWTFGAGAALQIPFAMQMAYRFNGIGVTQNVLYENQKLIANQFNSAIGKIQDSLSSTASALGKLQDVVNQNAQALNTLVKQLSSNFGAISSVLNDILSRLDKVEAEVQIDRLITGRLQSLQTYVTQQLIRAAEIRASANLAATKMSECVLGQSKRVDFCGKGYHLMSFPQSAPHGVVFLHVTYVPAQEKNFTCAPAICHDGKAHFPREGVFVSNGTHWFVTQRNFYEPQIITTDNTFVSGNCDVVIGIVNNTVYDPLQPELDSFKEELDKYFKNHTSPDVDLGDISGINASVVNIQKEIDRLNEVAKNLNESLIDLQELGKYEQYIKGGSGYIPEAPRDGQAYVRKDGEWVLLSTFL

SEQ ID NO: 6000 - protein, 1241 aa, Artificial Sequence
  SARS-CoV-2/France/GE1977/2020__EPI_ISL_414632 spike protein (1-1211)(I712C_T1077C) Foldon construct
MFVFLVLLPLVSSQCVNLTTRTQLPPAYTNSFTRGVYYPDKVFRSSVLHSTQDLFLPFFSNVTWFHAIHVSGTNGTKRFDNPVLPFNDGVYFASTEKSNIIRGWIFGTTLDSKTQSLLIVNNATNVVIKVCEFQFCNDPFLGVYYHKNNKSWMESEFRVYSSANNCTFEYVSQPFLMDLEGKQGNFKNLREFVFKNIDGYFKIYSKHTPINLVRDLPQGFSALEPLVDLPIGINITRFQTLLALHRSYLTPGDSSSGWTAGAAAYYVGYLQPRTFLLKYNENGTITDAVDCALDPLSETKCTLKSFTVEKGIYQTSNFRVQPTESIVRFPNITNLCPFGEVFNATRFASVYAWNRKRISNCVADYSVLYNSASFSTFKCYGVSPTKLNDLCFTNVYADSFVIRGDEVRQIAPGQTGKIADYNYKLPDDFTGCVIAWNSNNLDSKVGGNYNYLYRLFRKSNLKPFERDISTEIYQAGSTPCNGVEGFNCYFPLQSYGFQPTNGVGYQPYRVVVLSFELLHAPATVCGPKKSTNLVKNKCVNFNFNGLTGTGVLTESNKKFLPFQQFGRDIADTTDAVRDPQTLEILDITPCSFGGVSVITPGTNTSNQVAVLYQGVNCTEVPVAIHADQLTPTWRVYSTGSNVFQTRAGCLIGAEHVNNSYECDIPIGAGICASYQTQTNSPRRARSVASQSIIAYTMSLGAENSVAYSNNSCAIPTNFTISVTTEILPVSMTKTSVDCTMYICGDSTECSNLLLQYGSFCTQLNRALTGIAVEQDKNTQEVFAQVKQIYKTPPIKDFGGFNFSQILPDPSKPSKRSFIEDLLFNKVTLADAGFIKQYGDCLGDIAARDLICAQKFNGLTVLPPLLTDEMIAQYTSALLAGTITSGWTFGAGAALQIPFAMQMAYRFNGIGVTQNVLYENQKLIANQFNSAIGKIQDSLFSTASALGKLQDVVNQNAQALNTLVKQLSSNFGAISSVLNDILSRLDKVEAEVQIDRLITGRLQSLQTYVTQQLIRAAEIRASANLAATKMSECVLGQSKRVDFCGKGYHLMSFPQSAPHGVVFLHVTYVPAQEKNFTCAPAICHDGKAHFPREGVFVSNGTHWFVTQRNFYEPQIITTDNTFVSGNCDVVIGIVNNTVYDPLQPELDSFKEELDKYFKNHTSPDVDLGDISGINASVVNIQKEIDRLNEVAKNLNESLIDLQELGKYEQYIKGGSGYIPEAPRDGQAYVRKDGEWVLLSTFL

SEQ ID NO: 6001 - protein, 1241 aa, Artificial Sequence
  SARS-CoV-2/Finland/FIN-313/2020__EPI_ISL_414641 spike protein (1-1211)(I712C_T1077C) Foldon construct
MFVFLVLLPLVSSQCVNLTTRTQLPPAYTNSFTRGVYYPDKVFRSSVLHSTQDLFLPFFSNVTWFHAIHVSGTNGTKRFDNPVLPFNDGVYFASTEKSNIIRGWIFGTTLDSKTQSLLIVNNATNVVIKVCEFQFCNDPFLGVYYHKNNKSWMESEFRVYSSANNCTFEYVSQPFLMDLEGKQGNFKNLREFVFKNIDGYFKIYSKHTPINLVRDLPQGFSALEPLVDLPIGINITRFKTLLALHRSYLTPGDSSSGWTAGAAAYYVGYLQPRTFLLKYNENGTITDAVDCALDPLSETKCTLKSFTVEKGIYQTSNFRVQPTESIVRFPNITNLCPFGEVFNATRFASVYAWNRKRISNCVADYSVLYNSASFSTFKCYGVSPTKLNDLCFTNVYADSFVIRGDEVRQIAPGQTGKIADYNYKLPDDFTGCVIAWNSNNLDSKVGGNYNYLYRLFRKSNLKPFERDISTEIYQAGSTPCNGVEGFNCYFPLQSYGFQPTNGVGYQPYRVVVLSFELLHAPATVCGPKKSTNLVKNKCVNFNFNGLTGTGVLTESNKKFLPFQQFGRDIADTTDAVRDPQTLEILDITPCSFGGVSVITPGTNTSNQVAVLYQGVNCTEVPVAIHADQLTPTWRVYSTGSNVFQTRAGCLIGAEHVNNSYECDIPIGAGICASYQTQTNSPRRARSVASQSIIAYTMSLGAENSVAYSNNSCAIPTNFTISVTTEILPVSMTKTSVDCTMYICGDSTECSNLLLQYGSFCTQLNRALTGIAVEQDKNTQEVFAQVKQIYKTPPIKDFGGFNFSQILPDPSKPSKRSFIEDLLFNKVTLADAGFIKQYGDCLGDIAARDLICAQKFNGLTVLPPLLTDEMIAQYTSALLAGTITSGWTFGAGAALQIPFAMQMAYRFNGIGVTQNVLYENQKLIANQFNSAIGKIQDSLSSTASALGKLQDVVNQNAQALNTLVKQLSSNFGAISSVLNDILSRLDKVEAEVQIDRLITGRLQSLQTYVTQQLIRAAEIRASANLAATKMSECVLGQSKRVDFCGKGYHLMSFPQSAPHGVVFLHVTYVPAQEKNFTCAPAICHDGKAHFPREGVFVSNGTHWFVTQRNFYEPQIITTDNTFVSGNCDVVIGIVNNTVYDPLQPELDSFKEELDKYFKNHTSPDVDLGDISGINASVVNIQKEIDRLNEVAKNLNESLIDLQELGKYEQYIKGGSGYIPEAPRDGQAYVRKDGEWVLLSTFL

SEQ ID NO: 6002 - protein, 1241 aa, Artificial Sequence
  SARS-CoV-2/Netherlands/ZuidHolland_2/2020__EPI_ISL_414556 spike protein (1-1211)(I712C_T1077C) Foldon construct
MFVFLVLLPLVSSQCVNLTTRTQLPPAYTNSFTRGVYYPDKVFRSSVLHSTQDLFLPFFSNVTWFHAIHVSGTNGTKRFDNPVLPFNDGVYFASTEKSNIIRGWIFGTTLDSKTQSLLIVNNATNVVIKVCEFQFCNDPFLGVYYHKNNKSWMESEFRVYSSANNCTFEYVSQPFLMDLEGKQGNFKNLREFVFKNIDGYFKIYSKHTPINLVRDLPQGFSALEPLVDLPIGINITRFQTLLALHRSYLTPGDSSSGWTAGAAAYYVGYLQPRTFLLKYNENGTITDAVDCALDPLSETKCTLKSFTVEKGIYQTSNFRVQPTESIVRFPNITNLCPFGEVFNATRFASVYAWNRKRISNCVADYSVLYNSASFSTFKCYGVSPTKLNDLCFTNVYADSFVIRGDEVRQIAPGQTGKIADYNYKLPDDFTGCVIAWNSNNLDSKVGGNYNYLYRLFRKSNLKPFERDISTEIYQAGSTPCNGVEGFNCYFPLQSYGFQPTNGVGYQPYRVVVLSFELLHAPATVCGPKKSTNLVKNKCVNFNFNGLTGTGVLTESNKKFLPFQQFGRDIADTTDAVRDPQTLEILDITPCSFGGVSVITPGTNTSNQVAVLYQGVNCTEVPVAIHADQLTPTWRVYSTGSNVFQTRAGCLIGAEHVNNSYECDIPIGAGICASYQTQTNSPRRARSVASQSIIAYTMSLGAENSVAYSNNSCAIPTNFTISVTTEILPVSMTKTSVDCTMYICGDSTECSNLLLQYGSFCTQLNRALTGIALEQDKNTQEVFAQVKQIYKTPPIKDFGGFNFSQILPDPSKPSKRSFIEDLLFNKVTLADAGFIKQYGDCLGDIAARDLICAQKFNGLTVLPPLLTDEMIAQYTSALLAGTITSGWTFGAGAALQIPFAMQMAYRFNGIGVTQNVLYENQKLIANQFNSAIGKIQDSLSSTASALGKLQDVVNQNAQALNTLVKQLSSNFGAISSVLNDILSRLDKVEAEVQIDRLITGRLQSLQTYVTQQLIRAAEIRASANLAATKMSECVLGQSKRVDFCGKGYHLMSFPQSAPHGVVFLHVTYVPAQEKNFTCAPAICHDGKAHFPREGVFVSNGTHWFVTQRNFYEPQIITTDNTFVSGNCDVVIGIVNNTVYDPLQPELDSFKEELDKYFKNHTSPDVDLGDISGINASVVNIQKEIDRLNEVAKNLNESLIDLQELGKYEQYIKGGSGYIPEAPRDGQAYVRKDGEWVLLSTFL

SEQ ID NO: 6003 - protein, 1241 aa, Artificial Sequence
  SARS-CoV-2/USA/WA-UW31/2020__EPI_ISL_414618 spike protein (1-1211)(I712C_T1077C) Foldon construct
MFVFLVLLPLVSSQCVNLTTRTQLPPAYTNSFTRGVYYPDKVFRSSVLHSTQDLFLPFFSNVTWFHAIHVSGTNGTKRFDNPVLPFNDGVYFASTEKSNIIRGWIFGTTLDSKTQSLLIVNNATNVVIKVCEFQFCNDPFLGVYYHKNNKSWMESEFRVYSSANNCTFEYVSQPFLMDLEGKQGNFKNLREFVFKNIDGYFKIYSKHTPINLVRDLPQGFSALEPLVDLPIGINITRFQTLLALHRSYLTPGDSSSGWTAGAAAYYVGYLQPRTFLLKYNENGTITDAVDCALDPLSETKCTLKSFTVEKGIYQTSNFRVQPTESIVRFPNITNLCPFGEVFNATRFASVYAWNRKRISNCVADYSVLYNSASFSTFKCYGVSPTKLNDLCFTNVYADSFVIRGDEVRQIAPGQTGKIADYNYKLPDDFTGCVIAWNSNNLDSKVGGNYNYLYRLFRKSNLKPFERDISTEIYQAGSTPCNGAEGFNCYFPLQSYGFQPTNGVGYQPYRVVVLSFELLHAPATVCGPKKSTNLVKNKCVNFNFNGLTGTGVLTESNKKFLPFQQFGRDIADTTDAVRDPQTLEILDITPCSFGGVSVITPGTNTSNQVAVLYQDVNCTEVPVAIHADQLTPTWRVYSTGSNVFQTRAGCLIGAEHVNNSYECDIPIGAGICASYQTQTNSPRRARSVASQSIIAYTMSLGAENSVAYSNNSCAIPTNFTISVTTEILPVSMTKTSVDCTMYICGDSTECSNLLLQYGSFCTQLNRALTGIAVEQDKNTQEVFAQVKQIYKTPPIKDFGGFNFSQILPDPSKPSKRSFIEDLLFNKVTLADAGFIKQYGDCLGDIAARDLICAQKFNGLTVLPPLLTDEMIAQYTSALLAGTITSGWTFGAGAALQIPFAMQMAYRFNGIGVTQNVLYENQKLIANQFNSAIGKIQDSLSSTASALGKLQDVVNQNAQALNTLVKQLSSNFGAISSVLNDILSRLDKVEAEVQIDRLITGRLQSLQTYVTQQLIRAAEIRASANLAATKMSECVLGQSKRVDFCGKGYHLMSFPQSAPHGVVFLHVTYVPAQEKNFTCAPAICHDGKAHFPREGVFVSNGTHWFVTQRNFYEPQIITTDNTFVSGNCDVVIGIVNNTVYDPLQPELDSFKEELDKYFKNHTSPDVDLGDISGINASVVNIQKEIDRLNEVAKNLNESLIDLQELGKYEQYIKGGSGYIPEAPRDGQAYVRKDGEWVLLSTFL

SEQ ID NO: 6004 - protein, 1241 aa, Artificial Sequence
  SARS-CoV-2/South Korea/SNU01/2020__EPI_ISL_411929 spike protein (1-1211)(I712C_T1077C) Foldon construct
MFVFLVLLPLVSSQCVNLTTRTQLPPAYTNSFTRGVYYPDKVFRSSVLHSTQDLFLPFFSNVTWFHAIHVSGTNGTKRFDNPVLPFNDGVYFASTEKSNIIRGWIFGTTLDSKTQSLLIVNNATNVVIKVCEFQFCNDPFLGVYYHKNNKSWMESEFRVYSSANNCTFEYVSQPFLMDLEGKQGNFKNLREFVFKNIDGYFKIYSKHTPINLVRDLPQGFWALEPLVDLPIGINITRFQTLLALHRSYLTPGDSSSGWTAGAAAYYVGYLQPRTFLLKYNENGTITDAVDCALDPLSETKCTLKSFTVEKGIYQTSNFRVQPTESIVRFPNITNLCPFGEVFNATRFASVYAWNRKRISNCVADYSVLYNSASFSTFKCYGVSPTKLNDLCFTNVYADSFVIRGDEVRQIAPGQTGKIADYNYKLPDDFTGCVIAWNSNNLDSKVGGNYNYLYRLFRKSNLKPFERDISTEIYQAGSTPCNGVEGFNCYFPLQSYGFQPTNGVGYQPYRVVVLSFELLHAPATVCGPKKSTNLVKNKCVNFNFNGLTGTGVLTESNKKFLPFQQFGRDIADTTDAVRDPQTLEILDITPCSFGGVSVITPGTNTSNQVAVLYQDVNCTEVPVAIHADQLTPTWRVYSTGSNVFQTRAGCLIGAEHVNNSYECDIPIGAGICASYQTQTNSPRRARSVASQSIIAYTMSLGAENSVAYSNNSCAIPTNFTISVTTEILPVSMTKTSVDCTMYICGDSTECSNLLLQYGSFCTQLNRALTGIAVEQDKNTQEVFAQVKQIYKTPPIKDFGGFNFSQILPDPSKPSKRSFIEDLLFNKVTLADAGFIKQYGDCLGDIAARDLICAQKFNGLTVLPPLLTDEMIAQYTSALLAGTITSGWTFGAGAALQIPFAMQMAYRFNGIGVTQNVLYENQKLIANQFNSAIGKIQDSLSSTASALGKLQDVVNQNAQALNTLVKQLSSNFGAISSVLNDILSRLDKVEAEVQIDRLITGRLQSLQTYVTQQLIRAAEIRASANLAATKMSECVLGQSKRVDFCGKGYHLMSFPQSAPHGVVFLHVTYVPAQEKNFTCAPAICHDGKAHFPREGVFVSNGTHWFVTQRNFYEPQIITTDNTFVSGNCDVVIGIVNNTVYDPLQPELDSFKEELDKYFKNHTSPDVDLGDISGINASVVNIQKEIDRLNEVAKNLNESLIDLQELGKYEQYIKGGSGYIPEAPRDGQAYVRKDGEWVLLSTFL

SEQ ID NO: 6005 - protein, 1241 aa, Artificial Sequence
  SARS-CoV-2/China/WF0004/2020__EPI_ISL_413694 spike protein (1-1211)(I712C_T1077C) Foldon construct
MFVFLVLLPLVSSQCVNLTTRTQLPPAYTNSFTRGVYYPDKVFRSSVLHSTQDLFLPFFSNVTWFHAIHVSGTNGTKRFDNPVLPFNDGVYFASTEKSNIIRGWIFGTTLDSKTQSLLIVNNATNVVIKVCEFQFCNDPFLGVYYHKNNKSWTESEFRVYSSANNCTFEYVSQPFLMDLEGKQGNFKNLREFVFKNIDGYFKIYSKHTPINLVRDLPQGFSALEPLVDLPIGINITRFQTLLALHRSYLTPGDSSSGWTAGAAAYYVGYLQPRTFLLKYNENGTITDAVDCALDPLSETKCTLKSFTVEKGIYQTSNFRVQPTESIVRFPNITNLCPFGEVFNATRFASVYAWNRKRISNCVADYSVLYNSASFSTFKCYGVSPTKLNDLCFTNVYADSFVIRGDEVRQIAPGQTGKIADYNYKLPDDFTGCVIAWNSNNLDSKVGGNYNYLYRLFRKSNLKPFERDISTEIYQAGSTPCNGVEGFNCYFPLQSYGFQPTNGVGYQPYRVVVLSFELLHAPATVCGPKKSTNLVKNKCVNFNFNGLTGTGVLTESNKKFLPFQQFGRDIADTTDAVRDPQTLEILDITPCSFGGVSVITPGTNTSNQVAVLYQDVNCTEVPVAIHADQLTPTWRVYSTGSNVFQTRAGCLIGAEHVNNSYECDIPIGAGICASYQTQTNSPRRARSVASQSIIAYTMSLGAENSVAYSNNSCAIPTNFTISVTTEILPVSMTKTSVDCTMYICGDSTECSNLLLQYGSFCTQLNRALTGIAVEQDKNTQEVFAQVKQIYKTPPIKDFGGFNFSQILPDPSKPSKRSFIEDLLFNKVTLADAGFIKQYGDCLGDIAARDLICAQKFNGLTVLPPLLTDEMIAQYTSALLAGTITSGWTFGAGAALQIPFAMQMAYRFNGIGVTQNVLYENQKLIANQFNSAIGKIQDSLSSTASALGKLQDVVNQNAQALNTLVKQLSSNFGAISSVLNDILSRLDKVEAEVQIDRLITGRLQSLQTYVTQQLIRAAEIRASANLAATKMSECVLGQSKRFDFCGKGYHLMSFPQSAPHGVVFLHVTYVPAQEKNFTCAPAICHDGKAHFPREGVFVSNGTHWFVTQRNFYEPQIITTDNTFVSGNCDVVIGIVNNTVYDPLQPELDSFKEELDKYFKNHTSPDVDLGDISGINASVVNIQKEIDRLNEVAKNLNESLIDLQELGKYEQYIKGGSGYIPEAPRDGQAYVRKDGEWVLLSTFL

SEQ ID NO: 6006 - protein, 1241 aa, Artificial Sequence
  SARS-CoV-2/China/WF0028/2020__EPI_ISL_413791 spike protein (1-1211)(I712C_T1077C) Foldon construct
MFVFLVLLPLVSSQCVNLTTRTQLPPAYTNSFTRGVYYPDKVFRSSVLHSTQDLFLPFFSNVTWFHAIHVSGTNGTKRFDNPVLPFNDGVYFASTEKSNIIRGWIFGTTLDSKTQSLLIVNNATNVVIKVCEFQFCNDPFLGVYYHKNNKSWMESEFRVYSSANNCTFEYVSQPFLMDLEGKQGNFKNLREFVFKNIDGYFKIYSKHTPINLVRDLPQGFSALEPLVDLPIGINITRFQTLLALHRSYLTPGDSSSGWTAGAAAYYVGYLQPRTFLLKYNENGTITDAVDCALDPLSETKCTLKSFTVEKGIYQTSNFRVQPTESIVRFPNITNLCPFGEVFNATRFASVYAWNRKRISNCVADYSVLYNSASFSTFKCYGVSPTKLNDLCFTNVYADSFVIRGDEVRQIAPGQTGKIADYNYKLPDDFTGCVIAWNSNNLDSKVGGNYNYLYRLFRKSNLKPFERDISTEIYQAGSTPCNGVEGFNCYFPLQSYGFQPTNGVGYQPYRVVVLSFELLHAPATVCGPKKSTNLVKNKCVNFNFNGLTGTGVLTESNKKFLPFQQFGRDIADTTDAVRDPQTLEILDITPCSFGGVSVITPGTNTSNQVAVLYQDVNCTEVPVAIHADQLTPTWRVYSTGSNVFQTRAGCLIGAEHVNNSYECDIPIGAGICASYQTQTNSPRRARSVASQSIIAYTMSLGAENSVAYSNNSCAIPTNFTISVTTEILPVSMTKTSVDCTMYICGDSTECSNLLLQYGSFCTQLNRALTGIAVEQDKNTQEVFAQVKQIYKTPPIKDFGGFNFSQILPDPSKPSKRSFIEDLLFNKVTLADAGFIKQYGDCLGDIAARDLICAQKFNGLTVLPPLLTDEMIAQYTSALLAGTITSGWTFGAGAALQIPFAMQMAYRFNGIGVTQNVLYENQKLIANQFNSAIGKIQDSLSSTASALGKLQDVVNQNAQALNTLVKQLSSNFGAISSVLNDILSRLDKVEAEVQIDRLITGRLQSLQTYVTQQLIRAAEIRASANLAATKMSECVLGQSKRVDFCGKGYHLMSFPQSAPHGVVFLHVTYVPAQEKNFTCAPAICHDGKAHFPREGVFVSNGTHWFVTQRNFYEPQIITTDNTFVSGNCDVVIGIVNNTVYDPLQPELESFKEELDKYFKNHTSPDVDLGDISGINASVVNIQKEIDRLNEVAKNLNESLIDLQELGKYEQYIKGGSGYIPEAPRDGQAYVRKDGEWVLLSTFL

SEQ ID NO: 6007 - protein, 1241 aa, Artificial Sequence
  SARS-CoV-2/2019-nCoV/USA-CruiseA-18/2020__MT159716.1 spike protein (1-1211)(I712C_T1077C) Foldon construct
MFVFLVLLPLVSSQCVNLTTRTQLPPAYTNSFTRGVYYPDKVFRSSVLHSTQDLFLPFFSNVTWFHAIHVSGTNGTKRFDNPVLPFNDGVYFASTEKSNIIRGWIFGTTLDSKTQSLLIVNNATNVVIKVCEFQFCNDPFLGVYYHKNNKSWMESELRVYSSANNCTFEYVSQPFLMDLEGKQGNFKNLREFVFKNIDGYFKIYSKHTPINLVRDLPQGFSALEPLVDLPIGINITRFQTLLALHRSYLTPGDSSSGWTAGAAAYYVGYLQPRTFLLKYNENGTITDAVDCALDPLSETKCTLKSFTVEKGIYQTSNFRVQPTESIVRFPNITNLCPFGEVFNATRFASVYAWNRKRISNCVADYSVLYNSASFSTFKCYGVSPTKLNDLCFTNVYADSFVIRGDEVRQIAPGQTGKIADYNYKLPDDFTGCVIAWNSNNLDSKVGGNYNYLYRLFRKSNLKPFERDISTEIYQAGSTPCNGVEGFNCYFPLQSYGFQPTNGVGYQPYRVVVLSFELLHAPATVCGPKKSTNLVKNKCVNFNFNGLTGTGVLTESNKKFLPFQQFGRDIADTTDAVRDPQTLEILDITPCSFGGVSVITPGTNTSNQVAVLYQDVNCTEVPVAIHADQLTPTWRVYSTGSNVFQTRAGCLIGAEHVNNSYECDIPIGAGICASYQTQTNSPRRARSVASQSIIAYTMSLGAENSVAYSNNSCAIPTNFTISVTTEILPVSMTKTSVDCTMYICGDSTECSNLLLQYGSFCTQLNRALTGIAVEQDKNTQEVFAQVKQIYKTPPIKDFGGFNFSQILPDPSKPSKRSFIEDLLFNKVTLADAGFIKQYGDCLGDIAARDLICAQKFNGLTVLPPLLTDEMIAQYTSALLAGTITSGWTFGAGAALQIPFAMQMAYRFNGIGVTQNVLYENQKLIANQFNSAIGKIQDSLSSTASALGKLQDVVNQNAQALNTLVKQLSSNFGAISSVLNDILSRLDKVEAEVQIDRLITGRLQSLQTYVTQQLIRAAEIRASANLAATKMSECVLGQSKRVDFCGKGYHLMSFPQSAPHGVVFLHVTYVPAQEKNFTCAPAICHDGKAHFPREGVFVSNGTHWFVTQRNFYEPQIITTDNTFVSGNCDVVIGIVNNTVYDPLQPELDSFKEELDKYFKNHTSPDVDLGDISGINASVVNIQKEIDRLNEVAKNLNESLIDLQELGKYEQYIKGGSGYIPEAPRDGQAYVRKDGEWVLLSTFL

SEQ ID NO: 6008 - protein, 1241 aa, Artificial Sequence
  SARS-CoV-2/SARS-CoV-2/Yunnan-01/human/2020/CHN__MT049951.1 spike protein (1-1211)(I712C_T1077C) Foldon construct
MFVFLVLLPLVSSQCVNLTTRTQLPPANTNSFTRGVYYPDKVFRSSVLHSTQDLFLPFFSNVTWFHAIHVSGTNGTKRFDNPVLPFNDGVYFASTEKSNIIRGWIFGTTLDSKTQSLLIVNNATNVVIKVCEFQFCNDPFLGVYYHKNNKSWMESEFRVYSSANNCTFEYVSQPFLMDLEGKQGNFKNLREFVFKNIDGYFKIYSKHTPINLVRDLPQGFSALEPLVDLPIGINITRFQTLLALHRSYLTPGDSSSGWTAGAAAYYVGYLQPRTFLLKYNENGTITDAVDCALDPLSETKCTLKSFTVEKGIYQTSNFRVQPTESIVRFPNITNLCPFGEVFNATRFASVYAWNRKRISNCVADYSVLYNSASFSTFKCYGVSPTKLNDLCFTNVYADSFVIRGDEVRQIAPGQTGKIADYNYKLPDDFTGCVIAWNSNNLDSKVGGNYNYLYRLFRKSNLKPFERDISTEIYQAGSTPCNGVEGFNCYFPLQSYGFQPTNGVGYQPYRVVVLSFELLHAPATVCGPKKSTNLVKNKCVNFNFNGLTGTGVLTESNKKFLPFQQFGRDIADTTDAVRDPQTLEILDITPCSFGGVSVITPGTNTSNQVAVLYQDVNCTEVPVAIHADQLTPTWRVYSTGSNVFQTRAGCLIGAEHVNNSYECDIPIGAGICASYQTQTNSPRRARSVASQSIIAYTMSLGAENSVAYSNNSCAIPTNFTISVTTEILPVSMTKTSVDCTMYICGDSTECSNLLLQYGSFCTQLNRALTGIAVEQDKNTQEVFAQVKQIYKTPPIKDFGGFNFSQILPDPSKPSKRSFIEDLLFNKVTLADAGFIKQYGDCLGDIAARDLICAQKFNGLTVLPPLLTDEMIAQYTSALLAGTITSGWTFGAGAALQIPFAMQMAYRFNGIGVTQNVLYENQKLIANQFNSAIGKIQDSLSSTASALGKLQDVVNQNAQALNTLVKQLSSNFGAISSVLNDILSRLDKVEAEVQIDRLITGRLQSLQTYVTQQLIRAAEIRASANLAATKMSECVLGQSKRVDFCGKGYHLMSFPQSAPHGVVFLHVTYVPAQEKNFTCAPAICHDGKAHFPREGVFVSNGTHWFVTQRNFYEPQIITTDNTFVSGNCDVVIGIVNNTVYDPLQPELDSFKEELDKYFKNHTSPDVDLGDISGINASVVNIQKEIDRLNEVAKNLNESLIDLQELGKYEQYIKGGSGYIPEAPRDGQAYVRKDGEWVLLSTFL

SEQ ID NO: 6009 - protein, 1241 aa, Artificial Sequence
  SARS-CoV-2/USA/WA-UW292/2020__EPI_ISL_418077 spike protein (1-1211)(I712C_T1077C) Foldon construct
MFVFLVLLPLVSSQCVNLTTRTQLPPAYTNSFTRGVYYPDKVFRSSVLHSTQDLFLPFFSNVTWFHAIHVSGTNGTKRFDNPVLPFNDGVYFASTEKSNIIRGWIFGTTLDSKTQSLLIVNNATNVVIKVCEFQFCNDPFLGVYYHKNNKSWMESEFRVYSSANNCTFEYVSQPFLMDLEGKQGNFKNLREFVFKNIDGYFKIYSKHTPINLVRDLPQGFSALEPLVDLPIGINITRFQTLLALHRSYLTPGDSSSGWTAGAAAYYVGYLQPRTFLLKYNENGTITDAVDCALDPLSETKCTLKSFTVEKGIYQTSNFRVQPTESIVRFPNITNLCPFGEVFNATRFASVYAWNRKRISNCVADYSVLYNSASFSTFKCYGVSPTKLNDLCFTNVYADSFVIRGDEVRQIAPGQTGKIADYNYKLPDDFTGCVIAWNSNNLDSKVGGNYNYLYRLFRKSNLKPFERDISTEIYQASSTPCNGVEGFNCYFPLQSYGFQPTNGVGYQPYRVVVLSFELLHAPATVCGPKKSTNLVKNKCVNFNFNGLTGTGVLTESNKKFLPFQQFGRDIADTTDAVRDPQTLEILDITPCSFGGVSVITPGTNTSNQVAVLYQDVNCTEVPVAIHADQLTPTWRVYSTGSNVFQTRAGCLIGAEHVNNSYECDIPIGAGICASYQTQTNSPRRARSVASQSIIAYTMSLGAENSVAYSNNSCAIPTNFTISVTTEILPVSMTKTSVDCTMYICGDSTECSNLLLQYGSFCTQLNRALTGIAVEQDKNTQEVFAQVKQIYKTPPIKDFGGFNFSQILPDPSKPSKRSFIEDLLFNKVTLADAGFIKQYGDCLGDIAARDLICAQKFNGLTVLPPLLTDEMIAQYTSALLAGTITSGWTFGAGAALQIPFAMQMAYRFNGIGVTQNVLYENQKLIANQFNSAIGKIQDSLSSTASALGKLQDVVNQNAQALNTLVKQLSSNFGAISSVLNDILSRLDKVEAEVQIDRLITGRLQSLQTYVTQQLIRAAEIRASANLAATKMSECVLGQSKRVDFCGKGYHLMSFPQSAPHGVVFLHVTYVPAQEKNFTCAPAICHDGKAHFPREGVFVSNGTHWFVTQRNFYEPQIITTDNTFVSGNCDVVIGIVNNTVYDPLQPELDSFKEELDKYFKNHTSPDVDLGDISGINASVVNIQKEIDRLNEVAKNLNESLIDLQELGKYEQYIKGGSGYIPEAPRDGQAYVRKDGEWVLLSTFL

SEQ ID NO: 6010 - protein, 1241 aa, Artificial Sequence
  SARS-CoV-2/Iceland/192/2020__EPI_ISL_417819 spike protein (1-1211)(I712C_T1077C) Foldon construct
MFVFFVLLPLVSSQCVNLTTRTQLPPAYTNSFTRGVYYPDKVFRSSVLHSTQDLFLPFFSNVTWFHAIHVSGTNGTKRFDNPVLPFNDGVYFASTEKSNIIRGWIFGTTLDSKTQSLLIVNNATNVVIKVCEFQFCNDPFLGVYYHKNNKSWMESEFRVYSSANNCTFEYVSQPFLMDLEGKQGNFKNLREFVFKNIDGYFKIYSKHTPINLVRDLPQGFSALEPLVDLPIGINITRFQTLLALHRSYLTPGDSSSGWTAGAAAYYVGYLQPRTFLLKYNENGTITDAVDCALDPLSETKCTLKSFTVEKGIYQTSNFRVQPTESIVRFPNITNLCPFGEVFNATRFASVYAWNRKRISNCVADYSVLYNSASFSTFKCYGVSPTKLNDLCFTNVYADSFVIRGDEVRQIAPGQTGKIADYNYKLPDDFTGCVIAWNSNNLDSKVGGNYNYLYRLFRKSNLKPFERDISTEIYQAGSTPCNGVEGFNCYFPLQSYGFQPTNGVGYQPYRVVVLSFELLHAPATVCGPKKSTNLVKNKCVNFNFNGLTGTGVLTESNKKFLPFQQFGRDIADTTDAVRDPQTLEILDITPCSFGGVSVITPGTNTSNQVAVLYQGVNCTEVPVAIHADQLTPTWRVYSTGSNVFQTRAGCLIGAEHVNNSYECDIPIGAGICASYQTQTNSPRRARSVASQSIIAYTMSLGAENSVAYSNNSCAIPTNFTISVTTEILPVSMTKTSVDCTMYICGDSTECSNLLLQYGSFCTQLNRALTGIAVEQDKNTQEVFAQVKQIYKTPPIKDFGGFNFSQILPDPSKPSKRSFIEDLLFNKVTLADAGFIKQYGDCLGDIAARDLICAQKFNGLTVLPPLLTDEMIAQYTSALLAGTITSGWTFGAGAALQIPFAMQMAYRFNGIGVTQNVLYENQKLIANQFNSAIGKIQDSLSSTASALGKLQDVVNQNAQALNTLVKQLSSNFGAISSVLNDILSRLDKVEAEVQIDRLITGRLQSLQTYVTQQLIRAAEIRASANLAATKMSECVLGQSKRVDFCGKGYHLMSFPQSAPHGVVFLHVTYVPAQEKNFTCAPAICHDGKAHFPREGVFVSNGTHWFVTQRNFYEPQIITTDNTFVSGNCDVVIGIVNNTVYDPLQPELDSFKEELDKYFKNHTSPDVDLGDISGINASVVNIQKEIDRLNEVAKNLNESLIDLQELGKYEQYIKGGSGYIPEAPRDGQAYVRKDGEWVLLSTFL

SEQ ID NO: 6011 - protein, 1241 aa, Artificial Sequence
  SARS-CoV-2/Belgium/ULG-6939/2020__EPI_ISL_417020 spike protein (1-1211)(I712C_T1077C) Foldon construct
MFVFLVLLPLVSSQCVNLTTRTQLPPAYTNSFTRGVYYPDKVFRSSVLHSTQDLFLPFFSNVTWFHAIHVSGTNGTKRFDNPVLPFNDGVYFASTEKSNIIRGWIFGTTLDSKTQSLLIVNNATNVVIKVCEFQFCNDPFLGVYYHKNNKSWMESEFRVYSSANNCTFEYVSQPFLMDLEGKQGNFKNLREFVFKNIDGYFKIYSKHTPINLVRDLPQGFSALEPLVDLPIGINITRFQTLLALHRSYLTPGDSSSGWTAGAAAYYVGYLQPRTFLLKYNENGTITDAVDCALDPLSETKCTLKSFTVEKGIYQTSNFRVQPTESIVRFPNITNLCPFGEVFNATRFASVYAWNRKRISNCVADYSVLYNSASFSTFKCYGVSPTKLNDLCFTNVYADSFVIRGDEVRQIAPGQTGKIADYNYKLPDDFTGCVIAWNSNNLDSKVGGNYNYLYRLFRKSNLKPFERDISTEIYQAGSTPCNGVEGFNCYFPLQSYGFQPTNGVGYQPYRVVVLSFELLHAPATVCGPKKSTNLVKNKCVNFNFNGLTGTGVLTESNKKFLPFQQFGRDIADTTDAVRDPQTLEILDITPCSFGGVSVITPGTNTSNQVAVLYQGVNCTEVPVAIHADQLTPTWRVYSTGSNVFQTRAGCLIGAEHVNNSYECDIPIGAGICASYQTQTNSPRRARSVASQSIIAYTMSLGAENSVVYSNNSCAIPTNFTISVTTEILPVSMTKTSVDCTMYICGDSTECSNLLLQYGSFCTQLNRALTGIAVEQDKNTQEVFAQVKQIYKTPPIKDFGGFNFSQILPDPSKPSKRSFIEDLLFNKVTLADAGFIKQYGDCLGDIAARDLICAQKFNGLTVLPPLLTDEMIAQYTSALLAGTITSGWTFGAGAALQIPFAMQMAYRFNGIGVTQNVLYENQKLIANQFNSAIGKIQDSLSSTASALGKLQDVVNQNAQALNTLVKQLSSNFGAISSVLNDILSRLDKVEAEVQIDRLITGRLQSLQTYVTQQLIRAAEIRASANLAATKMSECVLGQSKRVDFCGKGYHLMSFPQSAPHGVVFLHVTYVPAQEKNFTCAPAICHDGKAHFPREGVFVSNGTHWFVTQRNFYEPQIITTDNTFVSGNCDVVIGIVNNTVYDPLQPELDSFKEELDKYFKNHTSPDVDLGDISGINASVVNIQKEIDRLNEVAKNLNESLIDLQELGKYEQYIKGGSGYIPEAPRDGQAYVRKDGEWVLLSTFL

SEQ ID NO: 6012 - protein, 1241 aa, Artificial Sequence
  SARS-CoV-2/France/HF2496/2020__EPI_ISL_418231 spike protein (1-1211)(I712C_T1077C) Foldon construct
MFVFLVLLPLVSSQCVNLTTRTQLPPAYTNSFTRGVYYPDKVFRSSVLHSTQDLFLPFFSNVTWFHAIHVSGTNGTKRFDNPVLPFNDGVYFASTEKSNIIRGWIFGTTLDSKTQSLLIVNNATNVVIKVCEFQFCNDPFLGVYYHKNNKSWMESEFRVYSSANNCTFEYVSQPFLMDLEGKQGNFKNLREFVFKNIDGYFKIYSKHTPINLVRDLPQGFSALEPLVDLPIGINITRFQTLLALHRSYLTPGDSSSGWTAGAAAYYVGYLQPRTFLLKYNENGTITDAVDCALDPLSETKCTLKSFTVEKGIYQTSNFRVQPTESIVRFPNITNLCPFGEVFNATRFASVYAWNRKRISNCVADYSVLYNSASFSTFKCYGVSPTKLNDLCFTNVYADSFVIRGDEVRQIAPGQTGKIADYNYKLPDDFTGCVIAWNSNNLDSKVGGNYNYLYRLFRKSNLKPFERDISTEIYQAGSTPCNGVEGFNCYFPLQSYGFQPTNGVGYQPYRVVVLSFELLHAPATVCGPKKSTNLVKNKCVNFNFNGLTGTGVLTESNKKFLPFQQFGRDIADTTDAVRDPQTLEILDITPCSFGGVSVITPGTNTSNQVAVLYQGVNCTEVPVAIHADQLTPTWRVYSTGSNVFQTRAGCLIGAEHVNNSYECDIPIGAGICASYQTQTNSPRRARSVASQSIIAYTMSLGAENSVAYSNNSCAIPTNFTISVTTEILPVSMTKTSVDCTMYICGDSTECSNLLLQYGSFCTQLNRALTGIAVEQDKNTQEVFAQVKQIYKTPPIKDFGGFNFSQILPDPSKPSKRSFIEDLLFNKVTLADAGFIKQYGDCLGDIVARDLICAQKFNGLTVLPPLLTDEMIAQYTSALLAGTITSGWTFGAGAALQIPFAMQMAYRFNGIGVTQNVLYENQKLIANQFNSAIGKIQDSLSSTASALGKLQDVVNQNAQALNTLVKQLSSNFGAISSVLNDILSRLDKVEAEVQIDRLITGRLQSLQTYVTQQLIRAAEIRASANLAATKMSECVLGQSKRVDFCGKGYHLMSFPQSAPHGVVFLHVTYVPAQEKNFTCAPAICHDGKAHFPREGVFVSNGTHWFVTQRNFYEPQIITTDNTFVSGNCDVVIGIVNNTVYDPLQPELDSFKEELDKYFKNHTSPDVDLGDISGINASVVNIQKEIDRLNEVAKNLNESLIDLQELGKYEQYIKGGSGYIPEAPRDGQAYVRKDGEWVLLSTFL

SEQ ID NO: 6013 - protein, 1241 aa, Artificial Sequence
  SARS-CoV-2/USA/WA-UW291/2020__EPI_ISL_418076 spike protein (1-1211)(I712C_T1077C) Foldon construct
MFVFLVLLPLVSSQCVNLTTRTQLPPAYTNSFTRGVYYPDKVFRSSVLHSTQDLFLPFFSNVTWFHAIHVSGTNGTKRFDNPVLPFNDGVYFASTEKSNIIRGWIFGTTLDSKTQSLLIVNNATNVVIKVCEFQFCNDPFLGVYYHKNNKSWMESEFRVYSSANNCTFEYVSQPFLMDLEGKQGNFKNLREFVFKNIDGYFKIYSKHTPINLVRDLPQGFSALEPLVDLPIGINITRFQTLLALHRSYLTPGDSSSGWTAGAAAYYVGYLQPRTFLLKYNENGTITDAVDCALDPLSETKCTLKSFTVEKGIYQTSNFRVQPTESIVRFPNITNLCPFGEVFNATRFASVYAWNRKRISNCVADYSVLYNSASFSTFKCYGVSPTKLNDLCFTNVYADSFVIRGDEVRQIAPGQTGKIADYNYKLPDDFTGCVIAWNSNNLDSKVGGNYNYLYRLFRKSNLKPFERDISTEIYQAGSTPCNGVEGFNCYFPLQSYGFQPTNGVGYQPYRVVVLSFELLHAPATVCGPKKSTNLVKNKCVNFNFNGLTGTGVLTESNKKFLPFQQFGRDIADTTDAVRDPQTLEILDITPCSFGGVSVITPGTNTSNQVAVLYQGVNCTEVPVAIHADQLTPTWRVYSTGSNVFQTRAGCLIGAEHVNNSYECDIPIGAGICASYQTQTNSPRRARSVASQSIIAYTMSLGAENSVAYSNNSCAIPTNFTISVTTEILPVSMTKTSVDCTMYICGDSTECSNLLLQYGSFCTQLNRALTGIAVEQDKNTQEVFAQVKQIYKTPPIKDFGGFNFSQILPDPSKPSKRSFIEDLLFNKVTLADAGFIKQYGDCLGDIAARDLICAQKFNGLTVLPPLLTDEMIAQYTSALLAGTITSGWTFGAGAALQIPFAMQMAYRFNGIGVTQNVLYENQKLIANQFNSAIGKIQYSLSSTASALGKLQDVVNQNAQALNTLVKQLSSNFGAISSVLNDILSRLDKVEAEVQIDRLITGRLQSLQTYVTQQLIRAAEIRASANLAATKMSECVLGQSKRVDFCGKGYHLMSFPQSAPHGVVFLHVTYVPAQEKNFTCAPAICHDGKAHFPREGVFVSNGTHWFVTQRNFYEPQIITTDNTFVSGNCDVVIGIVNNTVYDPLQPELDSFKEELDKYFKNHTSPDVDLGDISGINASVVNIQKEIDRLNEVAKNLNESLIDLQELGKYEQYIKGGSGYIPEAPRDGQAYVRKDGEWVLLSTFL

SEQ ID NO: 6014 - protein, 1241 aa, Artificial Sequence; identical to SEQ ID NO: 5977
  SARS-CoV-2/Portugal/PT0034/2020__EPI_ISL_418019 spike protein (1-1211)(I712C_T1077C) Foldon construct

SEQ ID NO: 6015 - protein, 1241 aa, Artificial Sequence
  SARS-CoV-2/Iceland/202/2020__EPI_ISL_417750 spike protein (1-1211)(I712C_T1077C) Foldon construct
MFVFLVLLPLVSSQCVNLTTRTQLPPAYTNSFTRGVYYPDKVFRSSVLHSTQDLFLPFFSNVTWFHAIHVSGTNGTKRFDNPVLPFNDGVYFASTEKSNIIRGWIFGTTLDSKTQSLLIVNNATNVVIKVCEFQFCNDPFLGVYYHKNNKSWMESEFRVYSSANNCTFEYVSQPFLMDLEGKQGNFKNLREFVFKNIDGYFKIYSKHTPINLVRDLPQGFSALEPLVDLPIGINITRFQTLLALHRSYLTPGDSSSGWTAGAAAYYVGYLQPRTFLLKYNENGTITDAVDCALDPLSETKCTLKSFTVEKGIYQTSNFRVQPTESIVRFPNITNLCPFGEVFNATRFASVYAWNRKRISNCVADYSVLYNSASFSTFKCYGVSPTKLNDLCFTNVYADSFVIRGDEVRQIAPGQTGKIADYNYKLPDDFTGCVIAWNSNNLDSKVGGNYNYLYRLFRKSNLKPFERDISTEIYQAGSTPCNGVEGFNCYFPLQSYGFQPTNGVGYQPYRVVVLSFELLHAPATVCGPKKSTNLVKNKCVNFNFNGLTGTGVLTESNKKFLPFQQFGRDIADTTDAVRDPQTLEILDITPCSFGGVSVITPGTNTSNQVAVLYQDVNCTEVPVAIHADQLTPTWRVYSTGSNVFQTRAGCLIGAEHVNNSYECDIPIGAGICASYQTQTNSPRRARSVASQSIIAYTMSLGAENSVAYSNNSCAIPTNFTISVTTEILPVSMTKTSVDCTMYICGDSTECSNLLLQYGSFCTQLNRALTGIAVEQDKNTQEVFAQVKQIYKTPPIKDFGGFNFSQILPDPSKPSKRSFIEDLLFNKVTLADAGFIKQYGDCLGDIAARDLICAQKFNGLTVLPPLLTDEMIAQYTSALLAGTITSGWTFGAGAALQIPFAMQMAYRFNGIGVTQNVLYENQKLIANQFNSAIGKIQDSLSSTASALGKLQDVVNQNAQALNTLVKQLSSNFGAISSVLNDILSRLDKVEAEVQIDRLITGRLQSLQTYVTQQLIRAAEIRASANLAATKMSECVLGQSKRVDFCGKGYHLMSFPQSAPHGVVFLHVTYVPAQEKNFTCAPAICHDGKAHFPREGVFVSNGTHWFVTQRNFYEPQIITTDNTFVSGNCDVVIGIVNNTVYDPLQPELDSFKEELDKYFKNHTSPDVDLGDIPGINASVVNIQKEIDRLNEVAKNLNESLIDLQELGKYEQYIKGGSGYIPEAPRDGQAYVRKDGEWVLLSTFL

SEQ ID NO: 6016 - protein, 1241 aa, Artificial Sequence
  SARS-CoV-2/USA/WA-UW261/2020__EPI_ISL_418046 spike protein (1-1211)(I712C_T1077C) Foldon construct
MFVFLVLLPLVSSQCVNLTTRTQLPPAYTNSFTRGVYYPDKVFRSSVLHSTQDLFLPFFSNVTWFHAIHVSGTNGTKRFDNPVLPFNDGVYFASTEKSNIIRGWIFGTTLDSKTQSLLIVNNATNVVIKVCEFQFCNDPFLGVYYHKNNKSWMESEFRVYSSANNCTFEYVSQPFLMDLEGKQGNFKNLREFVFKNIDGYFKIYSKHTPINLVRDLPQGFSALEPLVDLPIGINITRFQTLLALHRSYLTPGDSSSGWTAGAAAYYVGYLQPRTFLLKYNENGTITDAVDCALDPLSETKCTLKSFTVEKGIYQTSNFRVQPTESIVRFPNITNLCPFGEVFNATRFTSVYAWNRKRISNCVADYSVLYNSASFSTFKCYGVSPTKLNDLCFTNVYADSFVIRGDEVRQIAPGQTGKIADYNYKLPDDFTGCVIAWNSNNLDSKVGGNYNYLYRLFRKSNLKPFERDISTEIYQAGSTPCNGVEGFNCYFPLQSYGFQPTNGVGYQPYRVVVLSFELLHAPATVCGPKKSTNLVKNKCVNFNFNGLTGTGVLTESNKKFLPFQQFGRDIADTTDAVRDPQTLEILDITPCSFGGVSVITPGTNTSNQVAVLYQDVNCTEVPVAIHADQLTPTWRVYSTGSNVFQTRAGCLIGAEHVNNSYECDIPIGAGICASYQTQTNSPRRARSVASQSIIAYTMSLGAENSVAYSNNSCAIPTNFTISVTTEILPVSMTKTSVDCTMYICGDSTECSNLLLQYGSFCTQLNRALTGIAVEQDKNTQEVFAQVKQIYKTPPIKDFGGFNFSQILPDPSKPSKRSFIEDLLFNKVTLADAGFIKQYGDCLGDIAARDLICAQKFNGLTVLPPLLTDEMIAQYTSALLAGTITSGWTFGAGAALQIPFAMQMAYRFNGIGVTQNVLYENQKLIANQFNSAIGKIQDSLSSTASALGKLQDVVNQNAQALNTLVKQLSSNFGAISSVLNDILSRLDKVEAEVQIDRLITGRLQSLQTYVTQQLIRAAEIRASANLAATKMSECVLGQSKRVDFCGKGYHLMSFPQSAPHGVVFLHVTYVPAQEKNFTCAPAICHDGKAHFPREGVFVSNGTHWFVTQRNFYEPQIITTDNTFVSGNCDVVIGIVNNTVYDPLQPELDSFKEELDKYFKNHTSPDVDLGDISGINASVVNIQKEIDRLNEVAKNLNESLIDLQELGKYEQYIKGGSGYIPEAPRDGQAYVRKDGEWVLLSTFL

SEQ ID NO: 6017 - protein, 1241 aa, Artificial Sequence
  SARS-CoV-2/Portugal/PT0035/2020__EPI_ISL_418020 spike protein (1-1211)(I712C_T1077C) Foldon construct
MFVFLVLLPLVSSQCVNLTTRTQLPPAYTNSFTRGVYYPDKVFRSSVLHSTQDLFLPFFSNVTWFHAIHVSGTNGTKRFDNPVLPFNDGVYFASTEKSNIIRGWIFGTTLDSKTQSLLIVNNATNVVIKVCEFQFCNDPFLGVYYHKNNKSWMESEFRVYSSANNCTFEYVSQPFLMDLEGKQGNFKNLREFVFKNIDGYFKIYSKHTPINLVRDLPQGFSALEPLVDLPIGINITRFQTLLALHRSYLTPGDSSSGWTAGAAAYYVGYLQPRTFLLKYNENGTITDAVDCALDPLSETKCTLKSFTVEKGIYQTSNFRVQPTESIVRFPNITNLCPFGEVFNATRFASVYAWNRKRISNCVADYSVLYNSASFSTFKCYGVSPTKLNDLCFTNVYADSFVIRGDEVRQIAPGQTGKIADYNYKLPDDFTGCVIAWNSNNLDSKVGGNYNYLYRLFRKSNLKPFERDISTEIYQAGSTPCNGVEGFNCYFPLQSYGFQPTNGVGYQPYRVVVLSFELLHAPATVCGPKKSTNLVKNKCVNFNFNGLTGTGVLTESNKKFLPFQQFGRDIADTTDAVRDPQTLEILDITPCSFGGVSVITPGTNTSNQVAVLYQDVNCTEVPVAIHADQLTPTWRVYSTGSNVFQTRAGCLIGAEHVNNSYECDIPIGAGICASYQTQTNSPRRARSVASQSIIAYTMSLGAENSVAYSNNSCAIPTNFTISVTTEILPVSMTKTSVDCTMYICGDSTECSNLLLQYGSFCTQLNRALTGIAVEQDKNTQEVFAQVKQIYKTPPIKDFGGFNFSQILPDPSKPSKRSFIEDLLFNKVTLADAGFIKQYGDCLGDISARDLICAQKFNGLTVLPPLLTDEMIAQYTSALLAGTITSGWTFGAGAALQIPFAMQMAYRFNGIGVTQNVLYENQKLIANQFNSAIGKIQDSLSSTASALGKLQDVVNQNAQALNTLVKQLSSNFGAISSVLNDILSRLDKVEAEVQIDRLITGRLQSLQTYVTQQLIRAAEIRASANLAATKMSECVLGQSKRVDFCGKGYHLMSFPQSAPHGVVFLHVTYVPAQEKNFTCAPAICHDGKAHFPREGVFVSNGTHWFVTQRNFYEPQIITTDNTFVSGNCDVVIGIVNNTVYDPLQPELDSFKEELDKYFKNHTSPDVDLGDISGINASVVNIQKEIDRLNEVAKNLNESLIDLQELGKYEQYIKGGSGYIPEAPRDGQAYVRKDGEWVLLSTFL

SEQ ID NO: 6018 - protein, 1241 aa, Artificial Sequence
  SARS-CoV-2/USA/NY-NYUMC7/2020__EPI_ISL_418192 spike protein (1-1211)(I712C_T1077C) Foldon construct
MFVFLVLLPLVSSQCVNLTTRTQLPPAYTNSFTRGVYYPDKVFRSSVLHSTQDLFLPFFSNVTWFHAIHVSGTNGTKRFDNPVLPFNDGVYFASTEKSNIIRGWIFGTTLDSKTQSLLIVNNATNVVIKVCEFQFCNDPFLGVYHHKNNKSWMESEFRVYSSANNCTFEYVSQPFLMDLEGKQGNFKNLREFVFKNIDGYFKIYSKHTPINLVRDLPQGFSALEPLVDLPIGINITRFQTLLALHRSYLTPGDSSSGWTAGAAAYYVGYLQPRTFLLKYNENGTITDAVDCALDPLSETKCTLKSFTVEKGIYQTSNFRVQPTESIVRFPNITNLCPFGEVFNATRFASVYAWNRKRISNCVADYSVLYNSASFSTFKCYGVSPTKLNDLCFTNVYADSFVIRGDEVRQIAPGQTGKIADYNYKLPDDFTGCVIAWNSNNLDSKVGGNYNYLYRLFRKSNLKPFERDISTEIYQAGSTPCNGVEGFNCYFPLQSYGFQPTNGVGYQPYRVVVLSFELLHAPATVCGPKKSTNLVKNKCVNFNFNGLTGTGVLTESNKKFLPFQQFGRDIADTTDAVRDPQTLEILDITPCSFGGVSVITPGTNTSNQVAVLYQGVNCTEVPVAIHADQLTPTWRVYSTGSNVFQTRAGCLIGAEHVNNSYECDIPIGAGICASYQTQTNSPRRARSVASQSIIAYTMSLGAENSVAYSNNSCAIPTNFTISVTTEILPVSMTKTSVDCTMYICGDSTECSNLLLQYGSFCTQLNRALTGIAVEQDKNTQEVFAQVKQIYKTPPIKDFGGFNFSQILPDPSKPSKRSFIEDLLFNKVTLADAGFIKQYGDCLGDIAARDLICAQKFNGLTVLPPLLTDEMIAQYTSALLAGTITSGWTFGAGAALQIPFAMQMAYRFNGIGVTQNVLYENQKLIANQFNSAIGKIQDSLSSTASALGKLQDVVNQNAQALNTLVKQLSSNFGAISSVLNDILSRLDKVEAEVQIDRLITGRLQSLQTYVTQQLIRAAEIRASANLAATKMSECVLGQSKRVDFCGKGYHLMSFPQSAPHGVVFLHVTYVPAQEKNFTCAPAICHDGKAHFPREGVFVSNGTHWFVTQRNFYEPQIITTDNTFVSGNCDVVIGIVNNTVYDPLQPELDSFKEELDKYFKNHTSPDVDLGDISGINASVVNIQKEIDRLNEVAKNLNESLIDLQELGKYEQYIKGGSGYIPEAPRDGQAYVRKDGEWVLLSTFL

SEQ ID NO: 6019 - protein, 1241 aa, Artificial Sequence
  SARS-CoV-2/Iceland/189/2020__EPI_ISL_417709 spike protein (1-1211)(I712C_T1077C) Foldon construct
MFVFLVLLPLVSSQCVNLTTRTQLPPAYTNSFTRGVYYPDKVFRSSVLHSTQDLFLPFFSNVTWFHAIHVSGTNGTKRFDNPVLPFNDGVYFASTEKSNIIRGWIFGTTLDSKTQSLLIVNNATNVVIKVCEFQFCNDPFLGVYYHKNNKSWMESEFRVYSSANNCTFEYVSQPFLMDLEGKQGNFKNLREFVFKNIDGYFKIYSKHTPINLVRDLPQGFSALEPLVDLPIGINITRFQTLLALHRSYLTPGDSSSGWTAGAAAYYVGYLQPRTFLLKYNENGTITDAVDCALDPLSETKCTLKSFTVEKGIYQTSNFRVQPTESIVRFPNITNLCPFGEVFNATRFASVYAWNRKRISNCVADYSVLYNSASFSTFKCYGVSPTKLNDLCFTNVYADSFVIRGDEVRQIAPGQTGKIADYNYKLPDDFTGCVIAWNSNNLDSKVGGNYNYLYRLFRKSNLKPFERDISTEIYQAGSTPCNGVEGFNCYFPLQSYGFQPTNGVGYQPYRVVVLSFELLHAPATVCGPKKSTNLVKNKCVNFNFNGLTGTGVLTESNKKFLPFQQFGRDIADTTDAVRDPQTLEILDITPCSFGGVSVITPGTNTSNQVAVLYQGVNCTEVPVAIHADQLTPTWRVYSTGSNVFQTRAGCLIGAEHVNNSYECDIPIGAGICASYQTQTNSPRRARSVASQSIIAYTMSLGAENSVAYSNNSCAIPTNFTISVTTEILPVSMTKTSVDCTMYICGDSTECSNLLLQYGSFCTQLNRALTGIAVEQDKNTQEVFAQVKQIYKTPPIKDFGGFNFSQILPDPSKPSKRSFIEDLLFNKVTLADAGFTKQYGDCLGDIAARDLICAQKFNGLTVLPPLLTDEMIAQYTSALLAGTITSGWTFGAGAALQIPFAMQMAYRFNGIGVTQNVLYENQKLIANQFNSAIGKIQDSLSSTASALGKLQDVVNQNAQALNTLVKQLSSNFGAISSVLNDILSRLDKVEAEVQIDRLITGRLQSLQTYVTQQLIRAAEIRASANLAATKMSECVLGQSKRVDFCGKGYHLMSFPQSAPHGVVFLHVTYVPAQEKNFTCAPAICHDGKAHFPREGVFVSNGTHWFVTQRNFYEPQIITTDNTFVSGNCDVVIGIVNNTVYDPLQPELDSFKEELDKYFKNHTSPDVDLGDISGINASVVNIQKEIDRLNEVAKNLNESLIDLQELGKYEQYIKGGSGYIPEAPRDGQAYVRKDGEWVLLSTFL

SEQ ID NO: 6020 - protein, 1241 aa, Artificial Sequence
  SARS-CoV-2/Australia/NSW56/2020__EPI_ISL_417408 spike protein (1-1211)(I712C_T1077C) Foldon construct
MFVFLVLLPLVSSQCVNLTTRTQLPPAYTNSFTRGVYYPDKVFRSSVLHSTQDLFLPFFSNVTWFHAIHVSGTNGTKRFDNPVLPFNDGVYFASTEKSNIIRGWIFGTTLDSKTQSLLIVNNATNVVIKVCEFQFCNDPFLGVYYHKNNKSWMESEFRVYSSANNCTFEYVSQPFLMDLEGKQGNFKNLREFVFKNIDGYFKIYSKHTPINLVRDLPQGFSALEPLVDLPIGINITRFQTLLALHRSYLTPGDSSSGWTAGAAAYYVGYLQPRTFLLKYNENGTITDAVDCALDPLSETKCTLKSFTVEKGIYQTSNFRVQPTESIVRFPNITNLCPFGEVFNATRFASVYAWNRKRISNCVADYSVLYNSASFSTFKCYGVSPTKLNDLCFTNVYADSFVIRGDEVRQIAPGQTGKIADYNYKLPDDFTGCVIAWNSNNLDSKVGGNYNYLYRLFRKSNLKPFERDISTEIYQAGSTPCNGVEGFNCYFPLQSYGFQPTNGVGYQPYRVVVLSFELLHAPATVCGPKKSTNLVKNKCVNFNFNGLTGTGVLTESNKKFLPFQQFGRDIADTTDAVRDPQTLEILDITPCSFGGVSVITPGTNTSNQVAVLYQDVNCTEVPVAIHADQLTPTWRVYSTGSNVFQTRAGCLIGAEHVNNSYECDIPIGAGICASYQTQTNSPRRARSVASQSIIAYTMSLGAENSVAYSNNSCAIPTNFTISVTTEILPVSMTKTSVDCTMYICGDSTECSNLLLQYGSFCTQLNRALTGIAVEQDKNTQEVFAQVKQIYKTPPIKDFGGFNFSQILPDSSKPSKRSFIEDLLFNKVTLADAGFIKQYGDCLGDIAARDLICAQKFNGLTVLPPLLTDEMIAQYTSALLAGTITSGWTFGAGAALQIPFAMQMAYRFNGIGVTQNVLYENQKLIANQFNSAIGKIQDSLSSTASALGKLQDVVNQNAQALNTLVKQLSSNFGAISSVLNDILSRLDKVEAEVQIDRLITGRLQSLQTYVTQQLIRAAEIRASANLAATKMSECVLGQSKRVDFCGKGYHLMSFPQSAPHGVVFLHVTYVPAQEKNFTCAPAICHDGKAHFPREGVFVSNGTHWFVTQRNFYEPQIITTDNTFVSGNCDVVIGIVNNTVYDPLQPELDSFKEELDKYFKNHTSPDVDLGDISGINASVVNIQKEIDRLNEVAKNLNESLIDLQELGKYEQYIKGGSGYIPEAPRDGQAYVRKDGEWVLLSTFL

SEQ ID NO: 6021 - protein, 1241 aa, Artificial Sequence
  SARS-CoV-2/Iceland/280/2020__EPI_ISL_417608 spike protein (1-1211)(I712C_T1077C) Foldon construct
MFVFLVLLPLVSSQCVNLTTRTQLPPAYTNSFTRGVYYPDKVFRSSVLHSTQDLFLPFFSNVTWFHAIHVSGTNGTKRFDNPVLPFNDGVYFASTEKSNIIRGWIFGTTLDSKTQSLLIVNNATNVVIKVCEFQFCNDPFLGVYYHKNNKSWMESEFRVYSSANNCTFEYVSQPFLMDLEGKQGNFKNLREFVFKNIDGYFKIYSKHTPINLVRDLPQGFSALEPLVDLPIGINITRFQTLLALHRSYLTPGDSSSGWTAGAAAYYVGYLQPRTFLLKYNENGTITDAVDCALDPLSETKCTLKSFTVEKGIYQTSNFRVQPTESIVRFPNITNLCPFGEVFNATRFASVYAWNRKRISNCVADYSVLYNSASFSTFKCYGVSPTKLNDLCFTNVYADSFVIRGDEVRQIAPGQTGKIADYNYKLPDDFTGCVIAWNSNNLDSKVGGNYNYLYRLFRKSNLKPFERDISTEIYQAGSTPCNGVEGFNCYFPLQSYGFQPTNGVGYQPYRVVVLSFELLHAPATVCGPKKSTNLVKNKCVNFNFNGLTGTGVLTESNKKFLPFQQFGRDIADTTDAVRDPQTLEILDITPCSFGGVSVITPGTNTSNQVAVLYQGVNCTEVPVAIHADQLTPTWRVYSTGSNVFQTRAGCLIGAEHVNNSYECDIPIGAGICASYHTQTNSPRRARSVASQSIIAYTMSLGAENSVAYSNNSCAIPTNFTISVTTEILPVSMTKTSVDCTMYICGDSTECSNLLLQYGSFCTQLNRALTGIAVEQDKNTQEVFAQVKQIYKTPPIKDFGGFNFSQILPDPSKPSKRSFIEDLLFNKVTLADAGFIKQYGDCLGDIAARDLICAQKFNGLTVLPPLLTDEMIAQYTSALLAGTITSGWTFGAGAALQIPFAMQMAYRFNGIGVTQNVLYENQKLIANQFNSAIGKIQDSLSSTASALGKLQDVVNQNAQALNTLVKQLSSNFGAISSVLNDILSRLDKVEAEVQIDRLITGRLQSLQTYVTQQLIRAAEIRASANLAATKMSECVLGQSKRVDFCGKGYHLMSFPQSAPHGVVFLHVTYVPAQEKNFTCAPAICHDGKAHFPREGVFVSNGTHWFVTQRNFYEPQIITTDNTFVSGNCDVVIGIVNNTVYDPLQPELDSFKEELDKYFKNHTSPDVDLGDISGINASVVNIQKEIDRLNEVAKNLNESLIDLQELGKYEQYIKGGSGYIPEAPRDGQAYVRKDGEWVLLSTFL

SEQ ID NO: 6022 - protein, 1241 aa, Artificial Sequence; identical to SEQ ID NO: 5977
  SARS-CoV-2/Iceland/247/2020__EPI_ISL_417575 spike protein (1-1211)(I712C_T1077C) Foldon construct

SEQ ID NO: 6023 - protein, 1241 aa, Artificial Sequence
  SARS-CoV-2/Iceland/238/2020__EPI_ISL_417566 spike protein (1-1211)(I712C_T1077C) Foldon construct
MFVFLVLLPLVSSQCVNLTTRTQLPPAYTNSFTRGVYYPDKVFRSSVLHSTQDLFLPFFSNVTWFHAIHVSGTNGTKRFDNPVLPFNDGVYFASTEKSNIIRGWIFGTTLDSKTQSLLIVNNATNVVIKVCEFQFCNDPFLGVYYHKNNKSWMESEFRVYSSANNCTFEYVSQPFLMDLEGKQGNFKNLREFVFKNIDGYFKIYSKHTPINLVRDLPQGFSALEPLVDLPIGINITRFQTLLALHRSYLTPGDSSSGWTAGAAAYYVGYLQPRTFLLKYNENGTITDAVDCALDPLSETKCTLKSFTVEKGIYQTSNFRVQPTESIVRFPNITNLCPFGEVFNATRFASVYAWNRKRISNCVADYSVLYNSASFSTFKCYGVSPTKLNDLCFTNVYADSFVIRGDEVRQIAPGQTGKIADYNYKLPDDFTGCVIAWNSNNLDSKVGGNYNYLYRLFRKSNLKPFERDISTEIYQAGSTPCNGVEGFNCYFPLQSYGFQPTNGVGYQPYRVVVLSFELLHAPATVCGPKKSTNLVKNKCVNFNFNGLTGTGVLTESNKKFLPFQQFGRDIADTTDAVRDPQTLEILDITPCSFGGVSVITPGTNTSNQVAVLYQGVNCTEVPVAIHADQLTPTWRVYSTGSNVFQTRAGCLIGAEHVNNSYECDIPIGAGICASYQTQTNSPRRARSVASQSIIAYTMSLGAENSVAYSNNSCAIPTNFTISVTTEILPVSMTKTSVDCTMYICGDSTECSNLLLQYGSFCTQLNRALTGIAVEQDKNTQEVFAQVKQIYKTPPIKDFGGFNFSQILPDPSKPSKRSFIEDLLFNKVTLADVGFIKQYGDCLGDIAARDLICAQKFNGLTVLPPLLTDEMIAQYTSALLAGTITSGWTFGAGAALQIPFAMQMAYRFNGIGVTQNVLYENQKLIANQFNSAIGKIQDSLSSTASALGKLQDVVNQNAQALNTLVKQLSSNFGAISSVLNDILSRLDKVEAEVQIDRLITGRLQSLQTYVTQQLIRAAEIRASANLAATKMSECVLGQSKRVDFCGKGYHLMSFPQSAPHGVVFLHVTYVPAQEKNFTCAPAICHDGKAHFPREGVFVSNGTHWFVTQRNFYEPQIITTDNTFVSGNCDVVIGIVNNTVYDPLQPELDSFKEELDKYFKNHTSPDVDLGDISGINASVVNIQKEIDRLNEVAKNLNESLIDLQELGKYEQYIKGGSGYIPEAPRDGQAYVRKDGEWVLLSTFL

SEQ ID NO: 6024 - protein, 1241 aa, Artificial Sequence
  SARS-CoV-2/Greece/16/2020__EPI_ISL_418265 spike protein (1-1211)(I712C_T1077C) Foldon construct
MFVFLVLLPLVSSQCVNLTTRTQLPPAYTNSFTRGVYYPDKVFRSSVLHSTQDLFLPFFSNVTWFHAIHVSGTNGTKRFDNPVLPFNDGVYFASTEKSNIIRGWIFGTTLDSKTQSLLIVNNATNVVIKVCEFQFCNDPFLGVYYHKNNKSWMESEFRVYSSANNCTFEYVSQPFLMDLEGKQGNFKNLREFVFKNVDGYFKIYSKHTPINLVRDLPQGFSALEPLVDLPIGINITRFQTLLALHRSYLTPGDSSSGWTAGAAAYYVGYLQPRTFLLKYNENGTITDAVDCALDPLSETKCTLKSFTVEKGIYQTSNFRVQPTESIVRFPNITNLCPFGEVFNATRFASVYAWNRKRISNCVADYSVLYNSASFSTFKCYGVSPTKLNDLCFTNVYADSFVIRGDEVRQIAPGQTGKIADYNYKLPDDFTGCVIAWNSNNLDSKVGGNYNYLYRLFRKSNLKPFERDISTEIYQAGSTPCNGVEGFNCYFPLQSYGFQPTNGVGYQPYRVVVLSFELLHAPATVCGPKKSTNLVKNKCVNFNFNGLTGTGVLTESNKKFLPFQQFGRDIADTTDAVRDPQTLEILDITPCSFGGVSVITPGTNTSNQVAVLYQDVNCTEVPVAIHADQLTPTWRVYSTGSNVFQTRAGCLIGAEHVNNSYECDIPIGAGICASYQTQTNSPRRARSVASQSIIAYTMSLGAENSVAYSNNSCAIPTNFTISVTTEILPVSMTKTSVDCTMYICGDSTECSNLLLQYGSFCTQLNRALTGIAVEQDKNTQEVFAQVKQIYKTPPIKDFGGFNFSQILPDPSKPSKRSFIEDLLFNKVTLADAGFIKQYGDCLGDIAARDLICAQKFNGLTVLPPLLTDEMIAQYTSALLAGTITSGWTFGAGAALQIPFAMQMAYRFNGIGVTQNVLYENQKLIANQFNSAIGKIQDSLSSTASALGKLQDVVNQNAQALNTLVKQLSSNFGAISSVLNDILSRLDKVEAEVQIDRLITGRLQSLQTYVTQQLIRAAEIRASANLAATKMSECVLGQSKRVDFCGKGYHLMSFPQSAPHGVVFLHVTYVPAQEKNFTCAPAICHDGKAHFPREGVFVSNGTHWFVTQRNFYEPQIITTDNTFVSGNCDVVIGIVNNTVYDPLQPELDSFKEELDKYFKNHTSPDVDLGDISGINASVVNIQKEIDRLNEVAKNLNESLIDLQELGKYEQYIKGGSGYIPEAPRDGQAYVRKDGEWVLLSTFL

SEQ ID NO: 6025 - protein, 1241 aa, Artificial Sequence
  SARS-CoV-2/Iceland/319/2020__EPI_ISL_417648 spike protein (1-1211)(I712C_T1077C) Foldon construct
MFVFLVLLPLVSSQCVNLTTRTQLPPAYTNSFTRGVYYPDKVFRSSVLHSTQDLFLPFFSNVTWFHAIHVSGTNGTKRFDNPVLPFNDGVYFASTEKSNIIRGWIFGTTLDSKTQSLLIVNNATNVVIKVCEFQFCNDPFLGVYYHKNNKSWMESEFRVYSSANNCTFEYVSQPFLIDLEGKQGNFKNLREFVFKNIDGYFKIYSKHTPINLVRDLPQGFSALEPLVDLPIGINITRFQTLLALHRSYLTPGDSSSGWTAGAAAYYVGYLQPRTFLLKYNENGTITDAVDCALDPLSETKCTLKSFTVEKGIYQTSNFRVQPTESIVRFPNITNLCPFGEVFNATRFASVYAWNRKRISNCVADYSVLYNSASFSTFKCYGVSPTKLNDLCFTNVYADSFVIRGDEVRQIAPGQTGKIADYNYKLPDDFTGCVIAWNSNNLDSKVGGNYNYLYRLFRKSNLKPFERDISTEIYQAGSTPCNGVEGFNCYFPLQSYGFQPTNGVGYQPYRVVVLSFELLHAPATVCGPKKSTNLVKNKCVNFNFNGLTGTGVLTESNKKFLPFQQFGRDIADTTDAVRDPQTLEILDITPCSFGGVSVITPGTNTSNQVAVLYQGVNCTEVPVAIHADQLTPTWRVYSTGSNVFQTRAGCLIGAEHVNNSYECDIPIGAGICASYQTQTNSPRRARSVASQSIIAYTMSLGAENSVAYSNNSCAIPTNFTISVTTEILPVSMTKTSVDCTMYICGDSTECSNLLLQYGSFCTQLNRALTGIAVEQDKNTQEVFAQVKQIYKTPPIKDFGGFNFSQILPDPSKPSKRSFIEDLLFNKVTLADAGFIKQYGDCLGDIAARDLICAQKFNGLTVLPPLLTDEMIAQYTSALLAGTITSGWTFGAGAALQIPFAMQMAYRFNGIGVTQNVLYENQKLIANQFNSAIGKIQDSLSSTASALGKLQDVVNQNAQALNTLVKQLSSNFGAISSVLNDILSRLDKVEAEVQIDRLITGRLQSLQTYVTQQLIRAAEIRASANLAATKMSECVLGQSKRVDFCGKGYHLMSFPQSAPHGVVFLHVTYVPAQEKNFTCAPAICHDGKAHFPREGVFVSNGTHWFVTQRNFYEPQIITTDNTFVSGNCDVVIGIVNNTVYDPLQPELDSFKEELDKYFKNHTSPDVDLGDISGINASVVNIQKEIDRLNEVAKNLNESLIDLQELGKYEQYIKGGSGYIPEAPRDGQAYVRKDGEWVLLSTFL

SEQ ID NO: 6026 - protein, 1241 aa, Artificial Sequence
  SARS-CoV-2/Congo/94/2020__EPI_ISL_417947 spike protein (1-1211)(I712C_T1077C) Foldon construct
MFVFLVLLPLVSSQCVNLTTRTQLPPAYTNSFTRGVYYPDKVFRSSVLHSTQDLFLPFFSNVTWFHAIHVSGTNGTKRFDNPVLPFNDGVYFASTEKSNIIRGWIFGTTLDSKTQSLLIVNNATNVVIKVCEFQFCNDPFLGVYYHKNNKSWMESEFRVYSSANNCTFEYVSQPFLMDLEGKQGNFKNLREFVFKNIDGYFKIYSKHTPINLVRDLPQGFSALEPLVDLPIGINITRFQTLLALHRSYLTPGDSSSGWTAGAAAYYVGYLQPRTFLLKYNENGTITDAVDCALDPLSETKCTLKSFTVEKGIYQTSNFRVQPTESIVRFPNITNLCPFGEVFNATRFASVYAWNRKRISNCVADYSVLYNSASFSTFKCYGVSPTKLNDLCFTNVYADSFVIRGDEVRQIAPGQTGKIADYNYKLPDDFTGCVIAWNSNNLDSKVGGNYNYLYRLFRKSNLKPFERDISTEIYQAGSTPCNGVEGFNCYFPLQSYGFQPTNGVGYQPYRVVVLSFELLHAPATVCGPKKSTNLVKNKCVNFNFNGLTGTGVLTESNKKFLPFQQFGRDIADTTDAVRDPQTLEILDITPCSFGGVSVITPGTNTSNQVAVLYQGVNCTEVPVAIHADQLTPTWRVYSTGSNVFQTRAGCLIGAEHVNNSYECDIPIGAGICASYQTQTNSPRRARSVASQSIIAYTMSLGAENSVAYSNNSCAIPTNFTISVTTEILPVSMTKTSVDCTMYICGDSTECSNLLLQYGSFCTQLNRALTGIAVEQDKNTQEVFAQVKQIYKTPPIKDFGGFNFSQILPDPSKPSKRSFIEDILFNKVTLADAGFIKQYGDCLGDIAARDLICAQKFNGLTVLPPLLTDEMIAQYTSALLAGTITSGWTFGAGAALQIPFAMQMAYRFNGIGVTQNVLYENQKLIANQFNSAIGKIQDSLSSTASALGKLQDVVNQNAQALNTLVKQLSSNFGAISSVLNDILSRLDKVEAEVQIDRLITGRLQSLQTYVTQQLIRAAEIRASANLAATKMSECVLGQSKRVDFCGKGYHLMSFPQSAPHGVVFLHVTYVPAQEKNFTCAPAICHDGKAHFPREGVFVSNGTHWFVTQRNFYEPQIITTDNTFVSGNCDVVIGIVNNTVYDPLQPELDSFKEELDKYFKNHTSPDVDLGDISGINASVVNIQKEIDRLNEVAKNLNESLIDLQELGKYEQYIKGGSGYIPEAPRDGQAYVRKDGEWVLLSTFL

SEQ ID NO: 6027 - protein, 1241 aa, Artificial Sequence
  SARS-CoV-2/Congo/158/2020__EPI_ISL_417950 spike protein (1-1211)(I712C_T1077C) Foldon construct
MFVFLVLLPLVSSQCVNLTTRTQLPPAYTNSFTRGVYYPDKVFRSSVLHSTQDLFLPFFSNVTWFHAIHVSGTNGTKRFDNPVLPFNDGVYFASTEKSNIIRGWIFGTTLDSKTQSLLIVNNATNVVIKVCEFQFCNDPFLGVYYHKNNKSWMESEFRVYSSANNCTFEYVSQPFLMDLEGKQGNFKNLREFVFKNIDGYFKIYSKHTPINLVRDLPQGFSALEPLVDLPIGINITRFQTLLALHRSYLTPGDSSSGWTAGAAAYYVGYLQPRTFLLKYNENGTITDAVDCALDPLSETKCTLKSFTVEKGIYQTSNFRVQPTESIVRFPNITNLCPFGEVFNATRFASVYAWNRKRISNCVADYSVLYNSASFSTFKCYGVSPTKLNDLCFTNVYADSFVIRGDEVRQIAPGQTGKIADYNYKLPDDFTGCVIAWNSNNLDSKVGGNYNYLYRLFRKSNLKPFERDISTEIYQAGSTPCNGVEGFNCYFPLQSYGFQPTNGVGYQPYRVVVLSFELLHAPATVCGPKKSTNLVKNKCVNFNFNGLTGTGVLTESNKKFLPFQQFGRDIADTTDAVRDPQTLEILDITPCSFGGVSVITPGTNTSNQVAVLYQDVNCTEVPVAIHADQLTPTWRVYSTGSNVFQTRAGCLIGAEHVNNSYECDIPIGAGICASYQTQTNSPRRARSVASQSIIAYTMSLGAENSVAYSNNSCAIPTNFTISVTTEILPVSMTKTSVDCTMYICGDSTECSNLLLQYGSFCTQLNRALTGIAVEQDKNTQEVFAQVKQIYKTPPIKDFGGFNFSQILPDPSKPSKRSFIEDLLFNKVTLADAGFIKQYGDCLGDIAARDLICAQKFNGLTVLPPLLTDEMIAQYTSALLAGTITSGWTFGAGAALQIPFAMQMAYRFNGIGVTQNVLYENQKLIANQFNSAIGKIQDSLSSTASALGKLQDVVNQNAQALNTLVKQLSSNFGAISSVLNDILSRLDKVEAEVQIDRLITGRLQSLQTYVTQQLIRAAEIRASANLAATKMSECVLGQSKRVDFCGKGYHLMSFPQSAPHGVVFLHVTYVPAQEKNFTCAPAICHDGKAHFPREGVFVSNGTHWFVTQRNFYEPQIITTDNTFLSGNCDVVIGIVNNTVYDPLQPELDSFKEELDKYFKNHTSPDVDLGDISGINASVVNIQKEIDRLNEVAKNLNESLIDLQELGKYEQYIKGGSGYIPEAPRDGQAYVRKDGEWVLLSTFL

SEQ ID NO: 6028 - protein, 1241 aa, Artificial Sequence
  SARS-CoV-2/USA/UT-00034/2020__EPI_ISL_417977 spike protein (1-1211)(I712C_T1077C) Foldon construct
MFVFLVLLPLVSSQCVNLTTRTQLPPAYTNSFTRGVYYPDKVFRSSVLHSTQDLFLPFFSNVTWFHAIHVSGTNGTKRFDNPVLPFNDGVYFASTEKSNIIRGWIFGTTLDSKTQSLLIVNNATNVVIKVCEFQFCNDPFLGVYYYKNNKSWMESEFRVYSSANNCTFEYVSQPFLMDLEGKQGNFKNLREFVFKNIDGYFKIYSKHTPINLVRDLPQGFSALEPLVDLPIGINITRFQTLLALHRSYLTPGDSSSGWTAGAAAYYVGYLQPRTFLLKYNENGTITDAVDCALDPLSETKCTLKSFTVEKGIYQTSNFRVQPTESIVRFPNITNLCPFGEVFNATRFASVYAWNRKRISNCVADYSVLYNSASFSTFKCYGVSPTKLNDLCFTNVYADSFVIRGDEVRQIAPGQTGKIADYNYKLPDDFTGCVIAWNSNNLDSKVGGNYNYLYRLFRKSNLKPFERDISTEIYQAGSTPCNGVEGFNCYFPLQSYGFQPTNGVGYQPYRVVVLSFELLHAPATVCGPKKSTNLVKNKCVNFNFNGLTGTGVLTESNKKFLPFQQFGRDIADTTDAVRDPQTLEILDITPCSFGGVSVITPGTNTSNQVAVLYQGVNCTEVPVAIHADQLTPTWRVYSTGSNVFQTRAGCLIGAEHVNNSYECDIPIGAGICASYQTQTNSPRRARSVASQSIIAYTMSLGAENSVAYSNNSCAIPTNFTISVTTEILPVSMTKTSVDCTMYICGDSTECSNLLLQYGSFCTQLNRALTGIAVEQDKNTQEVFAQVKQIYKTPPIKDFGGFNFSQILPDPSKPSKRSFIEDLLFNKVTLADAGFIKQYGDCLGDIAARDLICAQKFNGLTVLPPLLTDEMIAQYTSALLAGTITSGWTFGAGAALQIPFAMQMAYRFNGIGVTQNVLYENQKLIANQFNSAIGKIQDSLSSTASALGKLQDVVNQNAQALNTLVKQLSSNFGAISSVLNDILSRLDKVEAEVQIDRLITGRLQSLQTYVTQQLIRAAEIRASANLAATKMSECVLGQSKRVDFCGKGYHLMSFPQSAPHGVVFLHVTYVPAQEKNFTCAPAICHDGKAHFPREGVFVSNGTHWFVTQRNFYEPQIITTDNTFVSGNCDVVIGIVNNTVYDPLQPELDSFKEELDKYFKNHTSPDVDLGDISGINASVVNIQKEIDRLNEVAKNLNESLIDLQELGKYEQYIKGGSGYIPEAPRDGQAYVRKDGEWVLLSTFL

SEQ ID NO: 6029 - protein, 1241 aa, Artificial Sequence
  SARS-CoV-2/USA/UT-00033/2020__EPI_ISL_417976 spike protein (1-1211)(I712C_T1077C) Foldon construct
MFVFLVLLPLVSSQCVNLTTRTQLPPAYTNSFTRGVYYPDKVFRSSVLHSTQDLFLPFFSNVTWFHAIHVSGTNGTKRFDNPVLPFNDGVYFASTEKSNIIRGWIFGTTLDSKTQSLLIVNNATNVVIKVCEFQFCNDPFLGVYYHKNNKSWMESEFRVYSSANNCTFEYVSQPFLMDLEGKQGNFKNLREFVFKNIDGYFKIYSKHTPINLVRDLPQGFSALEPLVDLPIGINITRFQTLLALHRSYLTPGDSSSGLTAGAAAYYVGYLQPRTFLLKYNENGTITDAVDCALDPLSETKCTLKSFTVEKGIYQTSNFRVQPTESIVRFPNITNLCPFGEVFNATRFASVYAWNRKRISNCVADYSVLYNSASFSTFKCYGVSPTKLNDLCFTNVYADSFVIRGDEVRQIAPGQTGKIADYNYKLPDDFTGCVIAWNSNNLDSKVGGNYNYLYRLFRKSNLKPFERDISTEIYQAGSTPCNGVEGFNCYFPLQSYGFQPTNGVGYQPYRVVVLSFELLHAPATVCGPKKSTNLVKNKCVNFNFNGLTGTGVLTESNKKFLPFQQFGRDIADTTDAVRDPQTLEILDITPCSFGGVSVITPGTNTSNQVAVLYQGVNCTEVPVAIHADQLTPTWRVYSTGSNVFQTRAGCLIGAEHVNNSYECDIPIGAGICASYQTQTNSPRRARSVASQSIIAYTMSLGAENSVAYSNNSCAIPTNFTISVTTEILPVSMTKTSVDCTMYICGDSTECSNLLLQYGSFCTQLNRALTGIAVEQDKNTQEVFAQVKQIYKTPPIKDFGGFNFSQILPDPSKPSKRSFIEDLLFNKVTLADAGFIKQYGDCLGDIAARDLICAQKFNGLTVLPPLLTDEMIAQYTSALLAGTITSGWTFGAGAALQIPFAMQMAYRFNGIGVTQNVLYENQKLIANQFNSAIGKIQDSLSSTASALGKLQDVVNQNAQALNTLVKQLSSNFGAISSVLNDILSRLDKVEAEVQIDRLITGRLQSLQTYVTQQLIRAAEIRASANLAATKMSECVLGQSKRVDFCGKGYHLMSFPQSAPHGVVFLHVTYVPAQEKNFTCAPAICHDGKAHFPREGVFVSNGTHWFVTQRNFYEPQIITTDNTFVSGNCDVVIGIVNNTVYDPLQPELDSFKEELDKYFKNHTSPDVDLGDISGINASVVNIQKEIDRLNEVAKNLNESLIDLQELGKYEQYIKGGSGYIPEAPRDGQAYVRKDGEWVLLSTFL

SEQ ID NO: 6030 - protein, 1241 aa, Artificial Sequence
  SARS-CoV-2/USA/WI-13/2020__EPI_ISL_417516 spike protein (1-1211)(I712C_T1077C) Foldon construct
MFVFLVLLPLVSSQCVNLTTRTQLPPAYTNSFTRGVYYPDKVFRSSVLHSTQDLFLPFFSNVTWFHAIHVSGTNGTKRFDNPVLPFNDGVYFASTEKSNIIRGWIFGTTLDSKTQSLLIVNNATNVVIKVCEFQFCNDPFLGVYYHKNNKSWMESEFRVYSSANNCTFEYVSQPFLMDLEGKQGNFKNLREFVFKNIDGYFKIYSKHTPINLVRDLPQGFSALEPLVDLPIGINITRFQTLLALHRSYLTPGDSSSGWTAGAAAYYVGYLQPRTFLLKYNENGTITDAVDCALDPLSETKCTLKSFTVEKGIYQTSNFRVLPTESIVRFPNITNLCPFGEVFNATRFASVYAWNRKRISNCVADYSVLYNSASFSTFKCYGVSPTKLNDLCFTNVYADSFVIRGDEVRQIAPGQTGKIADYNYKLPDDFTGCVIAWNSNNLDSKVGGNYNYLYRLFRKSNLKPFERDISTEIYQAGSTPCNGVEGFNCYFPLQSYGFQPTNGVGYQPYRVVVLSFELLHAPATVCGPKKSTNLVKNKCVNFNFNGLTGTGVLTESNKKFLPFQQFGRDIADTTDAVRDPQTLEILDITPCSFGGVSVITPGTNTSNQVAVLYQGVNCTEVPVAIHADQLTPTWRVYSTGSNVFQTRAGCLIGAEHVNNSYECDIPIGAGICASYQTQTNSPRRARSVASQSIIAYTMSLGAENSVAYSNNSCAIPTNFTISVTTEILPVSMTKTSVDCTMYICGDSTECSNLLLQYGSFCTQLNRALTGIAVEQDKNTQEVFAQVKQIYKTPPIKDFGGFNFSQILPDPSKPSKRSFIEDLLFNKVTLADAGFIKQYGDCLGDIAARDLICAQKFNGLTVLPPLLTDEMIAQYTSALLAGTITSGWTFGAGAALQIPFAMQMAYRFNGIGVTQNVLYENQKLIANQFNSAIGKIQDSLSSTASALGKLQDVVNQNAQALNTLVKQLSSNFGAISSVLNDILSRLDKVEAEVQIDRLITGRLQSLQTYVTQQLIRAAEIRASANLAATKMSECVLGQSKRVDFCGKGYHLMSFPQSAPHGVVFLHVTYVPAQEKNFTCAPAICHDGKAHFPREGVFVSNGTHWFVTQRNFYEPQIITTDNTFVSGNCDVVIGIVNNTVYDPLQPELDSFKEELDKYFKNHTSPDVDLGDISGINASVVNIQKEIDRLNEVAKNLNESLIDLQELGKYEQYIKGGSGYIPEAPRDGQAYVRKDGEWVLLSTFL

SEQ ID NO: 6031 - protein, 1240 aa, Artificial Sequence
  SARS-CoV-2/India/1-27/2020__EPI_ISL_413522 spike protein (1-1210)(I711C_T1076C) Foldon construct
MFVFLVLLPLVSSQCVNLTTRTQLPPAYTNSFTRGVYYPDKVFRSSVLHSTQDLFLPFFSNVTWFHAIHVSGTNGTKRFDNPVLPFNDGVYFASTEKSNIIRGWIFGTTLDSKTQSLLIVNNATNVVIKVCEFQFCNDPFLGVYHKNNKSWMESEFRVYSSANNCTFEYVSQPFLMDLEGKQGNFKNLREFVFKNIDGYFKIYSKHTPINLVRDLPQGFSALEPLVDLPIGINITRFQTLLALHRSYLTPGDSSSGWTAGAAAYYVGYLQPRTFLLKYNENGTITDAVDCALDPLSETKCTLKSFTVEKGIYQTSNFRVQPTESIVRFPNITNLCPFGEVFNATRFASVYAWNRKRISNCVADYSVLYNSASFSTFKCYGVSPTKLNDLCFTNVYADSFVIRGDEVIQIAPGQTGKIADYNYKLPDDFTGCVIAWNSNNLDSKVGGNYNYLYRLFRKSNLKPFERDISTEIYQAGSTPCNGVEGFNCYFPLQSYGFQPTNGVGYQPYRVVVLSFELLHAPATVCGPKKSTNLVKNKCVNFNFNGLTGTGVLTESNKKFLPFQQFGRDIADTTDAVRDPQTLEILDITPCSFGGVSVITPGTNTSNQVAVLYQDVNCTEVPVAIHADQLTPTWRVYSTGSNVFQTRAGCLIGAEHVNNSYECDIPIGAGICASYQTQTNSPRRARSVASQSIIAYTMSLGAENSVAYSNNSCAIPTNFTISVTTEILPVSMTKTSVDCTMYICGDSTECSNLLLQYGSFCTQLNRALTGIAVEQDKNTQEVFAQVKQIYKTPPIKDFGGFNFSQILPDPSKPSKRSFIEDLLFNKVTLADAGFIKQYGDCLGDIAARDLICAQKFNGLTVLPPLLTDEMIAQYTSALLAGTITSGWTFGAGAALQIPFAMQMAYRFNGIGVTQNVLYENQKLIANQFNSAIGKIQDSLSSTASALGKLQDVVNQNAQALNTLVKQLSSNFGAISSVLNDILSRLDKVEAEVQIDRLITGRLQSLQTYVTQQLIRAAEIRASANLAATKMSECVLGQSKRVDFCGKGYHLMSFPQSAPHGVVFLHVTYVPAQEKNFTCAPAICHDGKAHFPREGVFVSNGTHWFVTQRNFYEPQIITTDNTFVSGNCDVVIGIVNNTVYDPLQPELDSFKEELDKYFKNHTSPDVDLGDISGINASVVNIQKEIDRLNEVAKNLNESLIDLQELGKYEQYIKGGSGYIPEAPRDGQAYVRKDGEWVLLSTFL

SEQ ID NO: 6032 - protein, 1235 aa, Artificial Sequence
  SARS-CoV-2/pangolin/Guangxi/P4L/2017__EPI_ISL_410538 spike protein (1-1205)(I706C_T1071C) Foldon construct
MFVFLFVLPLVSSQCVNLTTRTGIPPGYTNSSTRGVYYPDKVFRSSILHLTQDLFLPFFSNVTWFNTINYQGGFKKFDNPVLPFNDGVYFASTEKSNIIRGWIFGTTLDARTQSLLIVNNATNVVIKVCEFQFCTDPFLGVYYHNNNKTWVENEFRVYSSANNCTFEYISQPFLMDLEGKQGNFKNLREFVFKNVDGYFKIYSKHTPIDLVRDLPRGFAALEPLVDLPIGINITRFQTLLALHRSYLTPGNLESGWTTGAAAYYVGYLQQRTFLLSYNQNGTITDAVDCSLDPLSETKCTLKSLTVEKGIYQTSNFRVQPTISIVRFPNITNLCPFGEVFNASKFASVYAWNRKRISNCVADYSVLYNSTSFSTFKCYGVSPTKLNDLCFTNVYADSFVVKGDEVRQIAPGQTGVIADYNYKLPDDFTGCVIAWNSVKQDALTGGNYGYLYRLFRKSKLKPFERDISTEIYQAGSTPCNGQVGLNCYYPLERYGFHPTTGVNYQPFRVVVLSFELLNGPATVCGPKLSTTLVKDKCVNFNFNGLTGTGVLTTSKKQFLPFQQFGRDISDTTDAVRDPQTLEILDITPCSFGGVSVITPGTNTSNQVAVLYQDVNCTEVPMAIHAEQLTPAWRVYSAGANVFQTRAGCLVGAEHVNNSYECDIPVGAGICASYHSMSSLRSVNQRSIIAYTMSLGAENSVAYSNNSCAIPTNFTISVTTEILPVSMTKTSVDCTMYICGDSIECSNLLLQYGSFCTQLNRALTGIAVEQDKNTQEVFAQVKQIYKTPPIKDFGGFNFSQILPDPSKPSKRSFIEDLLFNKVTLADAGFIKQYGDCLGDIAARDLICAQKFNGLTVLPPLLTDEMIAQYTSALLAGTITSGWTFGAGAALQIPFAMQMAYRFNGIGVTQNVLYENQKLIANQFNSAIGKIQDSLSSTASALGKLQDVVNQNAQALNTLVKQLSSNFGAISSVLNDILSRLDKVEAEVQIDRLITGRLQSLQTYVTQQLIRAAEIRASANLAATKMSECVLGQSKRVDFCGKGYHLMSFPQSAPHGVVFLHVTYVPAQEKNFTCAPAICHEGKAHFPREGVFVSNGTHWFITQRNFYEPQIITTDNTFVSGSCDVVIGIVNNTVYDPLQPELDSFKEELDKYFKNHTSPDVDLGDISGINASVVNIQKEIDRLNEVAKNLNESPIDLQELGKYEQYIKGGSGYIPEAPRDGQAYVRKDGEWVLLSTFL

SEQ ID NO: 6033 - protein, 1235 aa, Artificial Sequence
  SARS-CoV-2/pangolin/Guangxi/P5L/2017__EPI_ISL_410540 spike protein (1-1205)(I706C_T1071C) Foldon construct
MFVFLFVLPLVSSQCVNLTTRTGIPPGYTNSSTRGVYYPDKVFRSSILHLTQDLFLPFFSNVTWFNTINYQGGFKKFDNPVLPFNDGVYFASTEKSNIIRGWIFGTTLDARTQSLLIVNNATNVVIKVCEFQFCTDPFLGVYYHNNNKTWVENEFRVYSSANNCTFEYISQPFLMDLEGKQGNFKNLREFVFKNVDGYFKIYSKHTPIDLVRDLPRGFAALEPLVDLPIGINITRFQTLLALHRSYLTPGKLESGWTTGAAAYYVGYLQQRTFLLSYNQNGTITDAVDCSLDPLSETKCTLKSLTVEKGIYQTSNFRVQPTISIVRFPNITNLCPFGEVFNASKFASVYAWNRKRISNCVADYSVLYNSTSFSTFKCYGVSPTKLNDLCFTNVYADSFVVKGDEVRQIAPGQTGVIADYNYKLPDDFTGCVIAWNSVKQDALTGGNYGYLYRLFRKSKLKPFERDISTEIYQAGSTPCNGQVGLNCYYPLERYGFHPTTGVNYQPFRVVVLSFELLNGPATVCGPKLSTTLVKDKCVNFNFNGLTGTGVLTTSKKQFLPFQQFGRDISDTTDAVRDPQTLEILDITPCSFGGVSVITPGTNTSNQVAVLYQDVNCTEVPMAIHAEQLTPAWRVYSAGANVFQTRAGCLVGAEHVNNSYECDIPVGAGICASYHSMSSFRSVNQRSIIAYTMSLGAENSVAYSNNSCAIPTNFTISVTTEILPVSMTKTSVDCTMYICGDSIECSNLLLQYGSFCTQLNRALTGIAVEQDKNTQEVFAQVKQIYKTPPIKDFGGFNFSQILPDPSKPSKRSFIEDLLFNKVTLADAGFIKQYGDCLGDIAARDLICAQKFNGLTVLPPLLTDEMIAQYTSALLAGTITSGWTFGAGAALQIPFAMQMAYRFNGIGVTQNVLYENQKLIANQFNSAIGKIQDSLSSTASALGKLQDVVNQNAQALNTLVKQLSSNFGAISSVLNDILSRLDKVEAEVQIDRLITGRLQSLQTYVTQQLIRAAEIRASANLAATKMSECVLGQSKRVDFCGKGYHLMSFPQSAPHGVVFLHVTYVPAQEKNFTCAPAICHEGKAHFPREGVFVSNGTHWFITQRNFYEPQIITTDNTFVSGSCDVVIGIVNNTVYDPLQPELDSFKEELDKYFKNHTSPDVDLGDISGINASVVNIQKEIDRLNEVAKNLNESLIDLQELGKYEQYIKGGSGYIPEAPRDGQAYVRKDGEWVLLSTFL

SEQ ID NO: 6034 - protein, 1235 aa, Artificial Sequence
  SARS-CoV-2/pangolin/Guangxi/P5E/2017__EPI_ISL_410541 spike protein (1-1205)(I706C_T1071C) Foldon construct
MFVFLFVLPLVSSQCVNLTTRTGIPPGYTNSSTRGVYYPDKVFRSSILHLTQDLFLPFFSNVTWFNTITYQGGSKKFDNPVLPFNDGVYFASTEKSNIIRGWIFGTTLDARTQSLLIVNNATNVVIKVCEFQFCTDPFLGVYYHNNNKTWVENEFRVYSSANNCTFEYISQPFLMDLEGKQGNFKNLREFVFKNVDGYFKIYSKHTPIDLVRDLPRGFAALEPLVDLPIGINITRFQTLLALHRSYLTPGKLESGWTTGAAAYYVGYLQQRTFLLSYNQNGTITDAVDCSLDPLSETKCTLKSLTVEKGIYQTSNFRVQPTISIVRFPNITNLCPFGEVFNASKFASVYAWNRKRISNCVADYSVLYNSTSFSTFKCYGVSPTKLNDLCFTNVYADSFVVKGDEVRQIAPGQTGVIADYNYKLPDDFTGCVIAWNSVKQDALTGDNYGYLYRLFRKSKLKPFERDISTEIYQAGSTPCNGQVGLNCYYPLERYGFHPTTGVNYQPFRVVVLSFELLNGPATVCGPKLSTTLVKDKCVNFNFNGLTGTGVLTTSKKQFLPFQQFGRDISDTTDAVRDPQTLEILDITPCSFGGVSVITPGTNTSNQVAVLYQDVNCTEVPMAIHAEQLTPAWRVYSAGANVFQTRAGCLVGAEHVNNSYECDIPVGAGICASYHSMSSFRSVNQRSIIAYTMSLGAENSVAYSNNSCAIPTNFTISVTTEILPVSMTKTSVDCTMYICGDSIECSNLLLQYGSFCTQLNRALTGIAVEQDKNTQEVFAQVKQIYKTPPIKDFGGFNFSQILPDPSKPSKRSFIEDLLFNKVTLADAGFIKQYGDCLGDIAARDLICAQKFNGLTVLPPLLTDEMIAQYTSALLAGTITSGWTFGAGAALQIPFAMQMAYRFNGIGVTQNVLYENQKLIANQFNSAIGKIQDSLSSTASALGKLQDVVNQNAQALNTLVKQLSSNFGAISSVLNDILSRLDKVEAEVQIDRLITGRLQSLQTYVTQQLIRAAEIRASANLAATKMSECVLGQSKRVDFCGKGYHLMSFPQSAPHGVVFLHVTYVPAQEKNFTCAPAICHEGKAHFPREGVFVSNGTHWFITQRNFYEPQIITTDNTFVSGSCDVVIGIVNNTVYDPLQPELDSFKEELDKYFKNHTSPDVDLGDISGINASVVNIQKEIDRLNEVAKNLNESLIDLQELGKYEQYIKGGSGYIPEAPRDGQAYVRKDGEWVLLSTFL

SEQ ID NO: 6035 - protein, 1233 aa, Artificial Sequence
  SARS-CoV-2/pangolin/Guangxi/P1E/2017__EPI_ISL_410539 spike protein (1-1203)(I704C_T1069C) Foldon construct
MFVFLFVLPLVSSQCVNLTTRTGIQPGYTNSSTRGVYYPDKVFRSSILHLTQDLFLPFFSNVTWFNTINYQGGFKKFDNPVLPFNDGVYFASTEKSNIIRGWIFGTTLDARTQSLLIVNNATNVVIKVCEFQFCTDPFLGVYYHNNNKTWVENEFRVYSSANNCTFEYISQPFLMDLEGKQGNFKNLREFVFKNVDGYFKIYSKHTPIDLVRDLPRGFAALEPLVDLPIGINITRFQTLLALHRSYLTPGKLESGWTTGAAAYYVGYLQQRTFLLSYNQNGTITDAVDCSLDPLSETKCTLKSLTVEKGIYQTSNFRVQPTISIVRFPNITNLCPFGEVFNASKFASVYAWNRKRISNCVADYSVLYNSTSFSTFKCYGVSPTKLNDLCFTNVYADSFVVKGDEVRQIAPGQTGVIADYNYKLPDDFTGCVIAWNSVKQDALTGGNYLYRLFRKSKLKPFERDISTEIYQAGSTPCNGQVGLNCYYPLERYGFHPTTGVNYQPFRVVVLSFELLNGPATVCGPKLSTTLVKDKCVNFNFNGLTGTGVLTTSKKQFLPFQQFGRDISDTTDAVRDPQTLEILDITPCSFGGVSVITPGTNTSNQVAVLYQDVNCTEVPMAIHAEQLTPAWRVYSAGANVFQTRAGCLVGAEHVNNSYECDIPVGAGICASYHSMSSLRSVNQRSIIAYTMSLGAENSVAYSNNSCAIPTNFTISVTTEILPVSMTKTSVDCTMYICGDSIECSNLLLQYGSFCTQLNRALTGIAVEQDKNTQEVFAQVKQIYKTPPIKDFGGFNFSQILPDPSKPSKRSFIEDLLFNKVTLADAGFIKQYGDCLGDIAARDLICAQKFNGLTVLPPLLTDEMIAQYTSALLAGTITSGWTFGAGAALQIPFAMQMAYRFNGIGVTQNVLYENQKLIANQFNSAIGKIQDSLSSTASALGKLQDVVNQNAQALNTLVKQLSSNFGAISSVLNDILSRLDKVEAEVQIDRLITGRLQSLQTYVTQQLIRAAEIRASANLAATKMSECVLGQSKRVDFCGKGYHLMSFPQSAPHGVVFLHVTYVPAQEKNFTCAPAICHEGKAHFPREGVFVSNGTHWFITQRNFYEPQIITTDNTFVSGSCDVVIGIVNNTVYDPLQPELDSFKEELDKYFKNHTSPDVDLGDISGINASVVNIQKEIDRLNEVAKNLNESLIDLQELGKYEQYIKGGSGYIPEAPRDGQAYVRKDGEWVLLSTFL

SEQ ID NO: 6036 - protein, 1241 aa, Artificial Sequence
  SARS-CoV-2/Wuhan/WIV05/2019__EPI_ISL_402128 spike protein (1-1211)(I714C_Y1110C) Foldon construct
MFVFLVLLPLVSSQCVNLTTRTQLPPAYTNSFTRGVYYPDKVFRSSVLHSTQDLFLPFFSNVTWFHAIHVSGTNGTKRFDNPVLPFNDGVYFASTEKSNIIRGWIFGTTLDSKTQSLLIVNNATNVVIKVCEFQFCNDPFLGVYYHKNNKSWMESEFRVYSSANNCTFEYVSQPFLMDLEGKQGNFKNLREFVFKNIDGYFKIYSKHTPINLVRDLPQGFSALEPLVDLPIGINITRFQTLLALHRSYLTPGDSSSGWTAGAAAYYVGYLQPRTFLLKYNENGTITDAVDCALDPLSETKCTLKSFTVEKGIYQTSNFRVQPTESIVRFPNITNLCPFGEVFNATRFASVYAWNRKRISNCVADYSVLYNSASFSTFKCYGVSPTKLNDLCFTNVYADSFVIRGDEVRQIAPGQTGKIADYNYKLPDDFTGCVIAWNSNNLDSKVGGNYNYLYRLFRKSNLKPFERDISTEIYQAGSTPCNGVEGFNCYFPLQSYGFQPTNGVGYQPYRVVVLSFELLHAPATVCGPKKSTNLVKNKCVNFNFNGLTGTGVLTESNKKFLPFQQFGRDIADTTDAVRDPQTLEILDITPCSFGGVSVITPGTNTSNQVAVLYQDVNCTEVPVAIHADQLTPTWRVYSTGSNVFQTRAGCLIGAEHVNNSYECDIPIGAGICASYQTQTNSPRRARSVASQSIIAYTMSLGAENSVAYSNNSIACPTNFTISVTTEILPVSMTKTSVDCTMYICGDSTECSNLLLQYGSFCTQLNRALTGIAVEQDKNTQEVFAQVKQIYKTPPIKDFGGFNFSQILPDPSKPSKRSFIEDLLFNKVTLADAGFIKQYGDCLGDIAARDLICAQKFNGLTVLPPLLTDEMIAQYTSALLAGTITSGWTFGAGAALQIPFAMQMAYRFNGIGVTQNVLYENQKLIANQFNSAIGKIQDSLSSTASALGKLQDVVNQNAQALNTLVKQLSSNFGAISSVLNDILSRLDKVEAEVQIDRLITGRLQSLQTYVTQQLIRAAEIRASANLAATKMSECVLGQSKRVDFCGKGYHLMSFPQSAPHGVVFLHVTYVPAQEKNFTTAPAICHDGKAHFPREGVFVSNGTHWFVTQRNFCEPQIITTDNTFVSGNCDVVIGIVNNTVYDPLQPELDSFKEELDKYFKNHTSPDVDLGDISGINASVVNIQKEIDRLNEVAKNLNESLIDLQELGKYEQYIKGGSGYIPEAPRDGQAYVRKDGEWVLLSTFL

SEQ ID NO: 6037 - protein, 1237 aa, Artificial Sequence
  SARS-CoV-2/bat/Yunnan/RaTG13/2013__EPI_ISL_402131 spike protein (1-1207)(I710C_Y1106C) Foldon construct
MFVFLVLLPLVSSQCVNLTTRTQLPPAYTNSSTRGVYYPDKVFRSSVLHLTQDLFLPFFSNVTWFHAIHVSGTNGIKRFDNPVLPFNDGVYFASTEKSNIIRGWIFGTTLDSKTQSLLIVNNATNVVIKVCEFQFCNDPFLGVYYHKNNKSWMESEFRVYSSANNCTFEYVSQPFLMDLEGKQGNFKNLREFVFKNIDGYFKIYSKHTPINLVRDLPPGFSALEPLVDLPIGINITRFQTLLALHRSYLTPGDSSSGWTAGAAAYYVGYLQPRTFLLKYNENGTITDAVDCALDPLSETKCTLKSFTVEKGIYQTSNFRVQPTDSIVRFPNITNLCPFGEVFNATTFASVYAWNRKRISNCVADYSVLYNSTSFSTFKCYGVSPTKLNDLCFTNVYADSFVITGDEVRQIAPGQTGKIADYNYKLPDDFTGCVIAWNSKHIDAKEGGNFNYLYRLFRKANLKPFERDISTEIYQAGSKPCNGQTGLNCYYPLYRYGFYPTDGVGHQPYRVVVLSFELLNAPATVCGPKKSTNLVKNKCVNFNFNGLTGTGVLTESNKKFLPFQQFGRDIADTTDAVRDPQTLEILDITPCSFGGVSVITPGTNASNQVAVLYQDVNCTEVPVAIHADQLTPTWRVYSTGSNVFQTRAGCLIGAEHVNNSYECDIPIGAGICASYQTQTNSRSVASQSIIAYTMSLGAENSVAYSNNSIACPTNFTISVTTEILPVSMTKTSVDCTMYICGDSTECSNLLLQYGSFCTQLNRALTGIAVEQDKNTQEVFAQVKQIYKTPPIKDFGGFNFSQILPDPSKPSKRSFIEDLLFNKVTLADAGFIKQYGDCLGDIAARDLICAQKFNGLTVLPPLLTDEMIAQYTSALLAGTITSGWTFGAGAALQIPFAMQMAYRFNGIGVTQNVLYENQKLIANQFNSAIGKIQDSLSSTASALGKLQDVVNQNAQALNTLVKQLSSNFGAISSVLNDILSRLDKVEAEVQIDRLITGRLQSLQTYVTQQLIRAAEIRASANLAATKMSECVLGQSKRVDFCGKGYHLMSFPQSAPHGVVFLHVTYVPAQEKNFTTAPAICHDGKAHFPREGVFVSNGTHWFVTQRNFCEPQIITTDNTFVSGSCDVVIGIVNNTVYDPLQPELDSFKEELDKYFKNHTSPDVDLGDISGINASVVNIQKEIDRLNEVAKNLNESLIDLQELGKYEQYIKGGSGYIPEAPRDGQAYVRKDGEWVLLSTFL

SEQ ID NO: 6038 - protein, 1241 aa, Artificial Sequence
  SARS-CoV-2/Wuhan/HBCDC-HB-01/2019__EPI_ISL_402132 spike protein (1-1211)(I714C_Y1110C) Foldon construct
MFVFLVLLPLVSSQCVNLTTRTQLPPAYTNSITRGVYYPDKVFRSSVLHSTQDLFLPFFSNVTWFHAIHVSGTNGTKRFDNPVLPFNDGVYFASTEKSNIIRGWIFGTTLDSKTQSLLIVNNATNVVIKVCEFQFCNDPFLGVYYHKNNKSWMESEFRVYSSANNCTFEYVSQPFLMDLEGKQGNFKNLREFVFKNIDGYFKIYSKHTPINLVRDLPQGFSALEPLVDLPIGINITRFQTLLALHRSYLTPGDSSSGWTAGAAAYYVGYLQPRTFLLKYNENGTITDAVDCALDPLSETKCTLKSFTVEKGIYQTSNFRVQPTESIVRFPNITNLCPFGEVFNATRFASVYAWNRKRISNCVADYSVLYNSASFSTFKCYGVSPTKLNDLCFTNVYADSFVIRGDEVRQIAPGQTGKIADYNYKLPDDFTGCVIAWNSNNLDSKVGGNYNYLYRLFRKSNLKPFERDISTEIYQAGSTPCNGVEGFNCYFPLQSYGFQPTNGVGYQPYRVVVLSFELLHAPATVCGPKKSTNLVKNKCVNFNFNGLTGTGVLTESNKKFLPFQQFGRDIADTTDAVRDPQTLEILDITPCSFGGVSVITPGTNTSNQVAVLYQDVNCTEVPVAIHADQLTPTWRVYSTGSNVFQTRAGCLIGAEHVNNSYECDIPIGAGICASYQTQTNSPRRARSVASQSIIAYTMSLGAENSVAYSNNSIACPTNFTISVTTEILPVSMTKTSVDCTMYICGDSTECSNLLLQYGSFCTQLNRALTGIAVEQDKNTQEVFAQVKQIYKTPPIKDFGGFNFSQILPDPSKPSKRSFIEDLLFNKVTLADAGFIKQYGDCLGDIAARDLICAQKFNGLTVLPPLLTDEMIAQYTSALLAGTITSGWTFGAGAALQIPFAMQMAYRFNGIGVTQNVLYENQKLIANQFNSAIGKIQDSLSSTASALGKLQDVVNQNAQALNTLVKQLSSNFGAISSVLNDILSRLDKVEAEVQIDRLITGRLQSLQTYVTQQLIRAAEIRASANLAATKMSECVLGQSKRVDFCGKGYHLMSFPQSAPHGVVFLHVTYVPAQEKNFTTAPAICHDGKAHFPREGVFVSNGTHWFVTQRNFCEPQIITTDNTFVSGNCDVVIGIVNNTVYDPLQPELDSFKEELDKYFKNHTSPDVDLGDISGINASVVNIQKEIDRLNEVAKNLNESLIDLQELGKYEQYIKGGSGYIPEAPRDGQAYVRKDGEWVLLSTFL

SEQ ID NO: 6039 - protein, 1241 aa, Artificial Sequence
  SARS-CoV-2/Guangdong/20SF028/2020__EPI_ISL_403936 spike protein (1-1211)(I714C_Y1110C) Foldon construct
MFVFLVLLPLVSSQCVNLTTRTQLPPAYTNSFTRGVYYPDKVFRSSVLYSTQDLFLPFFSNVTWFHAIHVSGTNGTKRFDNPVLPFNDGVYFASTEKSNIIRGWIFGTTLDSKTQSLLIVNNATNVVIKVCEFQFCNDPFLGVYYHKNNKSWMESEFRVYSSANNCTFEYVSQPFLMDLEGKQGNFKNLREFVFKNIDGYFKIYSKHTPINLVRDLPQGFSALEPLVDLPIGINITRFQTLLALHRSYLTPGDSSSGWTAGAAAYYVGYLQPRTFLLKYNENGTITDAVDCALDPLSETKCTLKSFTVEKGIYQTSNFRVQPTESIVRFPNITNLCPFGEVFNATRFASVYAWNRKRISNCVADYSVLYNSASFSTFKCYGVSPTKLNDLCFTNVYADSFVIRGDEVRQIAPGQTGKIADYNYKLPDDFTGCVIAWNSNNLDSKVGGNYNYLYRLFRKSNLKPFERDISTEIYQAGSTPCNGVEGFNCYFPLQSYGFQPTNGVGYQPYRVVVLSFELLHAPATVCGPKKSTNLVKNKCVNFNFNGLTGTGVLTESNKKFLPFQQFGRDIADTTDAVRDPQTLEILDITPCSFGGVSVITPGTNTSNQVAVLYQDVNCTEVPVAIHADQLTPTWRVYSTGSNVFQTRAGCLIGAEHVNNSYECDIPIGAGICASYQTQTNSPRRARSVASQSIIAYTMSLGAENSVAYSNNSIACPTNFTISVTTEILPVSMTKTSVDCTMYICGDSTECSNLLLQYGSFCTQLNRALTGIAVEQDKNTQEVFAQVKQIYKTPPIKDFGGFNFSQILPDPSKPSKRSFIEDLLFNKVTLADAGFIKQYGDCLGDIAARDLICAQKFNGLTVLPPLLTDEMIAQYTSALLAGTITSGWTFGAGAALQIPFAMQMAYRFNGIGVTQNVLYENQKLIANQFNSAIGKIQDSLSSTASALGKLQDVVNQNAQALNTLVKQLSSNFGAISSVLNDILSRLDKVEAEVQIDRLITGRLQSLQTYVTQQLIRAAEIRASANLAATKMSECVLGQSKRVDFCGKGYHLMSFPQSAPHGVVFLHVTYVPAQEKNFTTAPAICHDGKAHFPREGVFVSNGTHWFVTQRNFCEPQIITTDNTFVSGNCDVVIGIVNNTVYDPLQPELDSFKEELDKYFKNHTSPDVDLGDISGINASVVNIQKEIDRLNEVAKNLNESLIDLQELGKYEQYIKGGSGYIPEAPRDGQAYVRKDGEWVLLSTFL

SEQ ID NO: 6040 - protein, 1241 aa, Artificial Sequence
  SARS-CoV-2/Shenzhen/SZTH-001/2020__EPI_ISL_406592 spike protein (1-1211)(I714C_Y1110C) Foldon construct
MFVFLVLLPLVSSQCVNLTTRTQLPPAYTNSFTRGVYYPDKVFRSSVLHSTQDLFLPFFSNVTWFHAIHVSGTNGTKRFDNPVLPFNDGVYFASTEKSNIIRGWIFGTTLDSKTQSLLIVNNATNVVIKVCEFQFCNDPFLGVYYHKNNKSWMESEFRVYSSANNCTFEYVSQPFLMDLEGKQGNFKNLREFVFKNIDGYFKIYSKHTPINLVRDLPQGFSALEPLVDLPIGINITRFQTLLALHRSYLTPGDSSSGWTAGAAAYYVGYLQPRTFLLKYNENGTITDAVDCALDPLSETKCTLKSFTVEKGIYQTSNFRVQPTESIVRFPNITNLCPFGEVFNATRFASVYAWNRKRISNCVADYSVLYNSASFSTFKCYGVSPTKLNDLCFTNVYADSFVIRGDEVRQIAPGQTGKIADYNYKLPDDFTGCVIAWNSNNLDSKVGGNYNYLYRLFRKSNLKPFERDISTEIYQAGSTPCNGVEGFNCYFPLQSYGFQPTNGVGYQPYRVVVLSFELLHAPATVCGPKKSTNLVKNKCVNFNFNGLTGTGVLTESNKKFLPFQQFGRDIADTTDAVRDPQTLEILDITPCSFGGVSVITPGTNTSNQVAVLYQDVNCTEVPVAIHADQLTPTWRVYSTGSNVFQTRAGCLIGAEHVNNSYECDIPIGAGICASYQTQTNSPRRARSVASQSIIAYTMSLGAENSVAYSNNSIACPTNFTISVTTEILPVSMTKTSVDCTMYICGDSTECSNLLLQYGSFCTQLNRALTGIAVEQDKNTQEVFAQVKQIYKTPPIKDFGGFNFSQILPDPSKPSKRSFIEDLLFNKVTLADAGFIKQYGDCLGDIAARDLICAQKFNGLTVLPPLLTDEMIAQYTSALLAGTITSGWTFGAGAALQIPFAMQMAYRFNGIGVTQNVLYENQKLIANQFNSAIGKIQDSLSSTASALGKLQDVVNQNAQALNTLVKQLSSNFGAISSVLNDILSRLDKVEAEVQIDRLITGRLQSLQTYVTQQLIRAAEIRASANLAATKMSECVLGQSKRVDFCGKGYHLMSFPQSAPHGVVFLHVTYVPAQEKNFTTAPAICHDGKAHFPREGVFVSNGTHWFVTQRNFCEPQIITTDNTFVSGNCDVLIGIVNNTVYDPLQPELDSFKEELDKYFKNHTSPDVDLGDISGINASVVNIQKEIDRLNEVAKNLNESLIDLQELGKYEQYIKGGSGYIPEAPRDGQAYVRKDGEWVLLSTFL

SEQ ID NO: 6041 - protein, 1241 aa, Artificial Sequence
  SARS-CoV-2/Shenzhen/SZTH-004/2020__EPI_ISL_406595 spike protein (1-1211)(I714C_Y1110C) Foldon construct
MFVFLVLLPLVSSQCVNLTTRTQLPPAYTNSFTRGVYYPDKVFRSSVLHSTQDLFLPFFSNVTWFHAIHVSGTNGTKRFDNPVLPFNDGVYFASTEKSNIIRGWIFGTTLDSKTQSLLIVNNATNVVIKVCEFQFCNDPFLGVYYHKNNKSWMESEFRVYSSANNCTFEYVSQPFLMDLEGKQGNFKNLREFVFKNIDGYFKIYSKHTPINLVRDLPQGFSALEPLVDLPIGINITRFQTLLALHRSYLTPGDSSSGWTAGAAAYYVGYLQPRTFLLKYNENGTITDAVDCALDPLSETKCTLKSFTVEKGIYQTSNFRVQPTESIVRFPNITNLCPFGEVFNATRFASVYAWDRKRISNCVAYYSVLYNSASFSTFKCYGVSPTKLNDLCFTNVYADSFVIRGDEVRQIAPGQTGKIADYNYKLPDDFTGCVIAWNSNNLDSKVGGNYNYLYRLFRKSNLKPFERDISTEIYQAGSTPCNGVEGFNCYFPLQSYGFQPTNGVGYQPYRVVVLSFELLHAPATVCGPKKSTNLVKNKCVNFNFNGLTGTGVLTESNKKFLPFQQFGRDIADTTDAVRDPQTLEILDITPCSFGGVSVITPGTNTSNQVAVLYQDVNCTEVPVAIHADQLTPTWRVYSTGSNVFQTRAGCLIGAEHVNNSYECDIPIGAGICASYQTQTNSPRRARSVASQSIIAYTMSLGAENSVAYSNNSIACPTNFTISVTTEILPVSMTKTSVDCTMYICGDSTECSNLLLQYGSFCTQLNRALTGIAVEQDKNTQEVFAQVKQIYKTPPIKDFGGFNFSQILPDPSKPSKRSFIEDLLFNKVTLADAGFIKQYGDCLGDIAARDLICAQKFNGLTVLPPLLTDEMIAQYTSALLAGTITSGWTFGAGAALQIPFAMQMAYRFNGIGVTQNVLYENQKLIANQFNSAIGKIQDSLSSTASALGKLQDVVNQNAQALNTLVKQLSSNFGAISSVLNDILSRLDKVEAEVQIDRLITGRLQSLQTYVTQQLIRAAEIRASANLAATKMSECVLGQSKRVDFCGKGYHLMSFPQSAPHGVVFLHVTYVPAQEKNFTTAPAICHDGKAHFPREGVFVSNGTHWFVTQRNFCEPQIITTDNTFVSGNCDVVIGIVNNTVYDPLQPELDSFKEELDKYFKNHTSPDVDLGDISGINASVVNIQKEIDRLNEVAKNLNESLIDLQELGKYEQYIKGGSGYIPEAPRDGQAYVRKDGEWVLLSTFL

SEQ ID NO: 6042 - protein, 1241 aa, Artificial Sequence
  SARS-CoV-2/France/IDF0372/2020__EPI_ISL_406596 spike protein (1-1211)(I714C_Y1110C) Foldon construct
MFVFLVLLPLVSSQCVNLTTRTQLPPAYTNSFTRGVYYPDKVFRSSVLHSTQDLFLPFFSNVTWFHAIHVSGTNGTKRFDNPVLPFNDGVYFASTEKSNIIRGWIFGTTLDSKTQSLLIVNNATNVVIKVCEFQFCNDPFLGVYYHKNNKSWMESEFRVYSSANNCTFEYVSQPFLMDLEGKQGNFKNLREFVFKNIDGYFKIYSKHTPINLVRDLPQGFSALEPLVDLPIGINITRFQTLLALHRSYLTPGDSSSGWTAGAAAYYVGYLQPRTFLLKYNENGTITDAVDCALDPLSETKCTLKSFTVEKGIYQTSNFRVQPTESIVRFPNITNLCPFGEVFNATRFASVYAWNRKRISNCVADYSFLYNSASFSTFKCYGVSPTKLNDLCFTNVYADSFVIRGDEVRQIAPGQTGKIADYNYKLPDDFTGCVIAWNSNNLDSKVGGNYNYLYRLFRKSNLKPFERDISTEIYQAGSTPCNGVEGFNCYFPLQSYGFQPTNGVGYQPYRVVVLSFELLHAPATVCGPKKSTNLVKNKCVNFNFNGLTGTGVLTESNKKFLPFQQFGRDIADTTDAVRDPQTLEILDITPCSFGGVSVITPGTNTSNQVAVLYQDVNCTEVPVAIHADQLTPTWRVYSTGSNVFQTRAGCLIGAEHVNNSYECDIPIGAGICASYQTQTNSPRRARSVASQSIIAYTMSLGAENSVAYSNNSIACPTNFTISVTTEILPVSMTKTSVDCTMYICGDSTECSNLLLQYGSFCTQLNRALTGIAVEQDKNTQEVFAQVKQIYKTPPIKDFGGFNFSQILPDPSKPSKRSFIEDLLFNKVTLADAGFIKQYGDCLGDIAARDLICAQKFNGLTVLPPLLTDEMIAQYTSALLAGTITSGWTFGAGAALQIPFAMQMAYRFNGIGVTQNVLYENQKLIANQFNSAIGKIQDSLSSTASALGKLQDVVNQNAQALNTLVKQLSSNFGAISSVLNDILSRLDKVEAEVQIDRLITGRLQSLQTYVTQQLIRAAEIRASANLAATKMSECVLGQSKRVDFCGKGYHLMSFPQSAPHGVVFLHVTYVPAQEKNFTTAPAICHDGKAHFPREGVFVSNGTHWFVTQRNFCEPQIITTDNTFVSGNCDVVIGIVNNTVYDPLQPELDSFKEELDKYFKNHTSPDVDLGDISGINASVVNIQKEIDRLNEVAKNLNESLIDLQELGKYEQYIKGGSGYIPEAPRDGQAYVRKDGEWVLLSTFL

SEQ ID NO: 6043 - protein, 1241 aa, Artificial Sequence
  SARS-CoV-2/Australia/VIC01/2020__EPI_ISL_406844 spike protein (1-1211)(I714C_Y1110C) Foldon construct
MFVFLVLLPLVSSQCVNLTTRTQLPPAYTNSFTRGVYYPDKVFRSSVLHSTQDLFLPFFSNVTWFHAIHVSGTNGTKRFDNPVLPFNDGVYFASTEKSNIIRGWIFGTTLDSKTQSLLIVNNATNVVIKVCEFQFCNDPFLGVYYHKNNKSWMESEFRVYSSANNCTFEYVSQPFLMDLEGKQGNFKNLREFVFKNIDGYFKIYSKHTPINLVRDLPQGFSALEPLVDLPIGINITRFQTLLALHRRYLTPGDSSSGWTAGAAAYYVGYLQPRTFLLKYNENGTITDAVDCALDPLSETKCTLKSFTVEKGIYQTSNFRVQPTESIVRFPNITNLCPFGEVFNATRFASVYAWNRKRISNCVADYSVLYNSASFSTFKCYGVSPTKLNDLCFTNVYADSFVIRGDEVRQIAPGQTGKIADYNYKLPDDFTGCVIAWNSNNLDSKVGGNYNYLYRLFRKSNLKPFERDISTEIYQAGSTPCNGVEGFNCYFPLQSYGFQPTNGVGYQPYRVVVLSFELLHAPATVCGPKKSTNLVKNKCVNFNFNGLTGTGVLTESNKKFLPFQQFGRDIADTTDAVRDPQTLEILDITPCSFGGVSVITPGTNTSNQVAVLYQDVNCTEVPVAIHADQLTPTWRVYSTGSNVFQTRAGCLIGAEHVNNSYECDIPIGAGICASYQTQTNSPRRARSVASQSIIAYTMSLGAENSVAYSNNSIACPTNFTISVTTEILPVSMTKTSVDCTMYICGDSTECSNLLLQYGSFCTQLNRALTGIAVEQDKNTQEVFAQVKQIYKTPPIKDFGGFNFSQILPDPSKPSKRSFIEDLLFNKVTLADAGFIKQYGDCLGDIAARDLICAQKFNGLTVLPPLLTDEMIAQYTSALLAGTITSGWTFGAGAALQIPFAMQMAYRFNGIGVTQNVLYENQKLIANQFNSAIGKIQDSLSSTASALGKLQDVVNQNAQALNTLVKQLSSNFGAISSVLNDILSRLDKVEAEVQIDRLITGRLQSLQTYVTQQLIRAAEIRASANLAATKMSECVLGQSKRVDFCGKGYHLMSFPQSAPHGVVFLHVTYVPAQEKNFTTAPAICHDGKAHFPREGVFVSNGTHWFVTQRNFCEPQIITTDNTFVSGNCDVVIGIVNNTVYDPLQPELDSFKEELDKYFKNHTSPDVDLGDISGINASVVNIQKEIDRLNEVAKNLNESLIDLQELGKYEQYIKGGSGYIPEAPRDGQAYVRKDGEWVLLSTFL

SEQ ID NO: 6044 - protein, 1241 aa, Artificial Sequence
  SARS-CoV-2/Germany/BavPat1/2020__EPI_ISL_406862 spike protein (1-1211)(I714C_Y1110C) Foldon construct
MFVFLVLLPLVSSQCVNLTTRTQLPPAYTNSFTRGVYYPDKVFRSSVLHSTQDLFLPFFSNVTWFHAIHVSGTNGTKRFDNPVLPFNDGVYFASTEKSNIIRGWIFGTTLDSKTQSLLIVNNATNVVIKVCEFQFCNDPFLGVYYHKNNKSWMESEFRVYSSANNCTFEYVSQPFLMDLEGKQGNFKNLREFVFKNIDGYFKIYSKHTPINLVRDLPQGFSALEPLVDLPIGINITRFQTLLALHRSYLTPGDSSSGWTAGAAAYYVGYLQPRTFLLKYNENGTITDAVDCALDPLSETKCTLKSFTVEKGIYQTSNFRVQPTESIVRFPNITNLCPFGEVFNATRFASVYAWNRKRISNCVADYSVLYNSASFSTFKCYGVSPTKLNDLCFTNVYADSFVIRGDEVRQIAPGQTGKIADYNYKLPDDFTGCVIAWNSNNLDSKVGGNYNYLYRLFRKSNLKPFERDISTEIYQAGSTPCNGVEGFNCYFPLQSYGFQPTNGVGYQPYRVVVLSFELLHAPATVCGPKKSTNLVKNKCVNFNFNGLTGTGVLTESNKKFLPFQQFGRDIADTTDAVRDPQTLEILDITPCSFGGVSVITPGTNTSNQVAVLYQGVNCTEVPVAIHADQLTPTWRVYSTGSNVFQTRAGCLIGAEHVNNSYECDIPIGAGICASYQTQTNSPRRARSVASQSIIAYTMSLGAENSVAYSNNSIACPTNFTISVTTEILPVSMTKTSVDCTMYICGDSTECSNLLLQYGSFCTQLNRALTGIAVEQDKNTQEVFAQVKQIYKTPPIKDFGGFNFSQILPDPSKPSKRSFIEDLLFNKVTLADAGFIKQYGDCLGDIAARDLICAQKFNGLTVLPPLLTDEMIAQYTSALLAGTITSGWTFGAGAALQIPFAMQMAYRFNGIGVTQNVLYENQKLIANQFNSAIGKIQDSLSSTASALGKLQDVVNQNAQALNTLVKQLSSNFGAISSVLNDILSRLDKVEAEVQIDRLITGRLQSLQTYVTQQLIRAAEIRASANLAATKMSECVLGQSKRVDFCGKGYHLMSFPQSAPHGVVFLHVTYVPAQEKNFTTAPAICHDGKAHFPREGVFVSNGTHWFVTQRNFCEPQIITTDNTFVSGNCDVVIGIVNNTVYDPLQPELDSFKEELDKYFKNHTSPDVDLGDISGINASVVNIQKEIDRLNEVAKNLNESLIDLQELGKYEQYIKGGSGYIPEAPRDGQAYVRKDGEWVLLSTFL

SEQ ID NO: 6045 - protein, 1241 aa, Artificial Sequence
  SARS-CoV-2/Wuhan/HBCDC-HB-02/2020__EPI_ISL_412978 spike protein (1-1211)(I714C_Y1110C) Foldon construct
MFVFLVLLPLVSSQCVNLTTRTQLPPAYTNSFTRGVYYPDKVFRSSVLHSTQDLFLPFFSNVTWFHAIHVSGTNGTKRFDNPVLPFNDGVYFASTEKSNIIRGWIFGTTLDSKTQSLLIVNNATNVVIKVCEFQFCNDPFLGVYYHKNNKSWMESEFRVYSSANNCTFEYVSQPFLMDLEGKQGNFKNLREFVFKNIDGYFKIYSKHTPINLVRDLPQGFSALEPLVDLPIGINITRFQTLLALHRSYLTPGDSSSGWTAGAAAYYVGYLQPRTFLLKYNENGTITDAVDCALDPLSETKCTLKSFTVEKGIYQTSNFRVQPTESIVRFPNITNLCPFGEVFNATRFASVYAWNRKRISNCVADYSVLYNSASFSTFKCYGVSPTKLNDLCFTNVYADSFVIRGDEVRQIAPGQTGKIADYNYKLPDDFTGCVIAWNSNNLDSKVGGNYNYLYRLFRKSNLKPFERDISTEIYQAGSTPCNGVEGFNCYFPLQSYGFQPTNGVGYQPYRVVVLSFELLHAPATVCGPKKSTNLVKNKCVNFNFNGLTGTGVLTESNKKFLPFQQFGRDIADTTDAVRDPQTLEILDITPCSFGGVSVITPGTNTSNQVAVLYQDVNCTEVPVAIHADQLTPTWRVYSTGSNVFQTRAGCLIGAEHVNNSYECDIPIGAGICASYQTQTNSPRRARSVASQSIIAYTMSLGAENSVAYSNNSIACPTNFTISVTTEILPVSMTKTSVDCTMYICGDSTECSNFLLQYGSFCTQLNRALTGIAVEQDKNTQEVFAQVKQIYKTPPIKDFGGFNFSQILPDPSKPSKRSFIEDLLFNKVTLADAGFIKQYGDCLGDIAARDLICAQKFNGLTVLPPLLTDEMIAQYTSALLAGTITSGWTFGAGAALQIPFAMQMAYRFNGIGVTQNVLYENQKLIANQFNSAIGKIQDSLSSTASALGKLQDVVNQNAQALNTLVKQLSSNFGAISSVLNDILSRLDKVEAEVQIDRLITGRLQSLQTYVTQQLIRAAEIRASANLAATKMSECVLGQSKRVDFCGKGYHLMSFPQSAPHGVVFLHVTYVPAQEKNFTTAPAICHDGKAHFPREGVFVSNGTHWFVTQRNFCEPQIITTDNTFVSGNCDVVIGIVNNTVYDPLQPELDSFKEELDKYFKNHTSPDVDLGDISGINASVVNIQKEIDRLNEVAKNLNESLIDLQELGKYEQYIKGGSGYIPEAPRDGQAYVRKDGEWVLLSTFL

SEQ ID NO: 6046 - protein, 1241 aa, Artificial Sequence
  SARS-CoV-2/Australia/QLD02/2020__EPI_ISL_407896 spike protein (1-1211)(I714C_Y1110C) Foldon construct
MFVFLVLLPLVSSQCVNLTTRTQLPPAYTNSFTRGVYYPDKVFRSSVLHSTQDLFLPFFSNVTWFHAIHVSGTNGTKRFDNPVLPFNDGVYFASTEKSNIIRGWIFGTTLDSKTQSLLIVNNATNVVIKVCEFQFCNDPFLGVYYHKNNKSWMESEFRVYSSANNCTFEYVSQPFLMDLEGKQGNFKNLREFVFKNIDGYFKIYSKHTPINLVRDLPQGFSALEPLVDLPIGINITRFQTLLALHRSYLTPGDSSSGWTAGAAAYYVGYLQPRTFLLKYNENGTITDAVDCALDPLSETKCTLKSFTVEKGIYQTSNFRVQPTESIVRFPNITNLCPFGEVFNATRFASVYAWNRKRISNCVADYSVLYNSASFSTFKCYGVSPTKLNDLCFTNVYADSFVIRGDEVRQIAPGQTGKIADYNYKLPDDFTGCVIAWNSNNLDSKVGGNYNYLYRLFRKSNLKPFERDISTEIYQAGSTPCNGVEGFNCYFPLQSYGFQPTNGVGYQPYRVVVLSFELLHAPATVCGPKKSTNLVKNKCVNFNFNGLTGTGVLTESNKKFLPFQQFGRDIADTTDAVRDPQTLEILDITPCSFGGVSVITPGTNTSNQVAVLYQDVNCTEVPVAIHADQLTPTWRVYSTGSNVFQTRAGCLIGAEHVNNSYECDIPIGAGICASYQTQTNSPRRARSVASQSIIAYTMSLGAENSVAYSNNSIACPTNFTISVTTEILPVSMTKTSVDCTMYICGDSTECSNLLLQYGSFCTQLNRALTGIAVEQDKNTQEVFAQVKQIYKTPPIKDFGGFNFSQILPDPSKPSKRSFIEDLLFNKVTLADAGFIKQYGDCLGDIAARDLICAQKFNGLTVLPPLLTDEMIAQYTSALLAGTITSGWTFGAGAALQIPFAMQMAYRFNGIGVTQNVLYENQKLIANQFNSAIGKIQDSLSSTASALGKLQDVVNQNAQALNTLVKQLSSNFGAISSVLNDILSRLDKVEAEVQIDRLITGRLQSLQTYVTQQLIRAAEIRASANLAATKMSECVLGQSKRVDFCGKGYHLMSFPQSAPHGVVFLHVTYVPAQEKNFTTAPAICHDGKAHFPREGVFVSNGTHWFVTQRNFCEPQIITTDNTFVSGNCDVVIGIVNNTVYDPLQLELDSFKEELDKYFKNHTSPDVDLGDISGINASVVNIQKEIDRLNEVAKNLNESLIDLQELGKYEQYIKGGSGYIPEAPRDGQAYVRKDGEWVLLSTFL

SEQ ID NO: 6047 - protein, 1241 aa, Artificial Sequence
  SARS-CoV-2/India/1-31/2020__EPI_ISL_413523 spike protein (1-1211)(I714C_Y1110C) Foldon construct
MFVFLVLLPLVSSQCVNLTTRTQLPPAYTNSFTRGVYYPDKVFRSSVLHSTQDLFLPFFSNVTWFHAIHVSGTNGTKRFDNPVLPFNDGVYFASTEKSNIIRGWIFGTTLDSKTQSLLIVNNATNVVIKVCEFQFCNDPFLGVYYHKNNKSWMESEFRVYSSANNCTFEYVSQPFLMDLEGKQGNFKNLREFVFKNIDGYFKIYSKHTPINLVRDLPQGFSALEPLVDLPIGINITRFQTLLALHRSYLTPGDSSSGWTAGAAAYYVGYLQPRTFLLKYNENGTITDAVDCALDPLSETKCTLKSFTVEKGIYQTSNFRVQPTESIVRFPNITNLCPFGEVFNATRFASVYAWNRKRISNCVADYSVLYNSASFSTFKCYGVSPTKLNDLCFTNVYADSFVIRGDEVRQIAPGQTGKIADYNYKLPDDFTGCVIAWNSNNLDSKVGGNYNYLYRLFRKSNLKPFERDISTEIYQAGSTPCNGVEGFNCYFPLQSYGFQPTNGVGYQPYRVVVLSFELLHAPATVCGPKKSTNLVKNKCVNFNFNGLTGTGVLTESNKKFLPFQQFGRDIADTTDAVRDPQTLEILDITPCSFGGVSVITPGTNTSNQVAVLYQDVNCTEVPVAIHADQLTPTWRVYSTGSNVFQTRAGCLIGAEHVNNSYECDIPIGAGICASYQTQTNSPRRARSVASQSIIAYTMSLGAENSVAYSNNSIACPTNFTISVTTEILPVSMTKTSVDCTMYICGDSTECSNLLLQYGSFCTQLNRALTGIAVEQDKNTQEVFAQVKQIYKTPPIKDFGGFNFSQILPDPSKPSKRSFIEDLLFNKVTLADAGFIKQYGDCLGDIAARDLICAQKFNGLTVLPPLLTDEMIAQYTSALLAGTITSGWTFGAGAALQIPFAMQMAYRFNGIGVTQNVLYENQKLIANQFNSVIGKIQDSLSSTASALGKLQDVVNQNAQALNTLVKQLSSNFGAISSVLNDILSRLDKVEAEVQIDRLITGRLQSLQTYVTQQLIRAAEIRASANLAATKMSECVLGQSKRVDFCGKGYHLMSFPQSAPHGVVFLHVTYVPAQEKNFTTAPAICHDGKAHFPREGVFVSNGTHWFVTQRNFCEPQIITTDNTFVSGNCDVVIGIVNNTVYDPLQPELDSFKEELDKYFKNHTSPDVDLGDISGINASVVNIQKEIDRLNEVAKNLNESLIDLQELGKYEQYIKGGSGYIPEAPRDGQAYVRKDGEWVLLSTFL

SEQ ID NO: 6048 - protein, 1241 aa, Artificial Sequence
  SARS-CoV-2/Guangdong/GD2020087-P0008/2020__EPI_ISL_413863 spike protein (1-1211)(I714C_Y1110C) Foldon construct
MFVFLVLLPLVSSQCVNLTTRTQLPPAYTNSFTRGVYYPDKVFRSSVLHSTQDLFLPFFSNVTWFHAIHVSGTNGTKRFDNPVLPFNDGVYFASTEKSNIIRGWIFGTTLDSKTQSLLIVNNATNVVIKVCEFQFCNDPFLGVYYHKNNKSWMESEFRVYSSANNCTFEYVSQPFLMDLEGKQGNFKNLREFVFKNIDGYFKIYSKHTPINLVRDLPQGFSALEPLVDLPIGINITRFQTLLALHRSYLTPGDSSSGWTAGAAAYYVGYLQPRTFLLKYNENGTITDAVDCALDPLSETKCTLKSFTVEKGIYQTSNFRVQPTESIVRFPNITNLCPFGEVFNATRFASVYAWNRKRISNCVADYSVLYNSASFSTFKCYGVSPTKLNDLCFTNVYADSFVIRGDEVREIAPGQTGKIADYNYKLPDDFTGCVIAWNSNNLDSKVGGNYNYLYRLFRKSNLKPFERDISTEIYQAGSTPCNGVEGFNCYFPLQSYGFQPTNGVGYQPYRVVVLSFELLHAPATVCGPKKSTNLVKNKCVNFNFNGLTGTGVLTESNKKFLPFQQFGRDIADTTDAVRDPQTLEILDITPCSFGGVSVITPGTNTSNQVAVLYQDVNCTEVPVAIHADQLTPTWRVYSTGSNVFQTRAGCLIGAEHVNNSYECDIPIGAGICASYQTQTNSPRRARSVASQSIIAYTMSLGAENSVAYSNNSIACPTNFTISVTTEILPVSMTKTSVDCTMYICGDSTECSNLLLQYGSFCTQLNRALTGIAVEQDKNTQEVFAQVKQIYKTPPIKDFGGFNFSQILPDPSKPSKRSFIEDLLFNKVTLADAGFIKQYGDCLGDIAARDLICAQKFNGLTVLPPLLTDEMIAQYTSALLAGTITSGWTFGAGAALQIPFAMQMAYRFNGIGVTQNVLYENQKLIANQFNSAIGKIQDSLSSTASALGKLQDVVNQNAQALNTLVKQLSSNFGAISSVLNDILSRLDKVEAEVQIDRLITGRLQSLQTYVTQQLIRAAEIRASANLAATKMSECVLGQSKRVDFCGKGYHLMSFPQSAPHGVVFLHVTYVPAQEKNFTTAPAICHDGKAHFPREGVFVSNGTHWFVTQRNFCEPQIITTDNTFVSGNCDVVIGIVNNTVYDPLQPELDSFKEELDKYFKNHTSPDVDLGDISGINASVVNIQKEIDRLNEVAKNLNESLIDLQELGKYEQYIKGGSGYIPEAPRDGQAYVRKDGEWVLLSTFL

SEQ ID NO: 6049 - protein, 1241 aa, Artificial Sequence
  SARS-CoV-2/Sweden/01/2020__EPI_ISL_411951 spike protein (1-1211)(I714C_Y1110C) Foldon construct
MFVFLVLLPLVSSQCVNLTTRTQLPPAYTNSFTRGVYYPDKVFRSSVLHSTQDLFLPFFSNVTWFHAIHVSGTNGTKRFDNPVLPFNDGVYFASTEKSNIIRGWIFGTTLDSKTQSLLIVNNATNVVIKVCEFQFCNDPFLGVYYHKNNKSWMESEFRVYSSANNCTFEYVSQPFLMDLEGKQGNFKNLREFVFKNIDGYFKIYSKHTPINLVRDLPQGFSALEPLVDLPIGINITRFQTLLALHRSYLTPGDSSSGWTAGAAAYYVGYLQPRTFLLKYNENGTITDAVDCALDPLSETKCTLKSFTVEKGIYQTSNFRVQPTESIVRFPNITNLCPFGEVFNATRFASVYAWNRKRISNCVADYSVLYNSASFSTFKCYGVSPTKLNDLCFTNVYADSFVIRGDEVRQIAPGQTGKIADYNYKLPDDFTGCVIAWNSNNLDSKVGGNYNYLYRLFRKSNLKPFERDISTEIYQAGSTPCNGVEGFNCYFPLQSYGFQPTNGVGYQPYRVVVLSFELLHAPATVCGPKKSTNLVKNKCVNFNFNGLTGTGVLTESNKKFLPFQQFGRDIADTTDAVRDPQTLEILDITPCSFGGVSVITPGTNTSNQVAVLYQDVNCTEVPVAIHADQLTPTWRVYSTGSNVFQTRAGCLIGAEHVNNSYECDIPIGAGICASYQTQTNSPRRARSVASQSIIAYTMSLGAENSVAYSNNSIACPTNFTISVTTEILPVSMTKTSVDCTMYICGDSTECSNLLLQYGSFCTQLNRALTGIAVEQDKNTQEVFAQVKQIYKTPPIKDCGGFNFSQILPDPSKPSKRSFIEDLLFNKVTLADAGFIKQYGDCLGDIAARDLICAQKFNGLTVLPPLLTDEMIAQYTSALLAGTITSGWTFGAGAALQIPFAMQMAYRFNGIGVTQNVLYENQKLIANQFNSAIGKIQDSLSSTASALGKLQDVVNQNAQALNTLVKQLSSNFGAISSVLNDILSRLDKVEAEVQIDRLITGRLQSLQTYVTQQLIRAAEIRASANLAATKMSECVLGQSKRVDFCGKGYHLMSFPQSAPHGVVFLHVTYVPAQEKNFTTAPAICHDGKAHFPREGVFVSNGTHWFVTQRNFCEPQIITTDNTFVSGNCDVVIGIVNNTVYDPLQPELDSFKEELDKYFKNHTSPDVDLGDISGINASVVNIQKEIDRLNEVAKNLNESLIDLQELGKYEQYIKGGSGYIPEAPRDGQAYVRKDGEWVLLSTFL

SEQ ID NO: 6050 - protein, 1241 aa, Artificial Sequence
  SARS-CoV-2/Tianmen/HBCDC-HB-07/2020__EPI_ISL_412983 spike protein (1-1211)(I714C_Y1110C) Foldon construct
MFVFLVLLPLVSSQCVNLTTRTQLPPAYTNSFTRGVYYPDKVFRSSVLHSTQDLFLPFFSNVTWFHAIHVSGTNGTKRFDNPVLPFNDGVYFASTEKSNIIRGWIFGTTLDSKTQSLLIVNNATNVVIKVCEFQFCNDPFLGVYYHKNNKSWMESEFRVYSSANNCTFEYVSQPFLMDLEGKQGNFKNLREFVFKNIDGYFKIYSKHTPINLVRDLPQGFSALEPLVDLPIGINITRFQTLLALHRSYLTPGDSSSGWTAGAAAYYVGYLQPRTFLLKYNENGTITDAVDCALDPLSETKCTLKSFTVEKGIYQTSNFRVQPTESIVRFPNITNLCPFGEVFNATRFASVYAWNRKRISNCVADYSVLYNSASFSTFKCYGVSPTKLNDLCFTNVYADSFVIRGDEVRQIAPGQTGKIADYNYKLPDDFTGCVIAWNSNNLDSKVGGNYNYLYRLFRKSNLKPFERDISTEIYQAGSTPCNGVEGFNCYFPLQSYGFQPTNGVGYQPYRVVVLSFELLHAPATVCGPKKSTNLVKNKCVNFNFNGLTGTGVLTESNKKFLPFQQFGRDIADTTDAVRDPQTLEILDITPCSFGGVSVITPGTNTSNQVAVLYQDLNCTEVPVAIHADQLTPTWRVYSTGSNVFQTRAGCLIGAEHVNNSYECDIPIGAGICASYQTQTNSPRRARSVASQSIIAYTMSLGAENSVAYSNNSIACPTNFTISVTTEILPVSMTKTSVDCTMYICGDSTECSNLLLQYGSFCTQLNRALTGIAVEQDKNTQEVFAQVKQIYKTPPIKDFGGFNFSQILPDPSKPSKRSFIEDLLFNKVTLADAGFIKQYGDCLGDIAARDLICAQKFNGLTVLPPLLTDEMIAQYTSALLAGTITSGWTFGAGAALQIPFAMQMAYRFNGIGVTQNVLYENQKLIANQFNSAIGKIQDSLSSTASALGKLQDVVNQNAQALNTLVKQLSSNFGAISSVLNDILSRLDKVEAEVQIDRLITGRLQSLQTYVTQQLIRAAEIRASANLAATKMSECVLGQSKRVDFCGKGYHLMSFPQSAPHGVVFLHVTYVPAQEKNFTTAPAICHDGKAHFPREGVFVSNGTHWFVTQRNFCEPQIITTDNTFVSGNCDVVIGIVNNTVYDPLQPELDSFKEELDKYFKNHTSPDVDLGDISGINASVVNIQKEIDRLNEVAKNLNESLIDLQELGKYEQYIKGGSGYIPEAPRDGQAYVRKDGEWVLLSTFL

SEQ ID NO: 6051 - protein, 1241 aa, Artificial Sequence
  SARS-CoV-2/Hong Kong/case42_VM20002493/2020__EPI_ISL_414527 spike protein (1-1211)(I714C_Y1110C) Foldon construct
MFVFLVLLPLVSSQCVNLTTRTQLPPAYTNSFTRGVYYPDKVFRSSVLHSTQDLFLPFFSNVTWFHAIHVSGTNGTKRFDNPVLPFNDGVYFASTEKSNIIRGWIFGTTLDSKTQSLLIVNNATNVVIKVCEFQFCNDPFLGVYYHKNNKSWMESEFRVYSSANNCTFEYVSQPFLMDLEGKQGNFKNLREFVFKNIDGYFKIYSKHTPINLVRDLPQGFSALEPLVDLPIGINITRFQTLLALHRSYLTPGDSSSGWTAGAAAYYVGYLQPRTFLLKYNENGTITDAVDCALDPLSETKCTLKSFTVEKGIYQTSNFRVQPTESIVRFPNITNLCPFGEVFNATRFASVYAWNRKRISNCVADYSVLYNSASFSTFKCYGVSPTKLNDLCFTNVYADSFVIRGDEVRQIAPGQTGKIADYNYKLPDDFTGCVIAWNSNNLDSKVGGNYNYLYRLFRKSNLKPFERDISTEIYQAGSTPCNGVEGFNCYFPLQSYGFQPTNGVGYQPYRVVVLSFELLHAPATVCGPKKSTNLVKNKCVNFNFNGLTGTGVLTESNKKFLPFQQFGRDIADTTDAVRDPQTLEILDITPCSFGGVSVITPGTNTSNQVAVLYQDVNCTEVPVAIHADQLTPTWRVYSTGSNVFQTRAGCLIGAEHVNNSYECDIPIGAGICASYQTQTNSPRRARSVASQSIIAYTMSLGAENSVAYSNNSIACPTNFAISVTTEILPVSMTKTSVDCTMYICGDSTECSNLLLQYGSFCTQLNRALTGIAVEQDKNTQEVFAQVKQIYKTPPIKDFGGFNFSQILPDPSKPSKRSFIEDLLFNKVTLADAGFIKQYGDCLGDIAARDLICAQKFNGLTVLPPLLTDEMIAQYTSALLAGTITSGWTFGAGAALQIPFAMQMAYRFNGIGVTQNVLYENQKLIANQFNSAIGKIQDSLSSTASALGKLQDVVNQNAQALNTLVKQLSSNFGAISSVLNDILSRLDKVEAEVQIDRLITGRLQSLQTYVTQQLIRAAEIRASANLAATKMSECVLGQSKRVDFCGKGYHLMSFPQSAPHGVVFLHVTYVPAQEKNFTTAPAICHDGKAHFPREGVFVSNGTHWFVTQRNFCEPQIITTDNTFVSGNCDVVIGIVNNTVYDPLQPELDSFKEELDKYFKNHTSPDVDLGDISGINASVVNIQKEIDRLNEVAKNLNESLIDLQELGKYEQYIKGGSGYIPEAPRDGQAYVRKDGEWVLLSTFL

SEQ ID NO: 6052 - protein, 1241 aa, Artificial Sequence
  SARS-CoV-2/USA/CruiseA-23/2020__EPI_ISL_414482 spike protein (1-1211)(I714C_Y1110C) Foldon construct
MFVFLVLLPLVSSQCVNLTTRTQLPPAYTNSFTRGVYYPDKVFRSSVLHSTQDLFLPFFSNVTWFHAIHVSGTNGTKRFDNPVLPFNDGVYFASTEKSNIIRGWIFGTTLDSKTQSLLIVNNATNVVIKVCEFQFCNDPFLGVYYHKNNKSWMESEFRVYSSANNCTFEYVSQPFLMDLEVKQGNFKNLREFVFKNIDGYFKIYSKHTPINLVRDLPQGFSALEPLVDLPIGINITRFQTLLALHRSYLTPGDSSSGWTAGAAAYYVGYLQPRTFLLKYNENGTITDAVDCALDPLSETKCTLKSFTVEKGIYQTSNFRVQPTESIVRFPNITNLCPFGEVFNATRFASVYAWNRKRISNCVADYSVLYNSASFSTFKCYGVSPTKLNDLCFTNVYADSFVIRGDEVRQIAPGQTGKIADYNYKLPDDFTGCVIAWNSNNLDSKVGGNYNYLYRLFRKSNLKPFERDISTEIYQAGSTPCNGVEGFNCYFPLQSYGFQPTNGVGYQPYRVVVLSFELLHAPATVCGPKKSTNLVKNKCVNFNFNGLTGTGVLTESNKKFLPFQQFGRDIADTTDAVRDPQTLEILDITPCSFGGVSVITPGTNTSNQVAVLYQDVNCTEVPVAIHADQLTPTWRVYSTGSNVFQTRAGCLIGAEHVNNSYECDIPIGAGICASYQTQTNSPRRARSVASQSIIAYTMSLGAENSVAYSNNSIACPTNFTISVTTEILPVSMTKTSVDCTMYICGDSTECSNLLLQYGSFCTQLNRALTGIAVEQDKNTQEVFAQVKQIYKTPPIKDFGGFNFSQILPDPSKPSKRSFIEDLLFNKVTLADAGFIKQYGDCLGDIAARDLICAQKFNGLTVLPPLLTDEMIAQYTSALLAGTITSGWTFGAGAALQIPFAMQMAYRFNGIGVTQNVLYENQKLIANQFNSAIGKIQDSLSSTASALGKLQDVVNQNAQALNTLVKQLSSNFGAISSVLNDILSRLDKVEAEVQIDRLITGRLQSLQTYVTQQLIRAAEIRASANLAATKMSECVLGQSKRVDFCGKGYHLMSFPQSAPHGVVFLHVTYVPAQEKNFTTAPAICHDGKAHFPREGVFVSNGTHWFVTQRNFCEPQIITTDNTFVSGNCDVVIGIVNNTVYDPLQPELDSFKEELDKYFKNHTSPDVDLGDISGINASVVNIQKEIDRLNEVAKNLNESLIDLQELGKYEQYIKGGSGYIPEAPRDGQAYVRKDGEWVLLSTFL

SEQ ID NO: 6053 - protein, 1241 aa, Artificial Sequence
  SARS-CoV-2/Hong Kong/case85_VM20002868/2020__EPI_ISL_414519 spike protein (1-1211)(I714C_Y1110C) Foldon construct
MFVFLVLVPLVSSQCVNLTTRTQLPPAYTNSFTRGVYYPDKVFRSSVLHSTQDLFLPFFSNVTWFHAIHVSGTNGTKRFDNPVLPFNDGVYFASTEKSNIIRGWIFGTTLDSKTQSLLIVNNATNVVIKVCEFQFCNDPFLGVYYHKNNKSWMESEFRVYSSANNCTFEYVSQPFLMDLEGKQGNFKNLREFVFKNIDGYFKIYSKHTPINLVRDLPQGFSALEPLVDLPIGINITRFQTLLALHRSYLTPGDSSSGWTAGAAAYYVGYLQPRTFLLKYNENGTITDAVDCALDPLSETKCTLKSFTVEKGIYQTSNFRVQPTESIVRFPNITNLCPFGEVFNATRFASVYAWNRKRISNCVADYSVLYNSASFSTFKCYGVSPTKLNDLCFTNVYADSFVIRGDEVRQIAPGQTGKIADYNYKLPDDFTGCVIAWNSNNLDSKVGGNYNYLYRLFRKSNLKPFERDISTEIYQAGSTPCNGVEGFNCYFPLQSYGFQPTNGVGYQPYRVVVLSFELLHAPATVCGPKKSTNLVKNKCVNFNFNGLTGTGVLTESNKKFLPFQQFGRDIADTTDAVRDPQTLEILDITPCSFGGVSVITPGTNTSNQVAVLYQDVNCTEVPVAIHADQLTPTWRVYSTGSNVFQTRAGCLIGAEHVNNSYECDIPIGAGICASYQTQTNSPRRARSVASQSIIAYTMSLGAENSVAYSNNSIACPTNFTISVTTEILPVSMTKTSVDCTMYICGDSTECSNLLLQYGSFCTQLNRALTGIAVEQDKNTQEVFAQVKQIYKTPPIKDFGGFNFSQILPDPSKPSKRSFIEDLLFNKVTLADAGFIKQYGDCLGDIAARDLICAQKFNGLTVLPPLLTDEMIAQYTSALLAGTITSGWTFGAGAALQIPFAMQMAYRFNGIGVTQNVLYENQKLIANQFNSAIGKIQDSLSSTASALGKLQDVVNQNAQALNTLVKQLSSNFGAISSVLNDILSRLDKVEAEVQIDRLITGRLQSLQTYVTQQLIRAAEIRASANLAATKMSECVLGQSKRVDFCGKGYHLMSFPQSAPHGVVFLHVTYVPAQEKNFTTAPAICHDGKAHFPREGVFVSNGTHWFVTQRNFCEPQIITTDNTFVSGNCDVVIGIVNNTVYDPLQPELDSFKEELDKYFKNHTSPDVDLGDISGINASVVNIQKEIDRLNEVAKNLNESLIDLQELGKYEQYIKGGSGYIPEAPRDGQAYVRKDGEWVLLSTFL

SEQ ID NO: 6054 - protein, 1241 aa, Artificial Sequence; identical to SEQ ID NO: 6044
  SARS-CoV-2/England/200990660/2020__EPI_ISL_414523 spike protein (1-1211)(I714C_Y1110C) Foldon construct

SEQ ID NO: 6055 - protein, 1241 aa, Artificial Sequence
  SARS-CoV-2/Australia/NSW09/2020__EPI_ISL_413595 spike protein (1-1211)(I714C_Y1110C) Foldon construct
MFVFLVLLPLVSSQCVNLTTRTQLPPAYTNSFTRGVYYPDKVFRSSVLHSTQDLFLPFFSNVTWFHAIHVSGTNGTKRFDNPVLPFNDGVYFASTEKSNIIRGWIFGTTLDSKTQSLLIVNNATNVVIKVCEFQFCNDPFLGVYYHKNNKSWMESEFRVYSSANNCTFEYVSQPFLMDLEGKQGNFKNLREFVFKNIDGYFKIYSKHTPINLVRDLPQGFSALEPLVDLPIGINITRFQTLLALHRSYLTPGDSSSGWTAGAAAYYVGYLQPRTFLLKYNENGTITDAVDCALDPLSETKCTLKSFTVEKGIYQTSNFRVQPTESIVRFPNITNLCPFGEVFNATRFASVYAWNRKRISNCVADYSVLYNSASFSTFKCYGVSPTKLNDLCFTNVYADSFVIRGDEVRQIAPGQTGKIADYNYKLPDDFTGCVIAWNSNNLDSKVGGNYNYLYRLFRKSNLKPFERDISTEIYQAGSTPCNGVEGFNCYFPLQSYGFQPTNGVGYQPYRVVVLSFELLHAPATVCGPKKSTNLVKNKCVNFNFNGLTGTGVLTESNKKFLPFQQFGRDIADTTDAVRDPQTLEILDITPCSFGGVSVITPGTNTSNQVAVLYQDVNCTEVPVAIHADQLTPTWRVYSTGSNVFQTRAGCLIGAEHVNNSYECDIPIGAGICASYQTQTNSPRRARSVASQSIIAYTMSLGAENSVAYSNNSIACPTNFTISVTTEILPVSMTKTSVDCTMYICGDSTECSNLLLQYGSFCTQLNRALTGIAVEQDKNTQEVFAQVKQIYKTPPIKDFGGFNFSQILPDPSKPSKRSFIEDLLFNKVTLADAGFIKQYGDCLGDIAARDLICAQKFNGLTVLPPLLTDEMIAQYTSALLAGTITSGWTFGAGAALQIPFAMQMAYRFNGIGVTQNVLYENQKLIANQFNSAIGKIQDSLSFTASALGKLQDVVNQNAQALNTLVKQLSSNFGAISSVLNDILSRLDKVEAEVQIDRLITGRLQSLQTYVTQQLIRAAEIRASANLAATKMSECVLGQSKRVDFCGKGYHLMSFPQSAPHGVVFLHVTYVPAQEKNFTTAPAICHDGKAHFPREGVFVSNGTHWFVTQRNFCEPQIITTDNTFVSGNCDVVIGIVNNTVYDPLQPELDSFKEELDKYFKNHTSPDVDLGDISGINASVVNIQKEIDRLNEVAKNLNESLIDLQELGKYEQYIKGGSGYIPEAPRDGQAYVRKDGEWVLLSTFL

SEQ ID NO: 6056 - protein, 1241 aa, Artificial Sequence; identical to SEQ ID NO: 6036
  SARS-CoV-2/Australia/NSW10/2020__EPI_ISL_413596 spike protein (1-1211)(I714C_Y1110C) Foldon construct

SEQ ID NO: 6057 - protein, 1241 aa, Artificial Sequence
  SARS-CoV-2/Switzerland/1000477797/2020__EPI_ISL_413023 spike protein (1-1211)(I714C_Y1110C) Foldon construct
MFVFLVLLPLVSSQCVNLTTRTQLPPAYTNSFTRGVYYPDKVFRSSVLHSTQDLFLPFFSNVTWFHAIHVSGTNGTKRFDNPVLPFNDGVYFASTEKSNIIRGWIFGTTLDSKTQSLLIVNNATNVVIKVCEFQFCNDPFLGVYYHKNNKSWMESEFRVYSSANNCTFEYVSQPFLMDLEGKQGNFKNLREFVFKNIDGYFNIYSKHTPINLVRDLPQGFSALEPLVDLPIGINITRFQTLLALHRSYLTPGDSSSGWTAGAAAYYVGYLQPRTFLLKYNENGTITDAVDCALDPLSETKCTLKSFTVEKGIYQTSNFRVQPTESIVRFPNITNLCPFGEVFNATRFASVYAWNRKRISNCVADYSVLYNSASFSTFKCYGVSPTKLNDLCFTNVYADSFVIRGDEVRQIAPGQTGKIADYNYKLPDDFTGCVIAWNSNNLDSKVGGNYNYLYRLFRKSNLKPFERDISTEIYQAGSTPCNGVEGFNCYFPLQSYGFQPTNGVGYQPYRVVVLSFELLHAPATVCGPKKSTNLVKNKCVNFNFNGLTGTGVLTESNKKFLPFQQFGRDIADTTDAVRDPQTLEILDITPCSFGGVSVITPGTNTSNQVAVLYQGVNCTEVPVAIHADQLTPTWRVYSTGSNVFQTRAGCLIGAEHVNNSYECDIPIGAGICASYQTQTNSPRRARSVASQSIIAYTMSLGAENSVAYSNNSIACPTNFTISVTTEILPVSMTKTSVDCTMYICGDSTECSNLLLQYGSFCTQLNRALTGIAVEQDKNTQEVFAQVKQIYKTPPIKDFGGFNFSQILPDPSKPSKRSFIEDLLFNKVTLADAGFIKQYGDCLGDIAARDLICAQKFNGLTVLPPLLTDEMIAQYTSALLAGTITSGWTFGAGAALQIPFAMQMAYRFNGIGVTQNVLYENQKLIANQFNSAIGKIQDSLSSTASALGKLQDVVNQNAQALNTLVKQLSSNFGAISSVLNDILSRLDKVEAEVQIDRLITGRLQSLQTYVTQQLIRAAEIRASANLAATKMSECVLGQSKRVDFCGKGYHLMSFPQSAPHGVVFLHVTYVPAQEKNFTTAPAICHDGKAHFPREGVFVSNGTHWFVTQRNFCEPQIITTDNTFVSGNCDVVIGIVNNTVYDPLQPELDSFKEELDKYFKNHTSPDVDLGDISGINASVVNIQKEIDRLNEVAKNLNESLIDLQELGKYEQYIKGGSGYIPEAPRDGQAYVRKDGEWVLLSTFL

SEQ ID NO: 6058 - protein, 1241 aa, Artificial Sequence
  SARS-CoV-2/Belgium/BA-02291/2020__EPI_ISL_415159 spike protein (1-1211)(I714C_Y1110C) Foldon construct
MFVFLVLLPLVSSQCVNLTTRTQLPPAYTNSFTRGVYYPDKVFRSSVLHSTQDLFLPFFSNVTWFHAIHVSGTNGTKRFDNPVLPFNDGVYFASTEKSNIIRGWIFGTTLDSKTQSLLIVNNATNVVIKVCEFQFCNDPFLGVYYHKNNKSWMESEFRVYSSANNCTFEYVSQPFLMDLEGKQGNFKNLREFVFKNIDGYFKIYSKHTPINLVRDLPQGFSALEPLVDLPIGINITRFQTLLALHRSYLTPGDSSSGWTAGAAAYYVGYLQPRTFLLKYNENGTITDAVDCALDPLSETKCTLKSFTVEKGIYQTSNFRVQPTESIVRFPNITNLCPFGEVFNATRFASVYAWNRKRISNCVADYSVLYNSASFSTFKCYGVSPTKLNDLCFTNVYADSFVIRGDEVRQIAPGQTGKIADYNYKLPDDFTGCVIAWNSNNLDSKVGGNYNYLYRLFRRSNLKPFERDISTEIYQAGSTPCNGVEGFNCYFPLQSYGFQPTNGVGYQPYRVVVLSFELLPAPATVCGPKKSTNLVKNKCVNFNFNGLTGTGVLTESNKKFLPFQQFGRDIADTTDAVRDPQTLEILDITPCSFGGVSVITPGTNTSNQVAVLYQGVNCTEVPVAIHADQLTPTWRVYSTGSNVFQTRAGCLIGAEHVNNSYECDIPIGAGICASYQTQTNSPRRARSVASQSIIAYTMSLGAENSVAYSNNSIACPTNFTISVTTEILPVSMTKTSVDCTMYICGDSTECSNLLLQYGSFCTQLNRALTGIAVEQDKNTQEVFAQVKQIYKTPPIKDFGGFNFSQILPDPSKPSKRSFIEDLLFNKVTLADAGFIKQYGDCLGDIAARDLICAQKFNGLTVLPPLLTDEMIAQYTSALLAGTITSGWTFGAGAALQIPFAMQMAYRFNGIGVTQNVLYENQKLIANQFNSAIGKIQDSLSSAAPALGKLQDVVNQNAQALNTLVKQLSSNFGAISSVLNDILSRLDKVEAEVQIDRLITGRLQSLQTYVTQQLIRAAEIRASANLAATKMSECVLGQSKRVDFCGKGYHLMSFPQSAPHGVVFLHVTYVPAQEKNFTTAPAICHDGKAHFPREGVFVSNGTHWFVTQRNFCEPQIITTDNTFVSGNCDVVIGIVNNTVYDPLQPELDSFKEELDKYFKNHTSPDVDLGDISGINASVVNIQKEIDRLNEVAKNLNESLIDLQELGKYEQYIKGGSGYIPEAPRDGQAYVRKDGEWVLLSTFL

SEQ ID NO: 6059 - protein, 1241 aa, Artificial Sequence
  SARS-CoV-2/USA/WA8-UW5/2020__EPI_ISL_413486 spike protein (1-1211)(I714C_Y1110C) Foldon construct
MFVFLVLLPLVSSQCVNLTTRTQLPPAYTNSFTRGVYYPDKVFRSSVLHSTQDLFLPFFSNVTWFHAIHVSGTNGTKRFDNPVLPFNDGVYFASTEKSNIIRGWIFGTTLDSKTQSLLIVNNATNVVIKVCEFQFCNDPFLGVYYHKNNKSWMESEFRVYSSANNCTFEYVSQPFLMDLEGKQGNFKNLREFVFKNIDGYFKIYSKHTPINLVRDLPQGFSALEPLVDLPIGINITRFQTLLALHRSYLTPGDSSSGWTAGAAAYYVGYLQPRTFLLKYNENGTITDAVDCALDPLSETKCTLKSFTVEKGIYQTSNFRVQPTESIVRFPNITNLCPFGEVFNATRFASVYAWNRKRISNCVADYSVLYNSASFSTFKCYGVSPTKLNDLCFTNVYADSFVIRGDEVRQIAPGQTGKIADYNYKLPDDFTGCVIAWNSNNLDSKVGGNYNYLYRLFRKSNLKPFERDISTEIYQAGSTPCNGVEGFNCYFPLQSYGFQPTNGVGYQPYRVVVLSFELLHAPATVCGPKKSTNLVKNKCVNFNFNGLTGTGVLTESNKKFLPFQQFGRDIADTTDAVRDPQTLEILDITPCSFGGVSVITPGTNTSNQVAVLYQDVNCTEVPVAIHADQLTPTWRVYSTGSNVFQTRAGCLIGAEYVNNSYECDIPIGAGICASYQTQTNSPRRARSVASQSIIAYTMSLGAENSVAYSNNSIACPTNFTISVTTEILPVSMTKTSVDCTMYICGDSTECSNLLLQYGSFCTQLNRALTGIAVEQDKNTQEVFAQVKQIYKTPPIKDFGGFNFSQILPDPSKPSKRSFIEDLLFNKVTLADAGFIKQYGDCLGDIAARDLICAQKFNGLTVLPPLLTDEMIAQYTSALLAGTITSGWTFGAGAALQIPFAMQMAYRFNGIGVTQNVLYENQKLIANQFNSAIGKIQDSLSSTASALGKLQDVVNQNAQALNTLVKQLSSNFGAISSVLNDILSRLDKVEAEVQIDRLITGRLQSLQTYVTQQLIRAAEIRASANLAATKMSECVLGQSKRVDFCGKGYHLMSFPQSAPHGVVFLHVTYVPAQEKNFTTAPAICHDGKAHFPREGVFVSNGTHWFVTQRNFCEPQIITTDNTFVSGNCDVVIGIVNNTVYDPLQPELDSFKEELDKYFKNHTSPDVDLGDISGINASVVNIQKEIDRLNEVAKNLNESLIDLQELGKYEQYIKGGSGYIPEAPRDGQAYVRKDGEWVLLSTFL

SEQ ID NO: 6060 - protein, 1241 aa, Artificial Sequence
  SARS-CoV-2/England/20102000506/2020__EPI_ISL_415147 spike protein (1-1211)(I714C_Y1110C) Foldon construct
MFVFLVLLPLVSSQCVNLTTRTQLPPAYTNSFTRGVYYPDKVFRSSVLHSTQDLFLPFFSNVTWFHAIHVSGTNGTKRFDNPVLPFNDGVYFASTEKSNIIRGWIFGTTLDSKTQSLLIVNNATNVVIKVCEFQFCNDPFLGVYYHKNNKSWMESEFRVYSSANNCTFEYVSQPFLMDLEGKQGNFKNLREFVFKNIDGYFKIYSKHTPINLVRDLPQGFSALEPLVDLPIGINITRFQTLLALHRSYLTPGDSSSGWTAGAAAYYVGYLQPRTFLLKYNENGTITDAVDCALDPLSETKCTLKSFTVEKGIYQTSNFRVQPTESIVRFPNITNLCPFGEVFNATRFASVYAWNRKRISNCVADYSVLYNSASFSTFKCYGVSPTKLNDLCFTNVYADSFVIRGDEVRQIAPGQTGKIADYNYKLPDDFTGCVIAWNSNNLDSKVGGNYNYLYRLFRKSNLKPFERDISTEIYQAGSTPCNGVEGFNCYFPLQSYGFQPTNGVGYQPYRVVVLSFELLHAPATVCGPKKSTNLVKNKCVNFNFNGLTGTGVLTESNKKFLPFQQFGRDIADTTDAVRDPQTLEILDITPCSFGGVSVITPGTNTSNQVAVLYQGVNCTEVPVAIHADQLTPTWRVYSTGSNVFQTRAGCLIGAEHVNNSYECDIPIGAGICASYQTQTNSPRRARSVASQSIIAYTMSLGAENSVAYSNNSIACPTNFTISVTTEILPVSMTKTSVDCTMYICGDSTECSNLLLQYGSFCTQLNRALTGIAVEQDKNTQEVFAQVKQIYKTPPIKDFGGFNFSQILPDPSKPSKRSFIEDLLFNKVTLADAGFIKQYGYCLGDIAARDLICAQKFNGLTVLPPLLTDEMIAQYTSALLAGTITSGWTFGAGAALQIPFAMQMAYRFNGIGVTQNVLYENQKLIANQFNSAIGKIQDSLSSTASALGKLQDVVNQNAQALNTLVKQLSSNFGAISSVLNDILSRLDKVEAEVQIDRLITGRLQSLQTYVTQQLIRAAEIRASANLAATKMSECVLGQSKRVDFCGKGYHLMSFPQSAPHGVVFLHVTYVPAQEKNFTTAPAICHDGKAHFPREGVFVSNGTHWFVTQRNFCEPQIITTDNTFVSGNCDVVIGIVNNTVYDPLQPELDSFKEELDKYFKNHTSPDVDLGDISGINASVVNIQKEIDRLNEVAKNLNESLIDLQELGKYEQYIKGGSGYIPEAPRDGQAYVRKDGEWVLLSTFL

SEQ ID NO: 6061 - protein, 1241 aa, Artificial Sequence
  SARS-CoV-2/Belgium/VAG-03013/2020__EPI_ISL_415155 spike protein (1-1211)(I714C_Y1110C) Foldon construct
MFVFLVLLPLVSSQCVNLTTRTQLPPAYTNSFTRGVYYPDKVFRSSVLHSTQDLFLPFFSNVTWFHAIHVSGTNGTKRFDNPVLPFNDGVYFASTEKSNIIRGWIFGTTLDSKTQSLLIVNNATNVVIKVCEFQFCNDPFLGVYYHKNNKSWMESEFRVYSSANNCTFEYVSQPFLMDLEGKQGNFKNLREFVFKNIDGYFKIYSKHTPINLVRDLPQGFSALEPLVDLPIGINITRFQTLLALHRSYLTPGDSSSGWTAGAAAYYVGYLQPRTFLLKYNENGTITDAVDCALDPLSETKCTLKSFTVEKGIYQTSNFRVQPTESIVRFPNITNLCPFGEVFNATRFASVYAWNRKRISNCVADYSVLYNSASFSTFKCYGVSPTKLNDLCFTNVYADSFVIRGDEVRQIAPGQTGKIADYNYKLPDDFTGCVIAWNSNNLDSKVGGNYNYLYRLFRKSNLKPFERDISTEIYQAGSTPCNGVEGFNCYFPLQSYGFQPTNGVGYQPYRVVVLSFELLHAPATVCGPKKSTNLVKNKCVNFNFNGLTGTGVLTESNKKFLPFQQFGRDIADTTDAVRDPQTLEILDITPCSFGGVSVITPGTNTSNQVAVLYQGVNCTEVPVAIHADQLTPTWRVYSTGSNVFQTRAGCLIGAEHVNNSYECDIPIGAGICASYQTQTNSPRRARSVASQSIIAYTMSLGAENSVAYSNNSIACPTNFTISVTTEILPVSMTKTSVDCTMYICGDSTECSNLLLQYGSFCTQLNRALTGIAVEQDKNTQEVFAQVKQIYKTPPIKDFGGFNFSQILPDPSKPSKRSFIEDLLFNKVTLADAGFIKQYGDCLGDIAARDLICAQKFNGLTVLPPLLTDEMIAQYTSALLAGTITSGWTFGAGAALQIPFAMQMAYRFNGIGVTQNVLYENQKLIANQFNSAIGKIQDSLSSTATALGKLQDVVNQNAQALNTLVKQLSSNFGAISSVLNDILSRLDKVEAEVQIDRLITGRLQSLQTYVTQQLIRAAEIRASANLAATKMSECVLGQSKRVDFCGKGYHLMSFPQSAPHGVVFLHVTYVPAQEKNFTTAPAICHDGKAHFPREGVFVSNGTHWFVTQRNFCEPQIITTDNTFVSGNCDVVIGIVNNTVYDPLQPELDSFKEELDKYFKNHTSPDVDLGDISGINASVVNIQKEIDRLNEVAKNLNESLIDLQELGKYEQYIKGGSGYIPEAPRDGQAYVRKDGEWVLLSTFL

SEQ ID NO: 6062 - protein, 1241 aa, Artificial Sequence
  SARS-CoV-2/Belgium/BC-03016/2020__EPI_ISL_415157 spike protein (1-1211)(I714C_Y1110C) Foldon construct
MFVFLVLLPLVSSQCVNLTTRTQLPPAYTNSFTRGVYYPDKVFRSSVLHSTQDLFLPFFSNVTWFHAIHVSGTNGTKRFDNPVLPFNDGVYFASTEKSNIIRGWIFGTTLDSKTQSLLIVNNATNVVIKVCEFQFCNDPFLGVYYHKNNKSWMESEFRVYSSANNCTFEYVSQPFLMDLEGKQGNFKNLREFVFKNIDGYFKIYSKHTPINLVRDLPQGFSALEPLVDLPIGINITRFQTLLALHRSYLTPGDSSSGWTAGAAAYYVGYLQPRTFLLKYNENGTITDAVDCALDPLSETKCTLKSFTVEKGIYQTSNFRVQPTESIVRFPNITNLCPFGEVFNATRFASVYAWNRKRISNCVADYSVLYNSASFSTFKCYGVSPTKLNDLCFTNVYADSFVIRGDEVRQIAPGQTGKIADYNYKLPDDFTGCVIAWNSNNLDSKVGGNYNYLYRLFRKSNLKPFERDISTEIYQAGSTPCNGVEGFNCYFPLQSYGFQPTNGVGYQPYRVVVLSFELLHAPATVCGPKKSTNLVKNKCVNFNFNGLTGTGVLTESNKKFLPFQQFGRDIADTTDAVRDPQTLEILDITPCSFGGVSVITPGTNTSNQVAVLYQGVNCTEVPVAIHADQLTPTWRVYSTGSNVFQTRAGCLIGAEHVNNSYECDIPIGAGICASYQTQTNSPRRARSVASQSIIAYTMSLGAENSVAYSNNSIACPTNFTISVTTEILPVSMTKTSVDCTMYICGDSTECSNLLLQYGSFCTQLNRALTGIAVEQDKNTQEVFAQVKQIYKTPPIKDFGGFNFSQILPDPSKPSKRSFIEDLLFNKVTLADAGFIKQYGDCLGDIAARDLICAQKFNGLTVLPPLLTDEMIAQYTSALLAGTITSGWTFGAGAALQIPFAMQMAYRFNGIGVTQNVLYENQKLIANQFNSAIGKIQDSLSSTAPALGKLQDVVNQNAQALNTLVKQLSSNFGAISSVLNDILSRLDKVEAEVQIDRLITGRLQSLQTYVTQQLIRAAEIRASANLAATKMSECVLGQSKRVDFCGKGYHLMSFPQSAPHGVVFLHVTYVPAQEKNFTTAPAICHDGKAHFPREGVFVSNGTHWFVTQRNFCEPQIITTDNTFVSGNCDVVIGIVNNTVYDPLQPELDSFKEELDKYFKNHTSPDVDLGDISGINASVVNIQKEIDRLNEVAKNLNESLIDLQELGKYEQYIKGGSGYIPEAPRDGQAYVRKDGEWVLLSTFL

SEQ ID NO: 6063 - protein, 1241 aa, Artificial Sequence
  SARS-CoV-2/Germany/BavPat3/2020__EPI_ISL_414521 spike protein (1-1211)(I714C_Y1110C) Foldon construct
MFVFLVLLPLVSSQCVNLTTRTQLPPAYTNSFTRGVYYPDKVFRSSVLHSTQDLFLPFFSNVTWFHAIHVSGTNGTKRFDNPVLPFNDGVYFASTEKSNIIRGWIFGTTLDSKTQSLLIVNNATNVVIKVCEFQFCNDPFLGVYYHKNNKSWMESEFRVYSSANNCTFEYVSQPFLMDLEGKQGNFKNLREFVFKNIDGYFKIYSKHTPINLVRDLPQGFSALEPLVDLPIGINITRFQTLLALHRSYLTPGDSSSGWTAGAAAYYVGYLQPRTFLLKYNENGTITDAVDCALDPLSETKCTLKSFTVEKGIYQTSNFRVQPTESIVRFPNITNLCPFGEVFNATRFASVYAWNRKRISNCVADYSVLYNSASFSTFKCYGVSPTKLNDLCFTNVYADSFVIRGDEVRQIAPGQTGKIADYNYKLPDDFTGCVIAWNSNNLDSKVGGNYNYLYRLFRKSNLKPFERDISTEIYQAGSTPCNGVEGFNCYFPLQSYGFQPTNGVGYQPYRVVVLSFELLHAPATVCGPKKSTNLVKNKCVNFNFNGLTGTGVLTESNKKFLPFQQFGRDIADTTDAVRDPQTLEILDITPCSFGGVSVITPGTNTSNQVAVLYQDVNCTEVPVAIHADQLTPTWRVYSTGSNVFQTRAGCLIGAEHVNNSYECDIPIGAGICASYQTQTNSPRRARSVASQSIIAYTMSLGAENSVAYSNNSIACPTNFTISVTTEILPVSMTKTSVDCTMYICGDSTECSNLLLQYGSFCTQLNRALTGIAVEQDKNTQQVFAQVKQIYKTPPIKDFGGFNFSQILPDPSKPSKRSFIEDLLFNKVTLADAGFIKQYGDCLGDIAARDLICAQKFNGLTVLPPLLTDEMIAQYTSALLAGTITSGWTFGAGAALQIPFAMQMAYRFNGIGVTQNVLYENQKLIANQFNSAIGKIQDSLSSTASALGKLQDVVNQNAQALNTLVKQLSSNFGAISSVLNDILSRLDKVEAEVQIDRLITGRLQSLQTYVTQQLIRAAEIRASANLAATKMSECVLGQSKRVDFCGKGYHLMSFPQSAPHGVVFLHVTYVPAQEKNFTTAPAICHDGKAHFPREGVFVSNGTHWFVTQRNFCEPQIITTDNTFVSGNCDVVIGIVNNTVYDPLQPELDSFKEELDKYFKNHTSPDVDLGDISGINASVVNIQKEIDRLNEVAKNLNESLIDLQELGKYEQYIKGGSGYIPEAPRDGQAYVRKDGEWVLLSTFL

SEQ ID NO: 6064 - protein, 1241 aa, Artificial Sequence
  SARS-CoV-2/France/HF1805/2020__EPI_ISL_414628 spike protein (1-1211)(I714C_Y1110C) Foldon construct
MFVFLVLLPLVSSQCVNLTTRTQLPPAYTNSFTRGVYYPDKVFRSSVLHSTQDLFLPFFSNVTWFHAIHVSGTNGTKRFDNPVLPFNDGVYFASTEKSNIIRGWIFGTTLDSKTQSLLIVNNATNVVIKVCEFQFCNDPFLGVYYHKNNKSWMESEFRVYSSANNCTFEYVSQPFLMDLEGKQGNFKNLREFVFKNIDGYFKIYSKHTPINLVRDLPQGFSALEPLVDLPIGINITRFQTLLALHRSYLTPGDSSSGWTAGAAAYYVGYLQPRTFLLKYNENGTITDAVDCALDPLSETKCTLKSFTVEKGIYQTSNFRVQPTESIVRFPNITNLCPFGEVFNATRFASVYAWNRKRISNCVADYSVLYNSASFSTFKCYGVSPTKLNDLCFTNVYADSFVIRGDEVRQIAPGQTGKIADYNYKLPDDFTGCVIAWNSNNLDSKVGGNYNYLYRLFRKSNLKPFERDISTEIYQAGSTPCNGVEGFNCYFPLQSYGFQPTNGVGYQPYRVVVLSFELLHAPATVCGPKKSTNLVKNKCVNFNFNGLTGTGVLTESNKKFLPFQQFGRDIADTTDAVRDPQTLEILDITPCSFGGVSVITPGTNTSNQVAVLYQGVNCTEVPVAIHADQLTPTWRVYSTGSNVFQTRAGCLIGAEHVNNSYECDIPIGAGICASYQTQTNSPRRARSVASQSIIAYTMSLGAENSVAYSNNSIACPTNFTISVTTEILPVSMTKTSVDCTMYICGDSTECSNLLLQYGSFCTQLNRALTGIAVEQDKNTQEVFAQVKQIYKTPPIKDFGGFNFSQILPDPSKPSKRSFIEDLLFNKVTLADAGFIKQYGDCLGDIAARDLICAQKFNGLTVLPPLLTDEMIAQYTSALLAGTITSGWTFGAGAALQIPFAMQMAYRFNGIGVTQNVLYENQKLIANQFNSAIGKIQDSLSSTASALGKLQDVVNQNAQALNTLVKQLSSNFGAISSVLNDILSRLDKVEAEVQIDRLITGRLQSLQTYVTQQLIRAAEIRASANLAATKMSECVLGQSKRVDFCGKGYHLMSFPQSAPHGVVFLHVTYVPAQEKNFTTAPAICHDGKAHFPREGVFVSNGTHWFVTQRNFCEPQIITTDNTFVSGNCDVVIGVVNNTVYDPLQPELDSFKEELDKYFKNHTSPDVDLGDISGINASVVNIQKEIDRLNEVAKNLNESLIDLQELGKYEQYIKGGSGYIPEAPRDGQAYVRKDGEWVLLSTFL

SEQ ID NO: 6065 - protein, 1241 aa, Artificial Sequence
  SARS-CoV-2/Netherlands/ZuidHolland_9/2020__EPI_ISL_414445 spike protein (1-1211)(I714C_Y1110C) Foldon construct
MFVFLVLLPLVSSQCVNLTTRTQLPPAYTNSFTRGVYYPDKVFRSSVLHSTQDLFLPFFSNVTWFHAIHVSGTNGTKRFDNPVLPFNDGVYFASTEKSNIIRGWIFGTTLDSKTQSLLIVNNATNVVIKVCEFQFCNDPFLGVYYHKNNKSWMESEFRVYSSANNCTFEYVSQPFLMDLEGKQGNFKNLREFVFKNIDGYFKIYSKHTPINLVRDLPQGFSALEPLVDLPIGINITRFQTLLALHRSYLTPGDSSSGWTAGAAAYYVGYLQPRTFLLKYNENGTITDAVDCALDPLSETKCTLKSFTVEKGIYQTSNFRVQPTESIVRFPNITNLCPFGEVFNATRFASVYAWNRKRISNCVADYSVLYNSASFSTFKCYGVSPTKLNDLCFTNVYADSFVIRGDEVRQIAPGQTGKIADYNYKLPDDFTGCVIAWNSNNLDSKVGGNYNYLYRLFRKSNLKPFERDISTEIYQAGSTPCNGVEGFNCYFPLQSYGFQPTNGVGYQPYRVVVLSFELLHAPATVCGPKKSTNLVKNKCVNFNFNGLTGTGVLTESNKKFLPFQQFGRDIADTTDAVRDPQTLEILDITPCSFGGVSVITPGTNTSNQVAVLYQGVNCTEVPVAIHADQLTPTWRVYSTGSNVFQTRAGCLIGAEHVNNSYECDIPIGAGICASYQTQTNSPRRARSVASQSIIAYTMSLGAENSVAYSNNSIACPTNFTISVTTEILPVSMTKTSVDCTMYICGDSTECSNLLLQYGSFCTQLNRALTGIAVEQDKNTQEVFAQVKQIYKTPPIKDFGGFNFSQILPDPSKPSKRSFIEDLLFNKVTLADAGFIKQYGDCLGDIAARDLICVQKFNGLTVLPPLLTDEMIAQYTSALLAGTITSGWTFGAGAALQIPFAMQMAYRFNGIGVTQNVLYENQKLIANQFNSAIGKIQDSLSSTASALGKLQDVVNQNAQALNTLVKQLSSNFGAISSVLNDILSRLDKVEAEVQIDRLITGRLQSLQTYVTQQLIRAAEIRASANLAATKMSECVLGQSKRVDFCGKGYHLMSFPQSAPHGVVFLHVTYVPAQEKNFTTAPAICHDGKAHFPREGVFVSNGTHWFVTQRNFCEPQIITTDNTFVSGNCDVVIGIVNNTVYDPLQPELDSFKEELDKYFKNHTSPDVDLGDISGINASVVNIQKEIDRLNEVAKNLNESLIDLQELGKYEQYIKGGSGYIPEAPRDGQAYVRKDGEWVLLSTFL

SEQ ID NO: 6066 - protein, 1241 aa, Artificial Sequence
  SARS-CoV-2/Finland/FIN03032020A/2020__EPI_ISL_413602 spike protein (1-1211)(I714C_Y1110C) Foldon construct
MFVFLVLLPLVSSQCVNLTTRTQLPPAYTNSFTRGVYYPDKVFRSSVLHSTQDLFLPFFSNVTWFHAIHVSGTNGTKRFDNPVLPFNDGVYFASTEKSNIIRGWIFGTTLDSKTQSLLIVNNATNVVIKVCEFQFCNDPFLGVYYHKNNKSWMESEFRVYSSANNCTFEYVSQPFLMDLEGKQGNFKNLREFVFKNIDGYFKIYSKHTPINLVRDLPQGFSALEPLVDLPIGINITRFQTLLALHRSYLTPGDSSSGWTAGAAAYYVGYLQPRTFLLKYNENGTITDAVDCALDPLSETKCTLKSFTVEKGIYQTSNFRVQPTESIVRFPNITNLCPFGEVFNATRFASVYAWNRKRISNCVADYSVLYNSASFSTFKCYGVSPTKLNDLCFTNVYADSFVIRGDEVRQIAPGQTGKIADYNYKLPDDFTGCVISWNSNNLDSKVGGNYNYLYRLFRKSNLKPFERDISTEIYQAGSTPCNGVEGFNCYFPLQSYGFQPTNGVGYQPYRVVVLSFELLHAPATVCGPKKSTNLVKNKCVNFNFNGLTGTGVLTESNKKFLPFQQFGRDIADTTDAVRDPQTLEILDITPCSFGGVSVITPGTNTSNQVAVLYQGVNCTEVPVAIHADQLTPTWRVYSTGSNVFQTRAGCLIGAEHVNNSYECDIPIGAGICASYQTQTNSPRRARSVASQSIIAYTMSLGAENSVAYSNNSIACPTNFTISVTTEILPVSMTKTSVDCTMYICGDSTECSNLLLQYGSFCTQLNRALTGIAVEQDKNTQEVFAQVKQIYKTPPIKDFGGFNFSQILPDPSKPSKRSFIEDLLFNKVTLADAGFIKQYGDCLGDIAARDLICAQKFNGLTVLPPLLTDEMIAQYTSALLAGTITSGWTFGAGAALQIPFAMQMAYRFNGIGVTQNVLYENQKLIANQFNSAIGKIQDSLSSTASALGKLQDVVNQNAQALNTLVKQLSSNFGAISSVLNDILSRLDKVEAEVQIDRLITGRLQSLQTYVTQQLIRAAEIRASANLAATKMSECVLGQSKRVDFCGKGYHLMSFPQSAPHGVVFLHVTYVPAQEKNFTTAPAICHDGKAHFPREGVFVSNGTHWFVTQRNFCEPQIITTDNTFVSGNCDVVIGIVNNTVYDPLQPELDSFKEELDKYFKNHTSPDVDLGDISGINASVVNIQKEIDRLNEVAKNLNESLIDLQELGKYEQYIKGGSGYIPEAPRDGQAYVRKDGEWVLLSTFL

SEQ ID NO: 6067 - protein, 1241 aa, Artificial Sequence
  SARS-CoV-2/France/GE1977/2020__EPI_ISL_414632 spike protein (1-1211)(I714C_Y1110C) Foldon construct
MFVFLVLLPLVSSQCVNLTTRTQLPPAYTNSFTRGVYYPDKVFRSSVLHSTQDLFLPFFSNVTWFHAIHVSGTNGTKRFDNPVLPFNDGVYFASTEKSNIIRGWIFGTTLDSKTQSLLIVNNATNVVIKVCEFQFCNDPFLGVYYHKNNKSWMESEFRVYSSANNCTFEYVSQPFLMDLEGKQGNFKNLREFVFKNIDGYFKIYSKHTPINLVRDLPQGFSALEPLVDLPIGINITRFQTLLALHRSYLTPGDSSSGWTAGAAAYYVGYLQPRTFLLKYNENGTITDAVDCALDPLSETKCTLKSFTVEKGIYQTSNFRVQPTESIVRFPNITNLCPFGEVFNATRFASVYAWNRKRISNCVADYSVLYNSASFSTFKCYGVSPTKLNDLCFTNVYADSFVIRGDEVRQIAPGQTGKIADYNYKLPDDFTGCVIAWNSNNLDSKVGGNYNYLYRLFRKSNLKPFERDISTEIYQAGSTPCNGVEGFNCYFPLQSYGFQPTNGVGYQPYRVVVLSFELLHAPATVCGPKKSTNLVKNKCVNFNFNGLTGTGVLTESNKKFLPFQQFGRDIADTTDAVRDPQTLEILDITPCSFGGVSVITPGTNTSNQVAVLYQGVNCTEVPVAIHADQLTPTWRVYSTGSNVFQTRAGCLIGAEHVNNSYECDIPIGAGICASYQTQTNSPRRARSVASQSIIAYTMSLGAENSVAYSNNSIACPTNFTISVTTEILPVSMTKTSVDCTMYICGDSTECSNLLLQYGSFCTQLNRALTGIAVEQDKNTQEVFAQVKQIYKTPPIKDFGGFNFSQILPDPSKPSKRSFIEDLLFNKVTLADAGFIKQYGDCLGDIAARDLICAQKFNGLTVLPPLLTDEMIAQYTSALLAGTITSGWTFGAGAALQIPFAMQMAYRFNGIGVTQNVLYENQKLIANQFNSAIGKIQDSLFSTASALGKLQDVVNQNAQALNTLVKQLSSNFGAISSVLNDILSRLDKVEAEVQIDRLITGRLQSLQTYVTQQLIRAAEIRASANLAATKMSECVLGQSKRVDFCGKGYHLMSFPQSAPHGVVFLHVTYVPAQEKNFTTAPAICHDGKAHFPREGVFVSNGTHWFVTQRNFCEPQIITTDNTFVSGNCDVVIGIVNNTVYDPLQPELDSFKEELDKYFKNHTSPDVDLGDISGINASVVNIQKEIDRLNEVAKNLNESLIDLQELGKYEQYIKGGSGYIPEAPRDGQAYVRKDGEWVLLSTFL

SEQ ID NO: 6068 - protein, 1241 aa, Artificial Sequence
  SARS-CoV-2/Finland/FIN-313/2020__EPI_ISL_414641 spike protein (1-1211)(I714C_Y1110C) Foldon construct
MFVFLVLLPLVSSQCVNLTTRTQLPPAYTNSFTRGVYYPDKVFRSSVLHSTQDLFLPFFSNVTWFHAIHVSGTNGTKRFDNPVLPFNDGVYFASTEKSNIIRGWIFGTTLDSKTQSLLIVNNATNVVIKVCEFQFCNDPFLGVYYHKNNKSWMESEFRVYSSANNCTFEYVSQPFLMDLEGKQGNFKNLREFVFKNIDGYFKIYSKHTPINLVRDLPQGFSALEPLVDLPIGINITRFKTLLALHRSYLTPGDSSSGWTAGAAAYYVGYLQPRTFLLKYNENGTITDAVDCALDPLSETKCTLKSFTVEKGIYQTSNFRVQPTESIVRFPNITNLCPFGEVFNATRFASVYAWNRKRISNCVADYSVLYNSASFSTFKCYGVSPTKLNDLCFTNVYADSFVIRGDEVRQIAPGQTGKIADYNYKLPDDFTGCVIAWNSNNLDSKVGGNYNYLYRLFRKSNLKPFERDISTEIYQAGSTPCNGVEGFNCYFPLQSYGFQPTNGVGYQPYRVVVLSFELLHAPATVCGPKKSTNLVKNKCVNFNFNGLTGTGVLTESNKKFLPFQQFGRDIADTTDAVRDPQTLEILDITPCSFGGVSVITPGTNTSNQVAVLYQGVNCTEVPVAIHADQLTPTWRVYSTGSNVFQTRAGCLIGAEHVNNSYECDIPIGAGICASYQTQTNSPRRARSVASQSIIAYTMSLGAENSVAYSNNSIACPTNFTISVTTEILPVSMTKTSVDCTMYICGDSTECSNLLLQYGSFCTQLNRALTGIAVEQDKNTQEVFAQVKQIYKTPPIKDFGGFNFSQILPDPSKPSKRSFIEDLLFNKVTLADAGFIKQYGDCLGDIAARDLICAQKFNGLTVLPPLLTDEMIAQYTSALLAGTITSGWTFGAGAALQIPFAMQMAYRFNGIGVTQNVLYENQKLIANQFNSAIGKIQDSLSSTASALGKLQDVVNQNAQALNTLVKQLSSNFGAISSVLNDILSRLDKVEAEVQIDRLITGRLQSLQTYVTQQLIRAAEIRASANLAATKMSECVLGQSKRVDFCGKGYHLMSFPQSAPHGVVFLHVTYVPAQEKNFTTAPAICHDGKAHFPREGVFVSNGTHWFVTQRNFCEPQIITTDNTFVSGNCDVVIGIVNNTVYDPLQPELDSFKEELDKYFKNHTSPDVDLGDISGINASVVNIQKEIDRLNEVAKNLNESLIDLQELGKYEQYIKGGSGYIPEAPRDGQAYVRKDGEWVLLSTFL

SEQ ID NO: 6069 - protein, 1241 aa, Artificial Sequence
  SARS-CoV-2/Netherlands/ZuidHolland_2/2020__EPI_ISL_414556 spike protein (1-1211)(I714C_Y1110C) Foldon construct
MFVFLVLLPLVSSQCVNLTTRTQLPPAYTNSFTRGVYYPDKVFRSSVLHSTQDLFLPFFSNVTWFHAIHVSGTNGTKRFDNPVLPFNDGVYFASTEKSNIIRGWIFGTTLDSKTQSLLIVNNATNVVIKVCEFQFCNDPFLGVYYHKNNKSWMESEFRVYSSANNCTFEYVSQPFLMDLEGKQGNFKNLREFVFKNIDGYFKIYSKHTPINLVRDLPQGFSALEPLVDLPIGINITRFQTLLALHRSYLTPGDSSSGWTAGAAAYYVGYLQPRTFLLKYNENGTITDAVDCALDPLSETKCTLKSFTVEKGIYQTSNFRVQPTESIVRFPNITNLCPFGEVFNATRFASVYAWNRKRISNCVADYSVLYNSASFSTFKCYGVSPTKLNDLCFTNVYADSFVIRGDEVRQIAPGQTGKIADYNYKLPDDFTGCVIAWNSNNLDSKVGGNYNYLYRLFRKSNLKPFERDISTEIYQAGSTPCNGVEGFNCYFPLQSYGFQPTNGVGYQPYRVVVLSFELLHAPATVCGPKKSTNLVKNKCVNFNFNGLTGTGVLTESNKKFLPFQQFGRDIADTTDAVRDPQTLEILDITPCSFGGVSVITPGTNTSNQVAVLYQGVNCTEVPVAIHADQLTPTWRVYSTGSNVFQTRAGCLIGAEHVNNSYECDIPIGAGICASYQTQTNSPRRARSVASQSIIAYTMSLGAENSVAYSNNSIACPTNFTISVTTEILPVSMTKTSVDCTMYICGDSTECSNLLLQYGSFCTQLNRALTGIALEQDKNTQEVFAQVKQIYKTPPIKDFGGFNFSQILPDPSKPSKRSFIEDLLFNKVTLADAGFIKQYGDCLGDIAARDLICAQKFNGLTVLPPLLTDEMIAQYTSALLAGTITSGWTFGAGAALQIPFAMQMAYRFNGIGVTQNVLYENQKLIANQFNSAIGKIQDSLSSTASALGKLQDVVNQNAQALNTLVKQLSSNFGAISSVLNDILSRLDKVEAEVQIDRLITGRLQSLQTYVTQQLIRAAEIRASANLAATKMSECVLGQSKRVDFCGKGYHLMSFPQSAPHGVVFLHVTYVPAQEKNFTTAPAICHDGKAHFPREGVFVSNGTHWFVTQRNFCEPQIITTDNTFVSGNCDVVIGIVNNTVYDPLQPELDSFKEELDKYFKNHTSPDVDLGDISGINASVVNIQKEIDRLNEVAKNLNESLIDLQELGKYEQYIKGGSGYIPEAPRDGQAYVRKDGEWVLLSTFL

SEQ ID NO: 6070 - protein, 1241 aa, Artificial Sequence
  SARS-CoV-2/USA/WA-UW31/2020__EPI_ISL_414618 spike protein (1-1211)(I714C_Y1110C) Foldon construct
MFVFLVLLPLVSSQCVNLTTRTQLPPAYTNSFTRGVYYPDKVFRSSVLHSTQDLFLPFFSNVTWFHAIHVSGTNGTKRFDNPVLPFNDGVYFASTEKSNIIRGWIFGTTLDSKTQSLLIVNNATNVVIKVCEFQFCNDPFLGVYYHKNNKSWMESEFRVYSSANNCTFEYVSQPFLMDLEGKQGNFKNLREFVFKNIDGYFKIYSKHTPINLVRDLPQGFSALEPLVDLPIGINITRFQTLLALHRSYLTPGDSSSGWTAGAAAYYVGYLQPRTFLLKYNENGTITDAVDCALDPLSETKCTLKSFTVEKGIYQTSNFRVQPTESIVRFPNITNLCPFGEVFNATRFASVYAWNRKRISNCVADYSVLYNSASFSTFKCYGVSPTKLNDLCFTNVYADSFVIRGDEVRQIAPGQTGKIADYNYKLPDDFTGCVIAWNSNNLDSKVGGNYNYLYRLFRKSNLKPFERDISTEIYQAGSTPCNGAEGFNCYFPLQSYGFQPTNGVGYQPYRVVVLSFELLHAPATVCGPKKSTNLVKNKCVNFNFNGLTGTGVLTESNKKFLPFQQFGRDIADTTDAVRDPQTLEILDITPCSFGGVSVITPGTNTSNQVAVLYQDVNCTEVPVAIHADQLTPTWRVYSTGSNVFQTRAGCLIGAEHVNNSYECDIPIGAGICASYQTQTNSPRRARSVASQSIIAYTMSLGAENSVAYSNNSIACPTNFTISVTTEILPVSMTKTSVDCTMYICGDSTECSNLLLQYGSFCTQLNRALTGIAVEQDKNTQEVFAQVKQIYKTPPIKDFGGFNFSQILPDPSKPSKRSFIEDLLFNKVTLADAGFIKQYGDCLGDIAARDLICAQKFNGLTVLPPLLTDEMIAQYTSALLAGTITSGWTFGAGAALQIPFAMQMAYRFNGIGVTQNVLYENQKLIANQFNSAIGKIQDSLSSTASALGKLQDVVNQNAQALNTLVKQLSSNFGAISSVLNDILSRLDKVEAEVQIDRLITGRLQSLQTYVTQQLIRAAEIRASANLAATKMSECVLGQSKRVDFCGKGYHLMSFPQSAPHGVVFLHVTYVPAQEKNFTTAPAICHDGKAHFPREGVFVSNGTHWFVTQRNFCEPQIITTDNTFVSGNCDVVIGIVNNTVYDPLQPELDSFKEELDKYFKNHTSPDVDLGDISGINASVVNIQKEIDRLNEVAKNLNESLIDLQELGKYEQYIKGGSGYIPEAPRDGQAYVRKDGEWVLLSTFL

SEQ ID NO: 6071 - protein, 1241 aa, Artificial Sequence
  SARS-CoV-2/South Korea/SNU01/2020__EPI_ISL_411929 spike protein (1-1211)(I714C_Y1110C) Foldon construct
MFVFLVLLPLVSSQCVNLTTRTQLPPAYTNSFTRGVYYPDKVFRSSVLHSTQDLFLPFFSNVTWFHAIHVSGTNGTKRFDNPVLPFNDGVYFASTEKSNIIRGWIFGTTLDSKTQSLLIVNNATNVVIKVCEFQFCNDPFLGVYYHKNNKSWMESEFRVYSSANNCTFEYVSQPFLMDLEGKQGNFKNLREFVFKNIDGYFKIYSKHTPINLVRDLPQGFWALEPLVDLPIGINITRFQTLLALHRSYLTPGDSSSGWTAGAAAYYVGYLQPRTFLLKYNENGTITDAVDCALDPLSETKCTLKSFTVEKGIYQTSNFRVQPTESIVRFPNITNLCPFGEVFNATRFASVYAWNRKRISNCVADYSVLYNSASFSTFKCYGVSPTKLNDLCFTNVYADSFVIRGDEVRQIAPGQTGKIADYNYKLPDDFTGCVIAWNSNNLDSKVGGNYNYLYRLFRKSNLKPFERDISTEIYQAGSTPCNGVEGFNCYFPLQSYGFQPTNGVGYQPYRVVVLSFELLHAPATVCGPKKSTNLVKNKCVNFNFNGLTGTGVLTESNKKFLPFQQFGRDIADTTDAVRDPQTLEILDITPCSFGGVSVITPGTNTSNQVAVLYQDVNCTEVPVAIHADQLTPTWRVYSTGSNVFQTRAGCLIGAEHVNNSYECDIPIGAGICASYQTQTNSPRRARSVASQSIIAYTMSLGAENSVAYSNNSIACPTNFTISVTTEILPVSMTKTSVDCTMYICGDSTECSNLLLQYGSFCTQLNRALTGIAVEQDKNTQEVFAQVKQIYKTPPIKDFGGFNFSQILPDPSKPSKRSFIEDLLFNKVTLADAGFIKQYGDCLGDIAARDLICAQKFNGLTVLPPLLTDEMIAQYTSALLAGTITSGWTFGAGAALQIPFAMQMAYRFNGIGVTQNVLYENQKLIANQFNSAIGKIQDSLSSTASALGKLQDVVNQNAQALNTLVKQLSSNFGAISSVLNDILSRLDKVEAEVQIDRLITGRLQSLQTYVTQQLIRAAEIRASANLAATKMSECVLGQSKRVDFCGKGYHLMSFPQSAPHGVVFLHVTYVPAQEKNFTTAPAICHDGKAHFPREGVFVSNGTHWFVTQRNFCEPQIITTDNTFVSGNCDVVIGIVNNTVYDPLQPELDSFKEELDKYFKNHTSPDVDLGDISGINASVVNIQKEIDRLNEVAKNLNESLIDLQELGKYEQYIKGGSGYIPEAPRDGQAYVRKDGEWVLLSTFL

SEQ ID NO: 6072 - protein, 1241 aa, Artificial Sequence
  SARS-CoV-2/China/WF0004/2020__EPI_ISL_413694 spike protein (1-1211)(I714C_Y1110C) Foldon construct
MFVFLVLLPLVSSQCVNLTTRTQLPPAYTNSFTRGVYYPDKVFRSSVLHSTQDLFLPFFSNVTWFHAIHVSGTNGTKRFDNPVLPFNDGVYFASTEKSNIIRGWIFGTTLDSKTQSLLIVNNATNVVIKVCEFQFCNDPFLGVYYHKNNKSWTESEFRVYSSANNCTFEYVSQPFLMDLEGKQGNFKNLREFVFKNIDGYFKIYSKHTPINLVRDLPQGFSALEPLVDLPIGINITRFQTLLALHRSYLTPGDSSSGWTAGAAAYYVGYLQPRTFLLKYNENGTITDAVDCALDPLSETKCTLKSFTVEKGIYQTSNFRVQPTESIVRFPNITNLCPFGEVFNATRFASVYAWNRKRISNCVADYSVLYNSASFSTFKCYGVSPTKLNDLCFTNVYADSFVIRGDEVRQIAPGQTGKIADYNYKLPDDFTGCVIAWNSNNLDSKVGGNYNYLYRLFRKSNLKPFERDISTEIYQAGSTPCNGVEGFNCYFPLQSYGFQPTNGVGYQPYRVVVLSFELLHAPATVCGPKKSTNLVKNKCVNFNFNGLTGTGVLTESNKKFLPFQQFGRDIADTTDAVRDPQTLEILDITPCSFGGVSVITPGTNTSNQVAVLYQDVNCTEVPVAIHADQLTPTWRVYSTGSNVFQTRAGCLIGAEHVNNSYECDIPIGAGICASYQTQTNSPRRARSVASQSIIAYTMSLGAENSVAYSNNSIACPTNFTISVTTEILPVSMTKTSVDCTMYICGDSTECSNLLLQYGSFCTQLNRALTGIAVEQDKNTQEVFAQVKQIYKTPPIKDFGGFNFSQILPDPSKPSKRSFIEDLLFNKVTLADAGFIKQYGDCLGDIAARDLICAQKFNGLTVLPPLLTDEMIAQYTSALLAGTITSGWTFGAGAALQIPFAMQMAYRFNGIGVTQNVLYENQKLIANQFNSAIGKIQDSLSSTASALGKLQDVVNQNAQALNTLVKQLSSNFGAISSVLNDILSRLDKVEAEVQIDRLITGRLQSLQTYVTQQLIRAAEIRASANLAATKMSECVLGQSKRFDFCGKGYHLMSFPQSAPHGVVFLHVTYVPAQEKNFTTAPAICHDGKAHFPREGVFVSNGTHWFVTQRNFCEPQIITTDNTFVSGNCDVVIGIVNNTVYDPLQPELDSFKEELDKYFKNHTSPDVDLGDISGINASVVNIQKEIDRLNEVAKNLNESLIDLQELGKYEQYIKGGSGYIPEAPRDGQAYVRKDGEWVLLSTFL

SEQ ID NO: 6073 - protein, 1241 aa, Artificial Sequence
  SARS-CoV-2/China/WF0028/2020__EPI_ISL_413791 spike protein (1-1211)(I714C_Y1110C) Foldon construct
MFVFLVLLPLVSSQCVNLTTRTQLPPAYTNSFTRGVYYPDKVFRSSVLHSTQDLFLPFFSNVTWFHAIHVSGTNGTKRFDNPVLPFNDGVYFASTEKSNIIRGWIFGTTLDSKTQSLLIVNNATNVVIKVCEFQFCNDPFLGVYYHKNNKSWMESEFRVYSSANNCTFEYVSQPFLMDLEGKQGNFKNLREFVFKNIDGYFKIYSKHTPINLVRDLPQGFSALEPLVDLPIGINITRFQTLLALHRSYLTPGDSSSGWTAGAAAYYVGYLQPRTFLLKYNENGTITDAVDCALDPLSETKCTLKSFTVEKGIYQTSNFRVQPTESIVRFPNITNLCPFGEVFNATRFASVYAWNRKRISNCVADYSVLYNSASFSTFKCYGVSPTKLNDLCFTNVYADSFVIRGDEVRQIAPGQTGKIADYNYKLPDDFTGCVIAWNSNNLDSKVGGNYNYLYRLFRKSNLKPFERDISTEIYQAGSTPCNGVEGFNCYFPLQSYGFQPTNGVGYQPYRVVVLSFELLHAPATVCGPKKSTNLVKNKCVNFNFNGLTGTGVLTESNKKFLPFQQFGRDIADTTDAVRDPQTLEILDITPCSFGGVSVITPGTNTSNQVAVLYQDVNCTEVPVAIHADQLTPTWRVYSTGSNVFQTRAGCLIGAEHVNNSYECDIPIGAGICASYQTQTNSPRRARSVASQSIIAYTMSLGAENSVAYSNNSIACPTNFTISVTTEILPVSMTKTSVDCTMYICGDSTECSNLLLQYGSFCTQLNRALTGIAVEQDKNTQEVFAQVKQIYKTPPIKDFGGFNFSQILPDPSKPSKRSFIEDLLFNKVTLADAGFIKQYGDCLGDIAARDLICAQKFNGLTVLPPLLTDEMIAQYTSALLAGTITSGWTFGAGAALQIPFAMQMAYRFNGIGVTQNVLYENQKLIANQFNSAIGKIQDSLSSTASALGKLQDVVNQNAQALNTLVKQLSSNFGAISSVLNDILSRLDKVEAEVQIDRLITGRLQSLQTYVTQQLIRAAEIRASANLAATKMSECVLGQSKRVDFCGKGYHLMSFPQSAPHGVVFLHVTYVPAQEKNFTTAPAICHDGKAHFPREGVFVSNGTHWFVTQRNFCEPQIITTDNTFVSGNCDVVIGIVNNTVYDPLQPELESFKEELDKYFKNHTSPDVDLGDISGINASVVNIQKEIDRLNEVAKNLNESLIDLQELGKYEQYIKGGSGYIPEAPRDGQAYVRKDGEWVLLSTFL

SEQ ID NO: 6074 - protein, 1241 aa, Artificial Sequence
  SARS-CoV-2/2019-nCoV/USA-CruiseA-18/2020__MT159716.1 spike protein (1-1211)(I714C_Y1110C) Foldon construct
MFVFLVLLPLVSSQCVNLTTRTQLPPAYTNSFTRGVYYPDKVFRSSVLHSTQDLFLPFFSNVTWFHAIHVSGTNGTKRFDNPVLPFNDGVYFASTEKSNIIRGWIFGTTLDSKTQSLLIVNNATNVVIKVCEFQFCNDPFLGVYYHKNNKSWMESELRVYSSANNCTFEYVSQPFLMDLEGKQGNFKNLREFVFKNIDGYFKIYSKHTPINLVRDLPQGFSALEPLVDLPIGINITRFQTLLALHRSYLTPGDSSSGWTAGAAAYYVGYLQPRTFLLKYNENGTITDAVDCALDPLSETKCTLKSFTVEKGIYQTSNFRVQPTESIVRFPNITNLCPFGEVFNATRFASVYAWNRKRISNCVADYSVLYNSASFSTFKCYGVSPTKLNDLCFTNVYADSFVIRGDEVRQIAPGQTGKIADYNYKLPDDFTGCVIAWNSNNLDSKVGGNYNYLYRLFRKSNLKPFERDISTEIYQAGSTPCNGVEGFNCYFPLQSYGFQPTNGVGYQPYRVVVLSFELLHAPATVCGPKKSTNLVKNKCVNFNFNGLTGTGVLTESNKKFLPFQQFGRDIADTTDAVRDPQTLEILDITPCSFGGVSVITPGTNTSNQVAVLYQDVNCTEVPVAIHADQLTPTWRVYSTGSNVFQTRAGCLIGAEHVNNSYECDIPIGAGICASYQTQTNSPRRARSVASQSIIAYTMSLGAENSVAYSNNSIACPTNFTISVTTEILPVSMTKTSVDCTMYICGDSTECSNLLLQYGSFCTQLNRALTGIAVEQDKNTQEVFAQVKQIYKTPPIKDFGGFNFSQILPDPSKPSKRSFIEDLLFNKVTLADAGFIKQYGDCLGDIAARDLICAQKFNGLTVLPPLLTDEMIAQYTSALLAGTITSGWTFGAGAALQIPFAMQMAYRFNGIGVTQNVLYENQKLIANQFNSAIGKIQDSLSSTASALGKLQDVVNQNAQALNTLVKQLSSNFGAISSVLNDILSRLDKVEAEVQIDRLITGRLQSLQTYVTQQLIRAAEIRASANLAATKMSECVLGQSKRVDFCGKGYHLMSFPQSAPHGVVFLHVTYVPAQEKNFTTAPAICHDGKAHFPREGVFVSNGTHWFVTQRNFCEPQIITTDNTFVSGNCDVVIGIVNNTVYDPLQPELDSFKEELDKYFKNHTSPDVDLGDISGINASVVNIQKEIDRLNEVAKNLNESLIDLQELGKYEQYIKGGSGYIPEAPRDGQAYVRKDGEWVLLSTFL

SEQ ID NO: 6075 - protein, 1241 aa, Artificial Sequence
  SARS-CoV-2/SARS-CoV-2/Yunnan-01/human/2020/CHN__MT049951.1 spike protein (1-1211)(I714C_Y1110C) Foldon construct
MFVFLVLLPLVSSQCVNLTTRTQLPPANTNSFTRGVYYPDKVFRSSVLHSTQDLFLPFFSNVTWFHAIHVSGTNGTKRFDNPVLPFNDGVYFASTEKSNIIRGWIFGTTLDSKTQSLLIVNNATNVVIKVCEFQFCNDPFLGVYYHKNNKSWMESEFRVYSSANNCTFEYVSQPFLMDLEGKQGNFKNLREFVFKNIDGYFKIYSKHTPINLVRDLPQGFSALEPLVDLPIGINITRFQTLLALHRSYLTPGDSSSGWTAGAAAYYVGYLQPRTFLLKYNENGTITDAVDCALDPLSETKCTLKSFTVEKGIYQTSNFRVQPTESIVRFPNITNLCPFGEVFNATRFASVYAWNRKRISNCVADYSVLYNSASFSTFKCYGVSPTKLNDLCFTNVYADSFVIRGDEVRQIAPGQTGKIADYNYKLPDDFTGCVIAWNSNNLDSKVGGNYNYLYRLFRKSNLKPFERDISTEIYQAGSTPCNGVEGFNCYFPLQSYGFQPTNGVGYQPYRVVVLSFELLHAPATVCGPKKSTNLVKNKCVNFNFNGLTGTGVLTESNKKFLPFQQFGRDIADTTDAVRDPQTLEILDITPCSFGGVSVITPGTNTSNQVAVLYQDVNCTEVPVAIHADQLTPTWRVYSTGSNVFQTRAGCLIGAEHVNNSYECDIPIGAGICASYQTQTNSPRRARSVASQSIIAYTMSLGAENSVAYSNNSIACPTNFTISVTTEILPVSMTKTSVDCTMYICGDSTECSNLLLQYGSFCTQLNRALTGIAVEQDKNTQEVFAQVKQIYKTPPIKDFGGFNFSQILPDPSKPSKRSFIEDLLFNKVTLADAGFIKQYGDCLGDIAARDLICAQKFNGLTVLPPLLTDEMIAQYTSALLAGTITSGWTFGAGAALQIPFAMQMAYRFNGIGVTQNVLYENQKLIANQFNSAIGKIQDSLSSTASALGKLQDVVNQNAQALNTLVKQLSSNFGAISSVLNDILSRLDKVEAEVQIDRLITGRLQSLQTYVTQQLIRAAEIRASANLAATKMSECVLGQSKRVDFCGKGYHLMSFPQSAPHGVVFLHVTYVPAQEKNFTTAPAICHDGKAHFPREGVFVSNGTHWFVTQRNFCEPQIITTDNTFVSGNCDVVIGIVNNTVYDPLQPELDSFKEELDKYFKNHTSPDVDLGDISGINASVVNIQKEIDRLNEVAKNLNESLIDLQELGKYEQYIKGGSGYIPEAPRDGQAYVRKDGEWVLLSTFL

SEQ ID NO: 6076 - protein, 1241 aa, Artificial Sequence
  SARS-CoV-2/USA/WA-UW292/2020__EPI_ISL_418077 spike protein (1-1211)(I714C_Y1110C) Foldon construct
MFVFLVLLPLVSSQCVNLTTRTQLPPAYTNSFTRGVYYPDKVFRSSVLHSTQDLFLPFFSNVTWFHAIHVSGTNGTKRFDNPVLPFNDGVYFASTEKSNIIRGWIFGTTLDSKTQSLLIVNNATNVVIKVCEFQFCNDPFLGVYYHKNNKSWMESEFRVYSSANNCTFEYVSQPFLMDLEGKQGNFKNLREFVFKNIDGYFKIYSKHTPINLVRDLPQGFSALEPLVDLPIGINITRFQTLLALHRSYLTPGDSSSGWTAGAAAYYVGYLQPRTFLLKYNENGTITDAVDCALDPLSETKCTLKSFTVEKGIYQTSNFRVQPTESIVRFPNITNLCPFGEVFNATRFASVYAWNRKRISNCVADYSVLYNSASFSTFKCYGVSPTKLNDLCFTNVYADSFVIRGDEVRQIAPGQTGKIADYNYKLPDDFTGCVIAWNSNNLDSKVGGNYNYLYRLFRKSNLKPFERDISTEIYQASSTPCNGVEGFNCYFPLQSYGFQPTNGVGYQPYRVVVLSFELLHAPATVCGPKKSTNLVKNKCVNFNFNGLTGTGVLTESNKKFLPFQQFGRDIADTTDAVRDPQTLEILDITPCSFGGVSVITPGTNTSNQVAVLYQDVNCTEVPVAIHADQLTPTWRVYSTGSNVFQTRAGCLIGAEHVNNSYECDIPIGAGICASYQTQTNSPRRARSVASQSIIAYTMSLGAENSVAYSNNSIACPTNFTISVTTEILPVSMTKTSVDCTMYICGDSTECSNLLLQYGSFCTQLNRALTGIAVEQDKNTQEVFAQVKQIYKTPPIKDFGGFNFSQILPDPSKPSKRSFIEDLLFNKVTLADAGFIKQYGDCLGDIAARDLICAQKFNGLTVLPPLLTDEMIAQYTSALLAGTITSGWTFGAGAALQIPFAMQMAYRFNGIGVTQNVLYENQKLIANQFNSAIGKIQDSLSSTASALGKLQDVVNQNAQALNTLVKQLSSNFGAISSVLNDILSRLDKVEAEVQIDRLITGRLQSLQTYVTQQLIRAAEIRASANLAATKMSECVLGQSKRVDFCGKGYHLMSFPQSAPHGVVFLHVTYVPAQEKNFTTAPAICHDGKAHFPREGVFVSNGTHWFVTQRNFCEPQIITTDNTFVSGNCDVVIGIVNNTVYDPLQPELDSFKEELDKYFKNHTSPDVDLGDISGINASVVNIQKEIDRLNEVAKNLNESLIDLQELGKYEQYIKGGSGYIPEAPRDGQAYVRKDGEWVLLSTFL

SEQ ID NO: 6077 - protein, 1241 aa, Artificial Sequence
  SARS-CoV-2/Iceland/192/2020__EPI_ISL_417819 spike protein (1-1211)(I714C_Y1110C) Foldon construct
MFVFFVLLPLVSSQCVNLTTRTQLPPAYTNSFTRGVYYPDKVFRSSVLHSTQDLFLPFFSNVTWFHAIHVSGTNGTKRFDNPVLPFNDGVYFASTEKSNIIRGWIFGTTLDSKTQSLLIVNNATNVVIKVCEFQFCNDPFLGVYYHKNNKSWMESEFRVYSSANNCTFEYVSQPFLMDLEGKQGNFKNLREFVFKNIDGYFKIYSKHTPINLVRDLPQGFSALEPLVDLPIGINITRFQTLLALHRSYLTPGDSSSGWTAGAAAYYVGYLQPRTFLLKYNENGTITDAVDCALDPLSETKCTLKSFTVEKGIYQTSNFRVQPTESIVRFPNITNLCPFGEVFNATRFASVYAWNRKRISNCVADYSVLYNSASFSTFKCYGVSPTKLNDLCFTNVYADSFVIRGDEVRQIAPGQTGKIADYNYKLPDDFTGCVIAWNSNNLDSKVGGNYNYLYRLFRKSNLKPFERDISTEIYQAGSTPCNGVEGFNCYFPLQSYGFQPTNGVGYQPYRVVVLSFELLHAPATVCGPKKSTNLVKNKCVNFNFNGLTGTGVLTESNKKFLPFQQFGRDIADTTDAVRDPQTLEILDITPCSFGGVSVITPGTNTSNQVAVLYQGVNCTEVPVAIHADQLTPTWRVYSTGSNVFQTRAGCLIGAEHVNNSYECDIPIGAGICASYQTQTNSPRRARSVASQSIIAYTMSLGAENSVAYSNNSIACPTNFTISVTTEILPVSMTKTSVDCTMYICGDSTECSNLLLQYGSFCTQLNRALTGIAVEQDKNTQEVFAQVKQIYKTPPIKDFGGFNFSQILPDPSKPSKRSFIEDLLFNKVTLADAGFIKQYGDCLGDIAARDLICAQKFNGLTVLPPLLTDEMIAQYTSALLAGTITSGWTFGAGAALQIPFAMQMAYRFNGIGVTQNVLYENQKLIANQFNSAIGKIQDSLSSTASALGKLQDVVNQNAQALNTLVKQLSSNFGAISSVLNDILSRLDKVEAEVQIDRLITGRLQSLQTYVTQQLIRAAEIRASANLAATKMSECVLGQSKRVDFCGKGYHLMSFPQSAPHGVVFLHVTYVPAQEKNFTTAPAICHDGKAHFPREGVFVSNGTHWFVTQRNFCEPQIITTDNTFVSGNCDVVIGIVNNTVYDPLQPELDSFKEELDKYFKNHTSPDVDLGDISGINASVVNIQKEIDRLNEVAKNLNESLIDLQELGKYEQYIKGGSGYIPEAPRDGQAYVRKDGEWVLLSTFL

SEQ ID NO: 6078 - protein, 1241 aa, Artificial Sequence
  SARS-CoV-2/Belgium/ULG-6939/2020__EPI_ISL_417020 spike protein (1-1211)(I714C_Y1110C) Foldon construct
MFVFLVLLPLVSSQCVNLTTRTQLPPAYTNSFTRGVYYPDKVFRSSVLHSTQDLFLPFFSNVTWFHAIHVSGTNGTKRFDNPVLPFNDGVYFASTEKSNIIRGWIFGTTLDSKTQSLLIVNNATNVVIKVCEFQFCNDPFLGVYYHKNNKSWMESEFRVYSSANNCTFEYVSQPFLMDLEGKQGNFKNLREFVFKNIDGYFKIYSKHTPINLVRDLPQGFSALEPLVDLPIGINITRFQTLLALHRSYLTPGDSSSGWTAGAAAYYVGYLQPRTFLLKYNENGTITDAVDCALDPLSETKCTLKSFTVEKGIYQTSNFRVQPTESIVRFPNITNLCPFGEVFNATRFASVYAWNRKRISNCVADYSVLYNSASFSTFKCYGVSPTKLNDLCFTNVYADSFVIRGDEVRQIAPGQTGKIADYNYKLPDDFTGCVIAWNSNNLDSKVGGNYNYLYRLFRKSNLKPFERDISTEIYQAGSTPCNGVEGFNCYFPLQSYGFQPTNGVGYQPYRVVVLSFELLHAPATVCGPKKSTNLVKNKCVNFNFNGLTGTGVLTESNKKFLPFQQFGRDIADTTDAVRDPQTLEILDITPCSFGGVSVITPGTNTSNQVAVLYQGVNCTEVPVAIHADQLTPTWRVYSTGSNVFQTRAGCLIGAEHVNNSYECDIPIGAGICASYQTQTNSPRRARSVASQSIIAYTMSLGAENSVVYSNNSIACPTNFTISVTTEILPVSMTKTSVDCTMYICGDSTECSNLLLQYGSFCTQLNRALTGIAVEQDKNTQEVFAQVKQIYKTPPIKDFGGFNFSQILPDPSKPSKRSFIEDLLFNKVTLADAGFIKQYGDCLGDIAARDLICAQKFNGLTVLPPLLTDEMIAQYTSALLAGTITSGWTFGAGAALQIPFAMQMAYRFNGIGVTQNVLYENQKLIANQFNSAIGKIQDSLSSTASALGKLQDVVNQNAQALNTLVKQLSSNFGAISSVLNDILSRLDKVEAEVQIDRLITGRLQSLQTYVTQQLIRAAEIRASANLAATKMSECVLGQSKRVDFCGKGYHLMSFPQSAPHGVVFLHVTYVPAQEKNFTTAPAICHDGKAHFPREGVFVSNGTHWFVTQRNFCEPQIITTDNTFVSGNCDVVIGIVNNTVYDPLQPELDSFKEELDKYFKNHTSPDVDLGDISGINASVVNIQKEIDRLNEVAKNLNESLIDLQELGKYEQYIKGGSGYIPEAPRDGQAYVRKDGEWVLLSTFL

SEQ ID NO: 6079 - protein, 1241 aa, Artificial Sequence
  SARS-CoV-2/France/HF2496/2020__EPI_ISL_418231 spike protein (1-1211)(I714C_Y1110C) Foldon construct
MFVFLVLLPLVSSQCVNLTTRTQLPPAYTNSFTRGVYYPDKVFRSSVLHSTQDLFLPFFSNVTWFHAIHVSGTNGTKRFDNPVLPFNDGVYFASTEKSNIIRGWIFGTTLDSKTQSLLIVNNATNVVIKVCEFQFCNDPFLGVYYHKNNKSWMESEFRVYSSANNCTFEYVSQPFLMDLEGKQGNFKNLREFVFKNIDGYFKIYSKHTPINLVRDLPQGFSALEPLVDLPIGINITRFQTLLALHRSYLTPGDSSSGWTAGAAAYYVGYLQPRTFLLKYNENGTITDAVDCALDPLSETKCTLKSFTVEKGIYQTSNFRVQPTESIVRFPNITNLCPFGEVFNATRFASVYAWNRKRISNCVADYSVLYNSASFSTFKCYGVSPTKLNDLCFTNVYADSFVIRGDEVRQIAPGQTGKIADYNYKLPDDFTGCVIAWNSNNLDSKVGGNYNYLYRLFRKSNLKPFERDISTEIYQAGSTPCNGVEGFNCYFPLQSYGFQPTNGVGYQPYRVVVLSFELLHAPATVCGPKKSTNLVKNKCVNFNFNGLTGTGVLTESNKKFLPFQQFGRDIADTTDAVRDPQTLEILDITPCSFGGVSVITPGTNTSNQVAVLYQGVNCTEVPVAIHADQLTPTWRVYSTGSNVFQTRAGCLIGAEHVNNSYECDIPIGAGICASYQTQTNSPRRARSVASQSIIAYTMSLGAENSVAYSNNSIACPTNFTISVTTEILPVSMTKTSVDCTMYICGDSTECSNLLLQYGSFCTQLNRALTGIAVEQDKNTQEVFAQVKQIYKTPPIKDFGGFNFSQILPDPSKPSKRSFIEDLLFNKVTLADAGFIKQYGDCLGDIVARDLICAQKFNGLTVLPPLLTDEMIAQYTSALLAGTITSGWTFGAGAALQIPFAMQMAYRFNGIGVTQNVLYENQKLIANQFNSAIGKIQDSLSSTASALGKLQDVVNQNAQALNTLVKQLSSNFGAISSVLNDILSRLDKVEAEVQIDRLITGRLQSLQTYVTQQLIRAAEIRASANLAATKMSECVLGQSKRVDFCGKGYHLMSFPQSAPHGVVFLHVTYVPAQEKNFTTAPAICHDGKAHFPREGVFVSNGTHWFVTQRNFCEPQIITTDNTFVSGNCDVVIGIVNNTVYDPLQPELDSFKEELDKYFKNHTSPDVDLGDISGINASVVNIQKEIDRLNEVAKNLNESLIDLQELGKYEQYIKGGSGYIPEAPRDGQAYVRKDGEWVLLSTFL

SEQ ID NO: 6080 - protein, 1241 aa, Artificial Sequence
  SARS-CoV-2/USA/WA-UW291/2020__EPI_ISL_418076 spike protein (1-1211)(I714C_Y1110C) Foldon construct
MFVFLVLLPLVSSQCVNLTTRTQLPPAYTNSFTRGVYYPDKVFRSSVLHSTQDLFLPFFSNVTWFHAIHVSGTNGTKRFDNPVLPFNDGVYFASTEKSNIIRGWIFGTTLDSKTQSLLIVNNATNVVIKVCEFQFCNDPFLGVYYHKNNKSWMESEFRVYSSANNCTFEYVSQPFLMDLEGKQGNFKNLREFVFKNIDGYFKIYSKHTPINLVRDLPQGFSALEPLVDLPIGINITRFQTLLALHRSYLTPGDSSSGWTAGAAAYYVGYLQPRTFLLKYNENGTITDAVDCALDPLSETKCTLKSFTVEKGIYQTSNFRVQPTESIVRFPNITNLCPFGEVFNATRFASVYAWNRKRISNCVADYSVLYNSASFSTFKCYGVSPTKLNDLCFTNVYADSFVIRGDEVRQIAPGQTGKIADYNYKLPDDFTGCVIAWNSNNLDSKVGGNYNYLYRLFRKSNLKPFERDISTEIYQAGSTPCNGVEGFNCYFPLQSYGFQPTNGVGYQPYRVVVLSFELLHAPATVCGPKKSTNLVKNKCVNFNFNGLTGTGVLTESNKKFLPFQQFGRDIADTTDAVRDPQTLEILDITPCSFGGVSVITPGTNTSNQVAVLYQGVNCTEVPVAIHADQLTPTWRVYSTGSNVFQTRAGCLIGAEHVNNSYECDIPIGAGICASYQTQTNSPRRARSVASQSIIAYTMSLGAENSVAYSNNSIACPTNFTISVTTEILPVSMTKTSVDCTMYICGDSTECSNLLLQYGSFCTQLNRALTGIAVEQDKNTQEVFAQVKQIYKTPPIKDFGGFNFSQILPDPSKPSKRSFIEDLLFNKVTLADAGFIKQYGDCLGDIAARDLICAQKFNGLTVLPPLLTDEMIAQYTSALLAGTITSGWTFGAGAALQIPFAMQMAYRFNGIGVTQNVLYENQKLIANQFNSAIGKIQYSLSSTASALGKLQDVVNQNAQALNTLVKQLSSNFGAISSVLNDILSRLDKVEAEVQIDRLITGRLQSLQTYVTQQLIRAAEIRASANLAATKMSECVLGQSKRVDFCGKGYHLMSFPQSAPHGVVFLHVTYVPAQEKNFTTAPAICHDGKAHFPREGVFVSNGTHWFVTQRNFCEPQIITTDNTFVSGNCDVVIGIVNNTVYDPLQPELDSFKEELDKYFKNHTSPDVDLGDISGINASVVNIQKEIDRLNEVAKNLNESLIDLQELGKYEQYIKGGSGYIPEAPRDGQAYVRKDGEWVLLSTFL

SEQ ID NO: 6081 - protein, 1241 aa, Artificial Sequence; identical to SEQ ID NO: 6044
  SARS-CoV-2/Portugal/PT0034/2020__EPI_ISL_418019 spike protein (1-1211)(I714C_Y1110C) Foldon construct

SEQ ID NO: 6082 - protein, 1241 aa, Artificial Sequence
  SARS-CoV-2/Iceland/202/2020__EPI_ISL_417750 spike protein (1-1211)(I714C_Y1110C) Foldon construct
MFVFLVLLPLVSSQCVNLTTRTQLPPAYTNSFTRGVYYPDKVFRSSVLHSTQDLFLPFFSNVTWFHAIHVSGTNGTKRFDNPVLPFNDGVYFASTEKSNIIRGWIFGTTLDSKTQSLLIVNNATNVVIKVCEFQFCNDPFLGVYYHKNNKSWMESEFRVYSSANNCTFEYVSQPFLMDLEGKQGNFKNLREFVFKNIDGYFKIYSKHTPINLVRDLPQGFSALEPLVDLPIGINITRFQTLLALHRSYLTPGDSSSGWTAGAAAYYVGYLQPRTFLLKYNENGTITDAVDCALDPLSETKCTLKSFTVEKGIYQTSNFRVQPTESIVRFPNITNLCPFGEVFNATRFASVYAWNRKRISNCVADYSVLYNSASFSTFKCYGVSPTKLNDLCFTNVYADSFVIRGDEVRQIAPGQTGKIADYNYKLPDDFTGCVIAWNSNNLDSKVGGNYNYLYRLFRKSNLKPFERDISTEIYQAGSTPCNGVEGFNCYFPLQSYGFQPTNGVGYQPYRVVVLSFELLHAPATVCGPKKSTNLVKNKCVNFNFNGLTGTGVLTESNKKFLPFQQFGRDIADTTDAVRDPQTLEILDITPCSFGGVSVITPGTNTSNQVAVLYQDVNCTEVPVAIHADQLTPTWRVYSTGSNVFQTRAGCLIGAEHVNNSYECDIPIGAGICASYQTQTNSPRRARSVASQSIIAYTMSLGAENSVAYSNNSIACPTNFTISVTTEILPVSMTKTSVDCTMYICGDSTECSNLLLQYGSFCTQLNRALTGIAVEQDKNTQEVFAQVKQIYKTPPIKDFGGFNFSQILPDPSKPSKRSFIEDLLFNKVTLADAGFIKQYGDCLGDIAARDLICAQKFNGLTVLPPLLTDEMIAQYTSALLAGTITSGWTFGAGAALQIPFAMQMAYRFNGIGVTQNVLYENQKLIANQFNSAIGKIQDSLSSTASALGKLQDVVNQNAQALNTLVKQLSSNFGAISSVLNDILSRLDKVEAEVQIDRLITGRLQSLQTYVTQQLIRAAEIRASANLAATKMSECVLGQSKRVDFCGKGYHLMSFPQSAPHGVVFLHVTYVPAQEKNFTTAPAICHDGKAHFPREGVFVSNGTHWFVTQRNFCEPQIITTDNTFVSGNCDVVIGIVNNTVYDPLQPELDSFKEELDKYFKNHTSPDVDLGDIPGINASVVNIQKEIDRLNEVAKNLNESLIDLQELGKYEQYIKGGSGYIPEAPRDGQAYVRKDGEWVLLSTFL

SEQ ID NO: 6083 - protein, 1241 aa, Artificial Sequence
  SARS-CoV-2/USA/WA-UW261/2020__EPI_ISL_418046 spike protein (1-1211)(I714C_Y1110C) Foldon construct
MFVFLVLLPLVSSQCVNLTTRTQLPPAYTNSFTRGVYYPDKVFRSSVLHSTQDLFLPFFSNVTWFHAIHVSGTNGTKRFDNPVLPFNDGVYFASTEKSNIIRGWIFGTTLDSKTQSLLIVNNATNVVIKVCEFQFCNDPFLGVYYHKNNKSWMESEFRVYSSANNCTFEYVSQPFLMDLEGKQGNFKNLREFVFKNIDGYFKIYSKHTPINLVRDLPQGFSALEPLVDLPIGINITRFQTLLALHRSYLTPGDSSSGWTAGAAAYYVGYLQPRTFLLKYNENGTITDAVDCALDPLSETKCTLKSFTVEKGIYQTSNFRVQPTESIVRFPNITNLCPFGEVFNATRFTSVYAWNRKRISNCVADYSVLYNSASFSTFKCYGVSPTKLNDLCFTNVYADSFVIRGDEVRQIAPGQTGKIADYNYKLPDDFTGCVIAWNSNNLDSKVGGNYNYLYRLFRKSNLKPFERDISTEIYQAGSTPCNGVEGFNCYFPLQSYGFQPTNGVGYQPYRVVVLSFELLHAPATVCGPKKSTNLVKNKCVNFNFNGLTGTGVLTESNKKFLPFQQFGRDIADTTDAVRDPQTLEILDITPCSFGGVSVITPGTNTSNQVAVLYQDVNCTEVPVAIHADQLTPTWRVYSTGSNVFQTRAGCLIGAEHVNNSYECDIPIGAGICASYQTQTNSPRRARSVASQSIIAYTMSLGAENSVAYSNNSIACPTNFTISVTTEILPVSMTKTSVDCTMYICGDSTECSNLLLQYGSFCTQLNRALTGIAVEQDKNTQEVFAQVKQIYKTPPIKDFGGFNFSQILPDPSKPSKRSFIEDLLFNKVTLADAGFIKQYGDCLGDIAARDLICAQKFNGLTVLPPLLTDEMIAQYTSALLAGTITSGWTFGAGAALQIPFAMQMAYRFNGIGVTQNVLYENQKLIANQFNSAIGKIQDSLSSTASALGKLQDVVNQNAQALNTLVKQLSSNFGAISSVLNDILSRLDKVEAEVQIDRLITGRLQSLQTYVTQQLIRAAEIRASANLAATKMSECVLGQSKRVDFCGKGYHLMSFPQSAPHGVVFLHVTYVPAQEKNFTTAPAICHDGKAHFPREGVFVSNGTHWFVTQRNFCEPQIITTDNTFVSGNCDVVIGIVNNTVYDPLQPELDSFKEELDKYFKNHTSPDVDLGDISGINASVVNIQKEIDRLNEVAKNLNESLIDLQELGKYEQYIKGGSGYIPEAPRDGQAYVRKDGEWVLLSTFL

SEQ ID NO: 6084 - protein, 1241 aa, Artificial Sequence
  SARS-CoV-2/Portugal/PT0035/2020__EPI_ISL_418020 spike protein (1-1211)(I714C_Y1110C) Foldon construct
MFVFLVLLPLVSSQCVNLTTRTQLPPAYTNSFTRGVYYPDKVFRSSVLHSTQDLFLPFFSNVTWFHAIHVSGTNGTKRFDNPVLPFNDGVYFASTEKSNIIRGWIFGTTLDSKTQSLLIVNNATNVVIKVCEFQFCNDPFLGVYYHKNNKSWMESEFRVYSSANNCTFEYVSQPFLMDLEGKQGNFKNLREFVFKNIDGYFKIYSKHTPINLVRDLPQGFSALEPLVDLPIGINITRFQTLLALHRSYLTPGDSSSGWTAGAAAYYVGYLQPRTFLLKYNENGTITDAVDCALDPLSETKCTLKSFTVEKGIYQTSNFRVQPTESIVRFPNITNLCPFGEVFNATRFASVYAWNRKRISNCVADYSVLYNSASFSTFKCYGVSPTKLNDLCFTNVYADSFVIRGDEVRQIAPGQTGKIADYNYKLPDDFTGCVIAWNSNNLDSKVGGNYNYLYRLFRKSNLKPFERDISTEIYQAGSTPCNGVEGFNCYFPLQSYGFQPTNGVGYQPYRVVVLSFELLHAPATVCGPKKSTNLVKNKCVNFNFNGLTGTGVLTESNKKFLPFQQFGRDIADTTDAVRDPQTLEILDITPCSFGGVSVITPGTNTSNQVAVLYQDVNCTEVPVAIHADQLTPTWRVYSTGSNVFQTRAGCLIGAEHVNNSYECDIPIGAGICASYQTQTNSPRRARSVASQSIIAYTMSLGAENSVAYSNNSIACPTNFTISVTTEILPVSMTKTSVDCTMYICGDSTECSNLLLQYGSFCTQLNRALTGIAVEQDKNTQEVFAQVKQIYKTPPIKDFGGFNFSQILPDPSKPSKRSFIEDLLFNKVTLADAGFIKQYGDCLGDISARDLICAQKFNGLTVLPPLLTDEMIAQYTSALLAGTITSGWTFGAGAALQIPFAMQMAYRFNGIGVTQNVLYENQKLIANQFNSAIGKIQDSLSSTASALGKLQDVVNQNAQALNTLVKQLSSNFGAISSVLNDILSRLDKVEAEVQIDRLITGRLQSLQTYVTQQLIRAAEIRASANLAATKMSECVLGQSKRVDFCGKGYHLMSFPQSAPHGVVFLHVTYVPAQEKNFTTAPAICHDGKAHFPREGVFVSNGTHWFVTQRNFCEPQIITTDNTFVSGNCDVVIGIVNNTVYDPLQPELDSFKEELDKYFKNHTSPDVDLGDISGINASVVNIQKEIDRLNEVAKNLNESLIDLQELGKYEQYIKGGSGYIPEAPRDGQAYVRKDGEWVLLSTFL

SEQ ID NO: 6085 - protein, 1241 aa, Artificial Sequence
  SARS-CoV-2/USA/NY-NYUMC7/2020__EPI_ISL_418192 spike protein (1-1211)(I714C_Y1110C) Foldon construct
MFVFLVLLPLVSSQCVNLTTRTQLPPAYTNSFTRGVYYPDKVFRSSVLHSTQDLFLPFFSNVTWFHAIHVSGTNGTKRFDNPVLPFNDGVYFASTEKSNIIRGWIFGTTLDSKTQSLLIVNNATNVVIKVCEFQFCNDPFLGVYHHKNNKSWMESEFRVYSSANNCTFEYVSQPFLMDLEGKQGNFKNLREFVFKNIDGYFKIYSKHTPINLVRDLPQGFSALEPLVDLPIGINITRFQTLLALHRSYLTPGDSSSGWTAGAAAYYVGYLQPRTFLLKYNENGTITDAVDCALDPLSETKCTLKSFTVEKGIYQTSNFRVQPTESIVRFPNITNLCPFGEVFNATRFASVYAWNRKRISNCVADYSVLYNSASFSTFKCYGVSPTKLNDLCFTNVYADSFVIRGDEVRQIAPGQTGKIADYNYKLPDDFTGCVIAWNSNNLDSKVGGNYNYLYRLFRKSNLKPFERDISTEIYQAGSTPCNGVEGFNCYFPLQSYGFQPTNGVGYQPYRVVVLSFELLHAPATVCGPKKSTNLVKNKCVNFNFNGLTGTGVLTESNKKFLPFQQFGRDIADTTDAVRDPQTLEILDITPCSFGGVSVITPGTNTSNQVAVLYQGVNCTEVPVAIHADQLTPTWRVYSTGSNVFQTRAGCLIGAEHVNNSYECDIPIGAGICASYQTQTNSPRRARSVASQSIIAYTMSLGAENSVAYSNNSIACPTNFTISVTTEILPVSMTKTSVDCTMYICGDSTECSNLLLQYGSFCTQLNRALTGIAVEQDKNTQEVFAQVKQIYKTPPIKDFGGFNFSQILPDPSKPSKRSFIEDLLFNKVTLADAGFIKQYGDCLGDIAARDLICAQKFNGLTVLPPLLTDEMIAQYTSALLAGTITSGWTFGAGAALQIPFAMQMAYRFNGIGVTQNVLYENQKLIANQFNSAIGKIQDSLSSTASALGKLQDVVNQNAQALNTLVKQLSSNFGAISSVLNDILSRLDKVEAEVQIDRLITGRLQSLQTYVTQQLIRAAEIRASANLAATKMSECVLGQSKRVDFCGKGYHLMSFPQSAPHGVVFLHVTYVPAQEKNFTTAPAICHDGKAHFPREGVFVSNGTHWFVTQRNFCEPQIITTDNTFVSGNCDVVIGIVNNTVYDPLQPELDSFKEELDKYFKNHTSPDVDLGDISGINASVVNIQKEIDRLNEVAKNLNESLIDLQELGKYEQYIKGGSGYIPEAPRDGQAYVRKDGEWVLLSTFL

SEQ ID NO: 6086 - protein, 1241 aa, Artificial Sequence
  SARS-CoV-2/Iceland/189/2020__EPI_ISL_417709 spike protein (1-1211)(I714C_Y1110C) Foldon construct
MFVFLVLLPLVSSQCVNLTTRTQLPPAYTNSFTRGVYYPDKVFRSSVLHSTQDLFLPFFSNVTWFHAIHVSGTNGTKRFDNPVLPFNDGVYFASTEKSNIIRGWIFGTTLDSKTQSLLIVNNATNVVIKVCEFQFCNDPFLGVYYHKNNKSWMESEFRVYSSANNCTFEYVSQPFLMDLEGKQGNFKNLREFVFKNIDGYFKIYSKHTPINLVRDLPQGFSALEPLVDLPIGINITRFQTLLALHRSYLTPGDSSSGWTAGAAAYYVGYLQPRTFLLKYNENGTITDAVDCALDPLSETKCTLKSFTVEKGIYQTSNFRVQPTESIVRFPNITNLCPFGEVFNATRFASVYAWNRKRISNCVADYSVLYNSASFSTFKCYGVSPTKLNDLCFTNVYADSFVIRGDEVRQIAPGQTGKIADYNYKLPDDFTGCVIAWNSNNLDSKVGGNYNYLYRLFRKSNLKPFERDISTEIYQAGSTPCNGVEGFNCYFPLQSYGFQPTNGVGYQPYRVVVLSFELLHAPATVCGPKKSTNLVKNKCVNFNFNGLTGTGVLTESNKKFLPFQQFGRDIADTTDAVRDPQTLEILDITPCSFGGVSVITPGTNTSNQVAVLYQGVNCTEVPVAIHADQLTPTWRVYSTGSNVFQTRAGCLIGAEHVNNSYECDIPIGAGICASYQTQTNSPRRARSVASQSIIAYTMSLGAENSVAYSNNSIACPTNFTISVTTEILPVSMTKTSVDCTMYICGDSTECSNLLLQYGSFCTQLNRALTGIAVEQDKNTQEVFAQVKQIYKTPPIKDFGGFNFSQILPDPSKPSKRSFIEDLLFNKVTLADAGFTKQYGDCLGDIAARDLICAQKFNGLTVLPPLLTDEMIAQYTSALLAGTITSGWTFGAGAALQIPFAMQMAYRFNGIGVTQNVLYENQKLIANQFNSAIGKIQDSLSSTASALGKLQDVVNQNAQALNTLVKQLSSNFGAISSVLNDILSRLDKVEAEVQIDRLITGRLQSLQTYVTQQLIRAAEIRASANLAATKMSECVLGQSKRVDFCGKGYHLMSFPQSAPHGVVFLHVTYVPAQEKNFTTAPAICHDGKAHFPREGVFVSNGTHWFVTQRNFCEPQIITTDNTFVSGNCDVVIGIVNNTVYDPLQPELDSFKEELDKYFKNHTSPDVDLGDISGINASVVNIQKEIDRLNEVAKNLNESLIDLQELGKYEQYIKGGSGYIPEAPRDGQAYVRKDGEWVLLSTFL

SEQ ID NO: 6087 - protein, 1241 aa, Artificial Sequence
  SARS-CoV-2/Australia/NSW56/2020__EPI_ISL_417408 spike protein (1-1211)(I714C_Y1110C) Foldon construct
MFVFLVLLPLVSSQCVNLTTRTQLPPAYTNSFTRGVYYPDKVFRSSVLHSTQDLFLPFFSNVTWFHAIHVSGTNGTKRFDNPVLPFNDGVYFASTEKSNIIRGWIFGTTLDSKTQSLLIVNNATNVVIKVCEFQFCNDPFLGVYYHKNNKSWMESEFRVYSSANNCTFEYVSQPFLMDLEGKQGNFKNLREFVFKNIDGYFKIYSKHTPINLVRDLPQGFSALEPLVDLPIGINITRFQTLLALHRSYLTPGDSSSGWTAGAAAYYVGYLQPRTFLLKYNENGTITDAVDCALDPLSETKCTLKSFTVEKGIYQTSNFRVQPTESIVRFPNITNLCPFGEVFNATRFASVYAWNRKRISNCVADYSVLYNSASFSTFKCYGVSPTKLNDLCFTNVYADSFVIRGDEVRQIAPGQTGKIADYNYKLPDDFTGCVIAWNSNNLDSKVGGNYNYLYRLFRKSNLKPFERDISTEIYQAGSTPCNGVEGFNCYFPLQSYGFQPTNGVGYQPYRVVVLSFELLHAPATVCGPKKSTNLVKNKCVNFNFNGLTGTGVLTESNKKFLPFQQFGRDIADTTDAVRDPQTLEILDITPCSFGGVSVITPGTNTSNQVAVLYQDVNCTEVPVAIHADQLTPTWRVYSTGSNVFQTRAGCLIGAEHVNNSYECDIPIGAGICASYQTQTNSPRRARSVASQSIIAYTMSLGAENSVAYSNNSIACPTNFTISVTTEILPVSMTKTSVDCTMYICGDSTECSNLLLQYGSFCTQLNRALTGIAVEQDKNTQEVFAQVKQIYKTPPIKDFGGFNFSQILPDSSKPSKRSFIEDLLFNKVTLADAGFIKQYGDCLGDIAARDLICAQKFNGLTVLPPLLTDEMIAQYTSALLAGTITSGWTFGAGAALQIPFAMQMAYRFNGIGVTQNVLYENQKLIANQFNSAIGKIQDSLSSTASALGKLQDVVNQNAQALNTLVKQLSSNFGAISSVLNDILSRLDKVEAEVQIDRLITGRLQSLQTYVTQQLIRAAEIRASANLAATKMSECVLGQSKRVDFCGKGYHLMSFPQSAPHGVVFLHVTYVPAQEKNFTTAPAICHDGKAHFPREGVFVSNGTHWFVTQRNFCEPQIITTDNTFVSGNCDVVIGIVNNTVYDPLQPELDSFKEELDKYFKNHTSPDVDLGDISGINASVVNIQKEIDRLNEVAKNLNESLIDLQELGKYEQYIKGGSGYIPEAPRDGQAYVRKDGEWVLLSTFL

SEQ ID NO: 6088 - protein, 1241 aa, Artificial Sequence
  SARS-CoV-2/Iceland/280/2020__EPI_ISL_417608 spike protein (1-1211)(I714C_Y1110C) Foldon construct
MFVFLVLLPLVSSQCVNLTTRTQLPPAYTNSFTRGVYYPDKVFRSSVLHSTQDLFLPFFSNVTWFHAIHVSGTNGTKRFDNPVLPFNDGVYFASTEKSNIIRGWIFGTTLDSKTQSLLIVNNATNVVIKVCEFQFCNDPFLGVYYHKNNKSWMESEFRVYSSANNCTFEYVSQPFLMDLEGKQGNFKNLREFVFKNIDGYFKIYSKHTPINLVRDLPQGFSALEPLVDLPIGINITRFQTLLALHRSYLTPGDSSSGWTAGAAAYYVGYLQPRTFLLKYNENGTITDAVDCALDPLSETKCTLKSFTVEKGIYQTSNFRVQPTESIVRFPNITNLCPFGEVFNATRFASVYAWNRKRISNCVADYSVLYNSASFSTFKCYGVSPTKLNDLCFTNVYADSFVIRGDEVRQIAPGQTGKIADYNYKLPDDFTGCVIAWNSNNLDSKVGGNYNYLYRLFRKSNLKPFERDISTEIYQAGSTPCNGVEGFNCYFPLQSYGFQPTNGVGYQPYRVVVLSFELLHAPATVCGPKKSTNLVKNKCVNFNFNGLTGTGVLTESNKKFLPFQQFGRDIADTTDAVRDPQTLEILDITPCSFGGVSVITPGTNTSNQVAVLYQGVNCTEVPVAIHADQLTPTWRVYSTGSNVFQTRAGCLIGAEHVNNSYECDIPIGAGICASYHTQTNSPRRARSVASQSIIAYTMSLGAENSVAYSNNSIACPTNFTISVTTEILPVSMTKTSVDCTMYICGDSTECSNLLLQYGSFCTQLNRALTGIAVEQDKNTQEVFAQVKQIYKTPPIKDFGGFNFSQILPDPSKPSKRSFIEDLLFNKVTLADAGFIKQYGDCLGDIAARDLICAQKFNGLTVLPPLLTDEMIAQYTSALLAGTITSGWTFGAGAALQIPFAMQMAYRFNGIGVTQNVLYENQKLIANQFNSAIGKIQDSLSSTASALGKLQDVVNQNAQALNTLVKQLSSNFGAISSVLNDILSRLDKVEAEVQIDRLITGRLQSLQTYVTQQLIRAAEIRASANLAATKMSECVLGQSKRVDFCGKGYHLMSFPQSAPHGVVFLHVTYVPAQEKNFTTAPAICHDGKAHFPREGVFVSNGTHWFVTQRNFCEPQIITTDNTFVSGNCDVVIGIVNNTVYDPLQPELDSFKEELDKYFKNHTSPDVDLGDISGINASVVNIQKEIDRLNEVAKNLNESLIDLQELGKYEQYIKGGSGYIPEAPRDGQAYVRKDGEWVLLSTFL

SEQ ID NO: 6089 - protein, 1241 aa, Artificial Sequence; identical to SEQ ID NO: 6044
  SARS-CoV-2/Iceland/247/2020__EPI_ISL_417575 spike protein (1-1211)(I714C_Y1110C) Foldon construct

SEQ ID NO: 6090 - protein, 1241 aa, Artificial Sequence
  SARS-CoV-2/Iceland/238/2020__EPI_ISL_417566 spike protein (1-1211)(I714C_Y1110C) Foldon construct
MFVFLVLLPLVSSQCVNLTTRTQLPPAYTNSFTRGVYYPDKVFRSSVLHSTQDLFLPFFSNVTWFHAIHVSGTNGTKRFDNPVLPFNDGVYFASTEKSNIIRGWIFGTTLDSKTQSLLIVNNATNVVIKVCEFQFCNDPFLGVYYHKNNKSWMESEFRVYSSANNCTFEYVSQPFLMDLEGKQGNFKNLREFVFKNIDGYFKIYSKHTPINLVRDLPQGFSALEPLVDLPIGINITRFQTLLALHRSYLTPGDSSSGWTAGAAAYYVGYLQPRTFLLKYNENGTITDAVDCALDPLSETKCTLKSFTVEKGIYQTSNFRVQPTESIVRFPNITNLCPFGEVFNATRFASVYAWNRKRISNCVADYSVLYNSASFSTFKCYGVSPTKLNDLCFTNVYADSFVIRGDEVRQIAPGQTGKIADYNYKLPDDFTGCVIAWNSNNLDSKVGGNYNYLYRLFRKSNLKPFERDISTEIYQAGSTPCNGVEGFNCYFPLQSYGFQPTNGVGYQPYRVVVLSFELLHAPATVCGPKKSTNLVKNKCVNFNFNGLTGTGVLTESNKKFLPFQQFGRDIADTTDAVRDPQTLEILDITPCSFGGVSVITPGTNTSNQVAVLYQGVNCTEVPVAIHADQLTPTWRVYSTGSNVFQTRAGCLIGAEHVNNSYECDIPIGAGICASYQTQTNSPRRARSVASQSIIAYTMSLGAENSVAYSNNSIACPTNFTISVTTEILPVSMTKTSVDCTMYICGDSTECSNLLLQYGSFCTQLNRALTGIAVEQDKNTQEVFAQVKQIYKTPPIKDFGGFNFSQILPDPSKPSKRSFIEDLLFNKVTLADVGFIKQYGDCLGDIAARDLICAQKFNGLTVLPPLLTDEMIAQYTSALLAGTITSGWTFGAGAALQIPFAMQMAYRFNGIGVTQNVLYENQKLIANQFNSAIGKIQDSLSSTASALGKLQDVVNQNAQALNTLVKQLSSNFGAISSVLNDILSRLDKVEAEVQIDRLITGRLQSLQTYVTQQLIRAAEIRASANLAATKMSECVLGQSKRVDFCGKGYHLMSFPQSAPHGVVFLHVTYVPAQEKNFTTAPAICHDGKAHFPREGVFVSNGTHWFVTQRNFCEPQIITTDNTFVSGNCDVVIGIVNNTVYDPLQPELDSFKEELDKYFKNHTSPDVDLGDISGINASVVNIQKEIDRLNEVAKNLNESLIDLQELGKYEQYIKGGSGYIPEAPRDGQAYVRKDGEWVLLSTFL

SEQ ID NO: 6091 - protein, 1241 aa, Artificial Sequence
  SARS-CoV-2/Greece/16/2020__EPI_ISL_418265 spike protein (1-1211)(I714C_Y1110C) Foldon construct
MFVFLVLLPLVSSQCVNLTTRTQLPPAYTNSFTRGVYYPDKVFRSSVLHSTQDLFLPFFSNVTWFHAIHVSGTNGTKRFDNPVLPFNDGVYFASTEKSNIIRGWIFGTTLDSKTQSLLIVNNATNVVIKVCEFQFCNDPFLGVYYHKNNKSWMESEFRVYSSANNCTFEYVSQPFLMDLEGKQGNFKNLREFVFKNVDGYFKIYSKHTPINLVRDLPQGFSALEPLVDLPIGINITRFQTLLALHRSYLTPGDSSSGWTAGAAAYYVGYLQPRTFLLKYNENGTITDAVDCALDPLSETKCTLKSFTVEKGIYQTSNFRVQPTESIVRFPNITNLCPFGEVFNATRFASVYAWNRKRISNCVADYSVLYNSASFSTFKCYGVSPTKLNDLCFTNVYADSFVIRGDEVRQIAPGQTGKIADYNYKLPDDFTGCVIAWNSNNLDSKVGGNYNYLYRLFRKSNLKPFERDISTEIYQAGSTPCNGVEGFNCYFPLQSYGFQPTNGVGYQPYRVVVLSFELLHAPATVCGPKKSTNLVKNKCVNFNFNGLTGTGVLTESNKKFLPFQQFGRDIADTTDAVRDPQTLEILDITPCSFGGVSVITPGTNTSNQVAVLYQDVNCTEVPVAIHADQLTPTWRVYSTGSNVFQTRAGCLIGAEHVNNSYECDIPIGAGICASYQTQTNSPRRARSVASQSIIAYTMSLGAENSVAYSNNSIACPTNFTISVTTEILPVSMTKTSVDCTMYICGDSTECSNLLLQYGSFCTQLNRALTGIAVEQDKNTQEVFAQVKQIYKTPPIKDFGGFNFSQILPDPSKPSKRSFIEDLLFNKVTLADAGFIKQYGDCLGDIAARDLICAQKFNGLTVLPPLLTDEMIAQYTSALLAGTITSGWTFGAGAALQIPFAMQMAYRFNGIGVTQNVLYENQKLIANQFNSAIGKIQDSLSSTASALGKLQDVVNQNAQALNTLVKQLSSNFGAISSVLNDILSRLDKVEAEVQIDRLITGRLQSLQTYVTQQLIRAAEIRASANLAATKMSECVLGQSKRVDFCGKGYHLMSFPQSAPHGVVFLHVTYVPAQEKNFTTAPAICHDGKAHFPREGVFVSNGTHWFVTQRNFCEPQIITTDNTFVSGNCDVVIGIVNNTVYDPLQPELDSFKEELDKYFKNHTSPDVDLGDISGINASVVNIQKEIDRLNEVAKNLNESLIDLQELGKYEQYIKGGSGYIPEAPRDGQAYVRKDGEWVLLSTFL

SEQ ID NO: 6092 - protein, 1241 aa, Artificial Sequence
  SARS-CoV-2/Iceland/319/2020__EPI_ISL_417648 spike protein (1-1211)(I714C_Y1110C) Foldon construct
MFVFLVLLPLVSSQCVNLTTRTQLPPAYTNSFTRGVYYPDKVFRSSVLHSTQDLFLPFFSNVTWFHAIHVSGTNGTKRFDNPVLPFNDGVYFASTEKSNIIRGWIFGTTLDSKTQSLLIVNNATNVVIKVCEFQFCNDPFLGVYYHKNNKSWMESEFRVYSSANNCTFEYVSQPFLIDLEGKQGNFKNLREFVFKNIDGYFKIYSKHTPINLVRDLPQGFSALEPLVDLPIGINITRFQTLLALHRSYLTPGDSSSGWTAGAAAYYVGYLQPRTFLLKYNENGTITDAVDCALDPLSETKCTLKSFTVEKGIYQTSNFRVQPTESIVRFPNITNLCPFGEVFNATRFASVYAWNRKRISNCVADYSVLYNSASFSTFKCYGVSPTKLNDLCFTNVYADSFVIRGDEVRQIAPGQTGKIADYNYKLPDDFTGCVIAWNSNNLDSKVGGNYNYLYRLFRKSNLKPFERDISTEIYQAGSTPCNGVEGFNCYFPLQSYGFQPTNGVGYQPYRVVVLSFELLHAPATVCGPKKSTNLVKNKCVNFNFNGLTGTGVLTESNKKFLPFQQFGRDIADTTDAVRDPQTLEILDITPCSFGGVSVITPGTNTSNQVAVLYQGVNCTEVPVAIHADQLTPTWRVYSTGSNVFQTRAGCLIGAEHVNNSYECDIPIGAGICASYQTQTNSPRRARSVASQSIIAYTMSLGAENSVAYSNNSIACPTNFTISVTTEILPVSMTKTSVDCTMYICGDSTECSNLLLQYGSFCTQLNRALTGIAVEQDKNTQEVFAQVKQIYKTPPIKDFGGFNFSQILPDPSKPSKRSFIEDLLFNKVTLADAGFIKQYGDCLGDIAARDLICAQKFNGLTVLPPLLTDEMIAQYTSALLAGTITSGWTFGAGAALQIPFAMQMAYRFNGIGVTQNVLYENQKLIANQFNSAIGKIQDSLSSTASALGKLQDVVNQNAQALNTLVKQLSSNFGAISSVLNDILSRLDKVEAEVQIDRLITGRLQSLQTYVTQQLIRAAEIRASANLAATKMSECVLGQSKRVDFCGKGYHLMSFPQSAPHGVVFLHVTYVPAQEKNFTTAPAICHDGKAHFPREGVFVSNGTHWFVTQRNFCEPQIITTDNTFVSGNCDVVIGIVNNTVYDPLQPELDSFKEELDKYFKNHTSPDVDLGDISGINASVVNIQKEIDRLNEVAKNLNESLIDLQELGKYEQYIKGGSGYIPEAPRDGQAYVRKDGEWVLLSTFL

SEQ ID NO: 6093 - protein, 1241 aa, Artificial Sequence
  SARS-CoV-2/Congo/94/2020__EPI_ISL_417947 spike protein (1-1211)(I714C_Y1110C) Foldon construct
MFVFLVLLPLVSSQCVNLTTRTQLPPAYTNSFTRGVYYPDKVFRSSVLHSTQDLFLPFFSNVTWFHAIHVSGTNGTKRFDNPVLPFNDGVYFASTEKSNIIRGWIFGTTLDSKTQSLLIVNNATNVVIKVCEFQFCNDPFLGVYYHKNNKSWMESEFRVYSSANNCTFEYVSQPFLMDLEGKQGNFKNLREFVFKNIDGYFKIYSKHTPINLVRDLPQGFSALEPLVDLPIGINITRFQTLLALHRSYLTPGDSSSGWTAGAAAYYVGYLQPRTFLLKYNENGTITDAVDCALDPLSETKCTLKSFTVEKGIYQTSNFRVQPTESIVRFPNITNLCPFGEVFNATRFASVYAWNRKRISNCVADYSVLYNSASFSTFKCYGVSPTKLNDLCFTNVYADSFVIRGDEVRQIAPGQTGKIADYNYKLPDDFTGCVIAWNSNNLDSKVGGNYNYLYRLFRKSNLKPFERDISTEIYQAGSTPCNGVEGFNCYFPLQSYGFQPTNGVGYQPYRVVVLSFELLHAPATVCGPKKSTNLVKNKCVNFNFNGLTGTGVLTESNKKFLPFQQFGRDIADTTDAVRDPQTLEILDITPCSFGGVSVITPGTNTSNQVAVLYQGVNCTEVPVAIHADQLTPTWRVYSTGSNVFQTRAGCLIGAEHVNNSYECDIPIGAGICASYQTQTNSPRRARSVASQSIIAYTMSLGAENSVAYSNNSIACPTNFTISVTTEILPVSMTKTSVDCTMYICGDSTECSNLLLQYGSFCTQLNRALTGIAVEQDKNTQEVFAQVKQIYKTPPIKDFGGFNFSQILPDPSKPSKRSFIEDILFNKVTLADAGFIKQYGDCLGDIAARDLICAQKFNGLTVLPPLLTDEMIAQYTSALLAGTITSGWTFGAGAALQIPFAMQMAYRFNGIGVTQNVLYENQKLIANQFNSAIGKIQDSLSSTASALGKLQDVVNQNAQALNTLVKQLSSNFGAISSVLNDILSRLDKVEAEVQIDRLITGRLQSLQTYVTQQLIRAAEIRASANLAATKMSECVLGQSKRVDFCGKGYHLMSFPQSAPHGVVFLHVTYVPAQEKNFTTAPAICHDGKAHFPREGVFVSNGTHWFVTQRNFCEPQIITTDNTFVSGNCDVVIGIVNNTVYDPLQPELDSFKEELDKYFKNHTSPDVDLGDISGINASVVNIQKEIDRLNEVAKNLNESLIDLQELGKYEQYIKGGSGYIPEAPRDGQAYVRKDGEWVLLSTFL

SEQ ID NO: 6094 - protein, 1241 aa, Artificial Sequence
  SARS-CoV-2/Congo/158/2020__EPI_ISL_417950 spike protein (1-1211)(I714C_Y1110C) Foldon construct
MFVFLVLLPLVSSQCVNLTTRTQLPPAYTNSFTRGVYYPDKVFRSSVLHSTQDLFLPFFSNVTWFHAIHVSGTNGTKRFDNPVLPFNDGVYFASTEKSNIIRGWIFGTTLDSKTQSLLIVNNATNVVIKVCEFQFCNDPFLGVYYHKNNKSWMESEFRVYSSANNCTFEYVSQPFLMDLEGKQGNFKNLREFVFKNIDGYFKIYSKHTPINLVRDLPQGFSALEPLVDLPIGINITRFQTLLALHRSYLTPGDSSSGWTAGAAAYYVGYLQPRTFLLKYNENGTITDAVDCALDPLSETKCTLKSFTVEKGIYQTSNFRVQPTESIVRFPNITNLCPFGEVFNATRFASVYAWNRKRISNCVADYSVLYNSASFSTFKCYGVSPTKLNDLCFTNVYADSFVIRGDEVRQIAPGQTGKIADYNYKLPDDFTGCVIAWNSNNLDSKVGGNYNYLYRLFRKSNLKPFERDISTEIYQAGSTPCNGVEGFNCYFPLQSYGFQPTNGVGYQPYRVVVLSFELLHAPATVCGPKKSTNLVKNKCVNFNFNGLTGTGVLTESNKKFLPFQQFGRDIADTTDAVRDPQTLEILDITPCSFGGVSVITPGTNTSNQVAVLYQDVNCTEVPVAIHADQLTPTWRVYSTGSNVFQTRAGCLIGAEHVNNSYECDIPIGAGICASYQTQTNSPRRARSVASQSIIAYTMSLGAENSVAYSNNSIACPTNFTISVTTEILPVSMTKTSVDCTMYICGDSTECSNLLLQYGSFCTQLNRALTGIAVEQDKNTQEVFAQVKQIYKTPPIKDFGGFNFSQILPDPSKPSKRSFIEDLLFNKVTLADAGFIKQYGDCLGDIAARDLICAQKFNGLTVLPPLLTDEMIAQYTSALLAGTITSGWTFGAGAALQIPFAMQMAYRFNGIGVTQNVLYENQKLIANQFNSAIGKIQDSLSSTASALGKLQDVVNQNAQALNTLVKQLSSNFGAISSVLNDILSRLDKVEAEVQIDRLITGRLQSLQTYVTQQLIRAAEIRASANLAATKMSECVLGQSKRVDFCGKGYHLMSFPQSAPHGVVFLHVTYVPAQEKNFTTAPAICHDGKAHFPREGVFVSNGTHWFVTQRNFCEPQIITTDNTFLSGNCDVVIGIVNNTVYDPLQPELDSFKEELDKYFKNHTSPDVDLGDISGINASVVNIQKEIDRLNEVAKNLNESLIDLQELGKYEQYIKGGSGYIPEAPRDGQAYVRKDGEWVLLSTFL

SEQ ID NO: 6095 - protein, 1241 aa, Artificial Sequence
  SARS-CoV-2/USA/UT-00034/2020__EPI_ISL_417977 spike protein (1-1211)(I714C_Y1110C) Foldon construct
MFVFLVLLPLVSSQCVNLTTRTQLPPAYTNSFTRGVYYPDKVFRSSVLHSTQDLFLPFFSNVTWFHAIHVSGTNGTKRFDNPVLPFNDGVYFASTEKSNIIRGWIFGTTLDSKTQSLLIVNNATNVVIKVCEFQFCNDPFLGVYYYKNNKSWMESEFRVYSSANNCTFEYVSQPFLMDLEGKQGNFKNLREFVFKNIDGYFKIYSKHTPINLVRDLPQGFSALEPLVDLPIGINITRFQTLLALHRSYLTPGDSSSGWTAGAAAYYVGYLQPRTFLLKYNENGTITDAVDCALDPLSETKCTLKSFTVEKGIYQTSNFRVQPTESIVRFPNITNLCPFGEVFNATRFASVYAWNRKRISNCVADYSVLYNSASFSTFKCYGVSPTKLNDLCFTNVYADSFVIRGDEVRQIAPGQTGKIADYNYKLPDDFTGCVIAWNSNNLDSKVGGNYNYLYRLFRKSNLKPFERDISTEIYQAGSTPCNGVEGFNCYFPLQSYGFQPTNGVGYQPYRVVVLSFELLHAPATVCGPKKSTNLVKNKCVNFNFNGLTGTGVLTESNKKFLPFQQFGRDIADTTDAVRDPQTLEILDITPCSFGGVSVITPGTNTSNQVAVLYQGVNCTEVPVAIHADQLTPTWRVYSTGSNVFQTRAGCLIGAEHVNNSYECDIPIGAGICASYQTQTNSPRRARSVASQSIIAYTMSLGAENSVAYSNNSIACPTNFTISVTTEILPVSMTKTSVDCTMYICGDSTECSNLLLQYGSFCTQLNRALTGIAVEQDKNTQEVFAQVKQIYKTPPIKDFGGFNFSQILPDPSKPSKRSFIEDLLFNKVTLADAGFIKQYGDCLGDIAARDLICAQKFNGLTVLPPLLTDEMIAQYTSALLAGTITSGWTFGAGAALQIPFAMQMAYRFNGIGVTQNVLYENQKLIANQFNSAIGKIQDSLSSTASALGKLQDVVNQNAQALNTLVKQLSSNFGAISSVLNDILSRLDKVEAEVQIDRLITGRLQSLQTYVTQQLIRAAEIRASANLAATKMSECVLGQSKRVDFCGKGYHLMSFPQSAPHGVVFLHVTYVPAQEKNFTTAPAICHDGKAHFPREGVFVSNGTHWFVTQRNFCEPQIITTDNTFVSGNCDVVIGIVNNTVYDPLQPELDSFKEELDKYFKNHTSPDVDLGDISGINASVVNIQKEIDRLNEVAKNLNESLIDLQELGKYEQYIKGGSGYIPEAPRDGQAYVRKDGEWVLLSTFL

SEQ ID NO: 6096 - protein, 1241 aa, Artificial Sequence
  SARS-CoV-2/USA/UT-00033/2020__EPI_ISL_417976 spike protein (1-1211)(I714C_Y1110C) Foldon construct
MFVFLVLLPLVSSQCVNLTTRTQLPPAYTNSFTRGVYYPDKVFRSSVLHSTQDLFLPFFSNVTWFHAIHVSGTNGTKRFDNPVLPFNDGVYFASTEKSNIIRGWIFGTTLDSKTQSLLIVNNATNVVIKVCEFQFCNDPFLGVYYHKNNKSWMESEFRVYSSANNCTFEYVSQPFLMDLEGKQGNFKNLREFVFKNIDGYFKIYSKHTPINLVRDLPQGFSALEPLVDLPIGINITRFQTLLALHRSYLTPGDSSSGLTAGAAAYYVGYLQPRTFLLKYNENGTITDAVDCALDPLSETKCTLKSFTVEKGIYQTSNFRVQPTESIVRFPNITNLCPFGEVFNATRFASVYAWNRKRISNCVADYSVLYNSASFSTFKCYGVSPTKLNDLCFTNVYADSFVIRGDEVRQIAPGQTGKIADYNYKLPDDFTGCVIAWNSNNLDSKVGGNYNYLYRLFRKSNLKPFERDISTEIYQAGSTPCNGVEGFNCYFPLQSYGFQPTNGVGYQPYRVVVLSFELLHAPATVCGPKKSTNLVKNKCVNFNFNGLTGTGVLTESNKKFLPFQQFGRDIADTTDAVRDPQTLEILDITPCSFGGVSVITPGTNTSNQVAVLYQGVNCTEVPVAIHADQLTPTWRVYSTGSNVFQTRAGCLIGAEHVNNSYECDIPIGAGICASYQTQTNSPRRARSVASQSIIAYTMSLGAENSVAYSNNSIACPTNFTISVTTEILPVSMTKTSVDCTMYICGDSTECSNLLLQYGSFCTQLNRALTGIAVEQDKNTQEVFAQVKQIYKTPPIKDFGGFNFSQILPDPSKPSKRSFIEDLLFNKVTLADAGFIKQYGDCLGDIAARDLICAQKFNGLTVLPPLLTDEMIAQYTSALLAGTITSGWTFGAGAALQIPFAMQMAYRFNGIGVTQNVLYENQKLIANQFNSAIGKIQDSLSSTASALGKLQDVVNQNAQALNTLVKQLSSNFGAISSVLNDILSRLDKVEAEVQIDRLITGRLQSLQTYVTQQLIRAAEIRASANLAATKMSECVLGQSKRVDFCGKGYHLMSFPQSAPHGVVFLHVTYVPAQEKNFTTAPAICHDGKAHFPREGVFVSNGTHWFVTQRNFCEPQIITTDNTFVSGNCDVVIGIVNNTVYDPLQPELDSFKEELDKYFKNHTSPDVDLGDISGINASVVNIQKEIDRLNEVAKNLNESLIDLQELGKYEQYIKGGSGYIPEAPRDGQAYVRKDGEWVLLSTFL

SEQ ID NO: 6097 - protein, 1241 aa, Artificial Sequence
  SARS-CoV-2/USA/WI-13/2020__EPI_ISL_417516 spike protein (1-1211)(I714C_Y1110C) Foldon construct
MFVFLVLLPLVSSQCVNLTTRTQLPPAYTNSFTRGVYYPDKVFRSSVLHSTQDLFLPFFSNVTWFHAIHVSGTNGTKRFDNPVLPFNDGVYFASTEKSNIIRGWIFGTTLDSKTQSLLIVNNATNVVIKVCEFQFCNDPFLGVYYHKNNKSWMESEFRVYSSANNCTFEYVSQPFLMDLEGKQGNFKNLREFVFKNIDGYFKIYSKHTPINLVRDLPQGFSALEPLVDLPIGINITRFQTLLALHRSYLTPGDSSSGWTAGAAAYYVGYLQPRTFLLKYNENGTITDAVDCALDPLSETKCTLKSFTVEKGIYQTSNFRVLPTESIVRFPNITNLCPFGEVFNATRFASVYAWNRKRISNCVADYSVLYNSASFSTFKCYGVSPTKLNDLCFTNVYADSFVIRGDEVRQIAPGQTGKIADYNYKLPDDFTGCVIAWNSNNLDSKVGGNYNYLYRLFRKSNLKPFERDISTEIYQAGSTPCNGVEGFNCYFPLQSYGFQPTNGVGYQPYRVVVLSFELLHAPATVCGPKKSTNLVKNKCVNFNFNGLTGTGVLTESNKKFLPFQQFGRDIADTTDAVRDPQTLEILDITPCSFGGVSVITPGTNTSNQVAVLYQGVNCTEVPVAIHADQLTPTWRVYSTGSNVFQTRAGCLIGAEHVNNSYECDIPIGAGICASYQTQTNSPRRARSVASQSIIAYTMSLGAENSVAYSNNSIACPTNFTISVTTEILPVSMTKTSVDCTMYICGDSTECSNLLLQYGSFCTQLNRALTGIAVEQDKNTQEVFAQVKQIYKTPPIKDFGGFNFSQILPDPSKPSKRSFIEDLLFNKVTLADAGFIKQYGDCLGDIAARDLICAQKFNGLTVLPPLLTDEMIAQYTSALLAGTITSGWTFGAGAALQIPFAMQMAYRFNGIGVTQNVLYENQKLIANQFNSAIGKIQDSLSSTASALGKLQDVVNQNAQALNTLVKQLSSNFGAISSVLNDILSRLDKVEAEVQIDRLITGRLQSLQTYVTQQLIRAAEIRASANLAATKMSECVLGQSKRVDFCGKGYHLMSFPQSAPHGVVFLHVTYVPAQEKNFTTAPAICHDGKAHFPREGVFVSNGTHWFVTQRNFCEPQIITTDNTFVSGNCDVVIGIVNNTVYDPLQPELDSFKEELDKYFKNHTSPDVDLGDISGINASVVNIQKEIDRLNEVAKNLNESLIDLQELGKYEQYIKGGSGYIPEAPRDGQAYVRKDGEWVLLSTFL

SEQ ID NO: 6098 - protein, 1240 aa, Artificial Sequence
  SARS-CoV-2/India/1-27/2020__EPI_ISL_413522 spike protein (1-1210)(I713C_Y1109C) Foldon construct
MFVFLVLLPLVSSQCVNLTTRTQLPPAYTNSFTRGVYYPDKVFRSSVLHSTQDLFLPFFSNVTWFHAIHVSGTNGTKRFDNPVLPFNDGVYFASTEKSNIIRGWIFGTTLDSKTQSLLIVNNATNVVIKVCEFQFCNDPFLGVYHKNNKSWMESEFRVYSSANNCTFEYVSQPFLMDLEGKQGNFKNLREFVFKNIDGYFKIYSKHTPINLVRDLPQGFSALEPLVDLPIGINITRFQTLLALHRSYLTPGDSSSGWTAGAAAYYVGYLQPRTFLLKYNENGTITDAVDCALDPLSETKCTLKSFTVEKGIYQTSNFRVQPTESIVRFPNITNLCPFGEVFNATRFASVYAWNRKRISNCVADYSVLYNSASFSTFKCYGVSPTKLNDLCFTNVYADSFVIRGDEVIQIAPGQTGKIADYNYKLPDDFTGCVIAWNSNNLDSKVGGNYNYLYRLFRKSNLKPFERDISTEIYQAGSTPCNGVEGFNCYFPLQSYGFQPTNGVGYQPYRVVVLSFELLHAPATVCGPKKSTNLVKNKCVNFNFNGLTGTGVLTESNKKFLPFQQFGRDIADTTDAVRDPQTLEILDITPCSFGGVSVITPGTNTSNQVAVLYQDVNCTEVPVAIHADQLTPTWRVYSTGSNVFQTRAGCLIGAEHVNNSYECDIPIGAGICASYQTQTNSPRRARSVASQSIIAYTMSLGAENSVAYSNNSIACPTNFTISVTTEILPVSMTKTSVDCTMYICGDSTECSNLLLQYGSFCTQLNRALTGIAVEQDKNTQEVFAQVKQIYKTPPIKDFGGFNFSQILPDPSKPSKRSFIEDLLFNKVTLADAGFIKQYGDCLGDIAARDLICAQKFNGLTVLPPLLTDEMIAQYTSALLAGTITSGWTFGAGAALQIPFAMQMAYRFNGIGVTQNVLYENQKLIANQFNSAIGKIQDSLSSTASALGKLQDVVNQNAQALNTLVKQLSSNFGAISSVLNDILSRLDKVEAEVQIDRLITGRLQSLQTYVTQQLIRAAEIRASANLAATKMSECVLGQSKRVDFCGKGYHLMSFPQSAPHGVVFLHVTYVPAQEKNFTTAPAICHDGKAHFPREGVFVSNGTHWFVTQRNFCEPQIITTDNTFVSGNCDVVIGIVNNTVYDPLQPELDSFKEELDKYFKNHTSPDVDLGDISGINASVVNIQKEIDRLNEVAKNLNESLIDLQELGKYEQYIKGGSGYIPEAPRDGQAYVRKDGEWVLLSTFL

SEQ ID NO: 6099 - protein, 1235 aa, Artificial Sequence
  SARS-CoV-2/pangolin/Guangxi/P4L/2017__EPI_ISL_410538 spike protein (1-1205)(I708C_Y1104C) Foldon construct
MFVFLFVLPLVSSQCVNLTTRTGIPPGYTNSSTRGVYYPDKVFRSSILHLTQDLFLPFFSNVTWFNTINYQGGFKKFDNPVLPFNDGVYFASTEKSNIIRGWIFGTTLDARTQSLLIVNNATNVVIKVCEFQFCTDPFLGVYYHNNNKTWVENEFRVYSSANNCTFEYISQPFLMDLEGKQGNFKNLREFVFKNVDGYFKIYSKHTPIDLVRDLPRGFAALEPLVDLPIGINITRFQTLLALHRSYLTPGNLESGWTTGAAAYYVGYLQQRTFLLSYNQNGTITDAVDCSLDPLSETKCTLKSLTVEKGIYQTSNFRVQPTISIVRFPNITNLCPFGEVFNASKFASVYAWNRKRISNCVADYSVLYNSTSFSTFKCYGVSPTKLNDLCFTNVYADSFVVKGDEVRQIAPGQTGVIADYNYKLPDDFTGCVIAWNSVKQDALTGGNYGYLYRLFRKSKLKPFERDISTEIYQAGSTPCNGQVGLNCYYPLERYGFHPTTGVNYQPFRVVVLSFELLNGPATVCGPKLSTTLVKDKCVNFNFNGLTGTGVLTTSKKQFLPFQQFGRDISDTTDAVRDPQTLEILDITPCSFGGVSVITPGTNTSNQVAVLYQDVNCTEVPMAIHAEQLTPAWRVYSAGANVFQTRAGCLVGAEHVNNSYECDIPVGAGICASYHSMSSLRSVNQRSIIAYTMSLGAENSVAYSNNSIACPTNFTISVTTEILPVSMTKTSVDCTMYICGDSIECSNLLLQYGSFCTQLNRALTGIAVEQDKNTQEVFAQVKQIYKTPPIKDFGGFNFSQILPDPSKPSKRSFIEDLLFNKVTLADAGFIKQYGDCLGDIAARDLICAQKFNGLTVLPPLLTDEMIAQYTSALLAGTITSGWTFGAGAALQIPFAMQMAYRFNGIGVTQNVLYENQKLIANQFNSAIGKIQDSLSSTASALGKLQDVVNQNAQALNTLVKQLSSNFGAISSVLNDILSRLDKVEAEVQIDRLITGRLQSLQTYVTQQLIRAAEIRASANLAATKMSECVLGQSKRVDFCGKGYHLMSFPQSAPHGVVFLHVTYVPAQEKNFTTAPAICHEGKAHFPREGVFVSNGTHWFITQRNFCEPQIITTDNTFVSGSCDVVIGIVNNTVYDPLQPELDSFKEELDKYFKNHTSPDVDLGDISGINASVVNIQKEIDRLNEVAKNLNESPIDLQELGKYEQYIKGGSGYIPEAPRDGQAYVRKDGEWVLLSTFL

SEQ ID NO: 6100 - protein, 1235 aa, Artificial Sequence
  SARS-CoV-2/pangolin/Guangxi/P5L/2017__EPI_ISL_410540 spike protein (1-1205)(I708C_Y1104C) Foldon construct
MFVFLFVLPLVSSQCVNLTTRTGIPPGYTNSSTRGVYYPDKVFRSSILHLTQDLFLPFFSNVTWFNTINYQGGFKKFDNPVLPFNDGVYFASTEKSNIIRGWIFGTTLDARTQSLLIVNNATNVVIKVCEFQFCTDPFLGVYYHNNNKTWVENEFRVYSSANNCTFEYISQPFLMDLEGKQGNFKNLREFVFKNVDGYFKIYSKHTPIDLVRDLPRGFAALEPLVDLPIGINITRFQTLLALHRSYLTPGKLESGWTTGAAAYYVGYLQQRTFLLSYNQNGTITDAVDCSLDPLSETKCTLKSLTVEKGIYQTSNFRVQPTISIVRFPNITNLCPFGEVFNASKFASVYAWNRKRISNCVADYSVLYNSTSFSTFKCYGVSPTKLNDLCFTNVYADSFVVKGDEVRQIAPGQTGVIADYNYKLPDDFTGCVIAWNSVKQDALTGGNYGYLYRLFRKSKLKPFERDISTEIYQAGSTPCNGQVGLNCYYPLERYGFHPTTGVNYQPFRVVVLSFELLNGPATVCGPKLSTTLVKDKCVNFNFNGLTGTGVLTTSKKQFLPFQQFGRDISDTTDAVRDPQTLEILDITPCSFGGVSVITPGTNTSNQVAVLYQDVNCTEVPMAIHAEQLTPAWRVYSAGANVFQTRAGCLVGAEHVNNSYECDIPVGAGICASYHSMSSFRSVNQRSIIAYTMSLGAENSVAYSNNSIACPTNFTISVTTEILPVSMTKTSVDCTMYICGDSIECSNLLLQYGSFCTQLNRALTGIAVEQDKNTQEVFAQVKQIYKTPPIKDFGGFNFSQILPDPSKPSKRSFIEDLLFNKVTLADAGFIKQYGDCLGDIAARDLICAQKFNGLTVLPPLLTDEMIAQYTSALLAGTITSGWTFGAGAALQIPFAMQMAYRFNGIGVTQNVLYENQKLIANQFNSAIGKIQDSLSSTASALGKLQDVVNQNAQALNTLVKQLSSNFGAISSVLNDILSRLDKVEAEVQIDRLITGRLQSLQTYVTQQLIRAAEIRASANLAATKMSECVLGQSKRVDFCGKGYHLMSFPQSAPHGVVFLHVTYVPAQEKNFTTAPAICHEGKAHFPREGVFVSNGTHWFITQRNFCEPQIITTDNTFVSGSCDVVIGIVNNTVYDPLQPELDSFKEELDKYFKNHTSPDVDLGDISGINASVVNIQKEIDRLNEVAKNLNESLIDLQELGKYEQYIKGGSGYIPEAPRDGQAYVRKDGEWVLLSTFL

SEQ ID NO: 6101 - protein, 1235 aa, Artificial Sequence
  SARS-CoV-2/pangolin/Guangxi/P5E/2017__EPI_ISL_410541 spike protein (1-1205)(I708C_Y1104C) Foldon construct
MFVFLFVLPLVSSQCVNLTTRTGIPPGYTNSSTRGVYYPDKVFRSSILHLTQDLFLPFFSNVTWFNTITYQGGSKKFDNPVLPFNDGVYFASTEKSNIIRGWIFGTTLDARTQSLLIVNNATNVVIKVCEFQFCTDPFLGVYYHNNNKTWVENEFRVYSSANNCTFEYISQPFLMDLEGKQGNFKNLREFVFKNVDGYFKIYSKHTPIDLVRDLPRGFAALEPLVDLPIGINITRFQTLLALHRSYLTPGKLESGWTTGAAAYYVGYLQQRTFLLSYNQNGTITDAVDCSLDPLSETKCTLKSLTVEKGIYQTSNFRVQPTISIVRFPNITNLCPFGEVFNASKFASVYAWNRKRISNCVADYSVLYNSTSFSTFKCYGVSPTKLNDLCFTNVYADSFVVKGDEVRQIAPGQTGVIADYNYKLPDDFTGCVIAWNSVKQDALTGDNYGYLYRLFRKSKLKPFERDISTEIYQAGSTPCNGQVGLNCYYPLERYGFHPTTGVNYQPFRVVVLSFELLNGPATVCGPKLSTTLVKDKCVNFNFNGLTGTGVLTTSKKQFLPFQQFGRDISDTTDAVRDPQTLEILDITPCSFGGVSVITPGTNTSNQVAVLYQDVNCTEVPMAIHAEQLTPAWRVYSAGANVFQTRAGCLVGAEHVNNSYECDIPVGAGICASYHSMSSFRSVNQRSIIAYTMSLGAENSVAYSNNSIACPTNFTISVTTEILPVSMTKTSVDCTMYICGDSIECSNLLLQYGSFCTQLNRALTGIAVEQDKNTQEVFAQVKQIYKTPPIKDFGGFNFSQILPDPSKPSKRSFIEDLLFNKVTLADAGFIKQYGDCLGDIAARDLICAQKFNGLTVLPPLLTDEMIAQYTSALLAGTITSGWTFGAGAALQIPFAMQMAYRFNGIGVTQNVLYENQKLIANQFNSAIGKIQDSLSSTASALGKLQDVVNQNAQALNTLVKQLSSNFGAISSVLNDILSRLDKVEAEVQIDRLITGRLQSLQTYVTQQLIRAAEIRASANLAATKMSECVLGQSKRVDFCGKGYHLMSFPQSAPHGVVFLHVTYVPAQEKNFTTAPAICHEGKAHFPREGVFVSNGTHWFITQRNFCEPQIITTDNTFVSGSCDVVIGIVNNTVYDPLQPELDSFKEELDKYFKNHTSPDVDLGDISGINASVVNIQKEIDRLNEVAKNLNESLIDLQELGKYEQYIKGGSGYIPEAPRDGQAYVRKDGEWVLLSTFL

SEQ ID NO: 6102 - protein, 1233 aa, Artificial Sequence
  SARS-CoV-2/pangolin/Guangxi/P1E/2017__EPI_ISL_410539 spike protein (1-1203)(I706C_Y1102C) Foldon construct
MFVFLFVLPLVSSQCVNLTTRTGIQPGYTNSSTRGVYYPDKVFRSSILHLTQDLFLPFFSNVTWFNTINYQGGFKKFDNPVLPFNDGVYFASTEKSNIIRGWIFGTTLDARTQSLLIVNNATNVVIKVCEFQFCTDPFLGVYYHNNNKTWVENEFRVYSSANNCTFEYISQPFLMDLEGKQGNFKNLREFVFKNVDGYFKIYSKHTPIDLVRDLPRGFAALEPLVDLPIGINITRFQTLLALHRSYLTPGKLESGWTTGAAAYYVGYLQQRTFLLSYNQNGTITDAVDCSLDPLSETKCTLKSLTVEKGIYQTSNFRVQPTISIVRFPNITNLCPFGEVFNASKFASVYAWNRKRISNCVADYSVLYNSTSFSTFKCYGVSPTKLNDLCFTNVYADSFVVKGDEVRQIAPGQTGVIADYNYKLPDDFTGCVIAWNSVKQDALTGGNYLYRLFRKSKLKPFERDISTEIYQAGSTPCNGQVGLNCYYPLERYGFHPTTGVNYQPFRVVVLSFELLNGPATVCGPKLSTTLVKDKCVNFNFNGLTGTGVLTTSKKQFLPFQQFGRDISDTTDAVRDPQTLEILDITPCSFGGVSVITPGTNTSNQVAVLYQDVNCTEVPMAIHAEQLTPAWRVYSAGANVFQTRAGCLVGAEHVNNSYECDIPVGAGICASYHSMSSLRSVNQRSIIAYTMSLGAENSVAYSNNSIACPTNFTISVTTEILPVSMTKTSVDCTMYICGDSIECSNLLLQYGSFCTQLNRALTGIAVEQDKNTQEVFAQVKQIYKTPPIKDFGGFNFSQILPDPSKPSKRSFIEDLLFNKVTLADAGFIKQYGDCLGDIAARDLICAQKFNGLTVLPPLLTDEMIAQYTSALLAGTITSGWTFGAGAALQIPFAMQMAYRFNGIGVTQNVLYENQKLIANQFNSAIGKIQDSLSSTASALGKLQDVVNQNAQALNTLVKQLSSNFGAISSVLNDILSRLDKVEAEVQIDRLITGRLQSLQTYVTQQLIRAAEIRASANLAATKMSECVLGQSKRVDFCGKGYHLMSFPQSAPHGVVFLHVTYVPAQEKNFTTAPAICHEGKAHFPREGVFVSNGTHWFITQRNFCEPQIITTDNTFVSGSCDVVIGIVNNTVYDPLQPELDSFKEELDKYFKNHTSPDVDLGDISGINASVVNIQKEIDRLNEVAKNLNESLIDLQELGKYEQYIKGGSGYIPEAPRDGQAYVRKDGEWVLLSTFL

SEQ ID NO: 6103 - protein, 1241 aa, Artificial Sequence
  SARS-CoV-2/Wuhan/WIV05/2019__EPI_ISL_402128 spike protein (1-1211)(P715C_P1069C) Foldon construct
MFVFLVLLPLVSSQCVNLTTRTQLPPAYTNSFTRGVYYPDKVFRSSVLHSTQDLFLPFFSNVTWFHAIHVSGTNGTKRFDNPVLPFNDGVYFASTEKSNIIRGWIFGTTLDSKTQSLLIVNNATNVVIKVCEFQFCNDPFLGVYYHKNNKSWMESEFRVYSSANNCTFEYVSQPFLMDLEGKQGNFKNLREFVFKNIDGYFKIYSKHTPINLVRDLPQGFSALEPLVDLPIGINITRFQTLLALHRSYLTPGDSSSGWTAGAAAYYVGYLQPRTFLLKYNENGTITDAVDCALDPLSETKCTLKSFTVEKGIYQTSNFRVQPTESIVRFPNITNLCPFGEVFNATRFASVYAWNRKRISNCVADYSVLYNSASFSTFKCYGVSPTKLNDLCFTNVYADSFVIRGDEVRQIAPGQTGKIADYNYKLPDDFTGCVIAWNSNNLDSKVGGNYNYLYRLFRKSNLKPFERDISTEIYQAGSTPCNGVEGFNCYFPLQSYGFQPTNGVGYQPYRVVVLSFELLHAPATVCGPKKSTNLVKNKCVNFNFNGLTGTGVLTESNKKFLPFQQFGRDIADTTDAVRDPQTLEILDITPCSFGGVSVITPGTNTSNQVAVLYQDVNCTEVPVAIHADQLTPTWRVYSTGSNVFQTRAGCLIGAEHVNNSYECDIPIGAGICASYQTQTNSPRRARSVASQSIIAYTMSLGAENSVAYSNNSIAICTNFTISVTTEILPVSMTKTSVDCTMYICGDSTECSNLLLQYGSFCTQLNRALTGIAVEQDKNTQEVFAQVKQIYKTPPIKDFGGFNFSQILPDPSKPSKRSFIEDLLFNKVTLADAGFIKQYGDCLGDIAARDLICAQKFNGLTVLPPLLTDEMIAQYTSALLAGTITSGWTFGAGAALQIPFAMQMAYRFNGIGVTQNVLYENQKLIANQFNSAIGKIQDSLSSTASALGKLQDVVNQNAQALNTLVKQLSSNFGAISSVLNDILSRLDKVEAEVQIDRLITGRLQSLQTYVTQQLIRAAEIRASANLAATKMSECVLGQSKRVDFCGKGYHLMSFPQSAPHGVVFLHVTYVCAQEKNFTTAPAICHDGKAHFPREGVFVSNGTHWFVTQRNFYEPQIITTDNTFVSGNCDVVIGIVNNTVYDPLQPELDSFKEELDKYFKNHTSPDVDLGDISGINASVVNIQKEIDRLNEVAKNLNESLIDLQELGKYEQYIKGGSGYIPEAPRDGQAYVRKDGEWVLLSTFL

SEQ ID NO: 6104 - protein, 1237 aa, Artificial Sequence
  SARS-CoV-2/bat/Yunnan/RaTG13/2013__EPI_ISL_402131 spike protein (1-1207)(P711C_P1065C) Foldon construct
MFVFLVLLPLVSSQCVNLTTRTQLPPAYTNSSTRGVYYPDKVFRSSVLHLTQDLFLPFFSNVTWFHAIHVSGTNGIKRFDNPVLPFNDGVYFASTEKSNIIRGWIFGTTLDSKTQSLLIVNNATNVVIKVCEFQFCNDPFLGVYYHKNNKSWMESEFRVYSSANNCTFEYVSQPFLMDLEGKQGNFKNLREFVFKNIDGYFKIYSKHTPINLVRDLPPGFSALEPLVDLPIGINITRFQTLLALHRSYLTPGDSSSGWTAGAAAYYVGYLQPRTFLLKYNENGTITDAVDCALDPLSETKCTLKSFTVEKGIYQTSNFRVQPTDSIVRFPNITNLCPFGEVFNATTFASVYAWNRKRISNCVADYSVLYNSTSFSTFKCYGVSPTKLNDLCFTNVYADSFVITGDEVRQIAPGQTGKIADYNYKLPDDFTGCVIAWNSKHIDAKEGGNFNYLYRLFRKANLKPFERDISTEIYQAGSKPCNGQTGLNCYYPLYRYGFYPTDGVGHQPYRVVVLSFELLNAPATVCGPKKSTNLVKNKCVNFNFNGLTGTGVLTESNKKFLPFQQFGRDIADTTDAVRDPQTLEILDITPCSFGGVSVITPGTNASNQVAVLYQDVNCTEVPVAIHADQLTPTWRVYSTGSNVFQTRAGCLIGAEHVNNSYECDIPIGAGICASYQTQTNSRSVASQSIIAYTMSLGAENSVAYSNNSIAICTNFTISVTTEILPVSMTKTSVDCTMYICGDSTECSNLLLQYGSFCTQLNRALTGIAVEQDKNTQEVFAQVKQIYKTPPIKDFGGFNFSQILPDPSKPSKRSFIEDLLFNKVTLADAGFIKQYGDCLGDIAARDLICAQKFNGLTVLPPLLTDEMIAQYTSALLAGTITSGWTFGAGAALQIPFAMQMAYRFNGIGVTQNVLYENQKLIANQFNSAIGKIQDSLSSTASALGKLQDVVNQNAQALNTLVKQLSSNFGAISSVLNDILSRLDKVEAEVQIDRLITGRLQSLQTYVTQQLIRAAEIRASANLAATKMSECVLGQSKRVDFCGKGYHLMSFPQSAPHGVVFLHVTYVCAQEKNFTTAPAICHDGKAHFPREGVFVSNGTHWFVTQRNFYEPQIITTDNTFVSGSCDVVIGIVNNTVYDPLQPELDSFKEELDKYFKNHTSPDVDLGDISGINASVVNIQKEIDRLNEVAKNLNESLIDLQELGKYEQYIKGGSGYIPEAPRDGQAYVRKDGEWVLLSTFL

SEQ ID NO: 6105 - protein, 1241 aa, Artificial Sequence
  SARS-CoV-2/Wuhan/HBCDC-HB-01/2019__EPI_ISL_402132 spike protein (1-1211)(P715C_P1069C) Foldon construct
MFVFLVLLPLVSSQCVNLTTRTQLPPAYTNSITRGVYYPDKVFRSSVLHSTQDLFLPFFSNVTWFHAIHVSGTNGTKRFDNPVLPFNDGVYFASTEKSNIIRGWIFGTTLDSKTQSLLIVNNATNVVIKVCEFQFCNDPFLGVYYHKNNKSWMESEFRVYSSANNCTFEYVSQPFLMDLEGKQGNFKNLREFVFKNIDGYFKIYSKHTPINLVRDLPQGFSALEPLVDLPIGINITRFQTLLALHRSYLTPGDSSSGWTAGAAAYYVGYLQPRTFLLKYNENGTITDAVDCALDPLSETKCTLKSFTVEKGIYQTSNFRVQPTESIVRFPNITNLCPFGEVFNATRFASVYAWNRKRISNCVADYSVLYNSASFSTFKCYGVSPTKLNDLCFTNVYADSFVIRGDEVRQIAPGQTGKIADYNYKLPDDFTGCVIAWNSNNLDSKVGGNYNYLYRLFRKSNLKPFERDISTEIYQAGSTPCNGVEGFNCYFPLQSYGFQPTNGVGYQPYRVVVLSFELLHAPATVCGPKKSTNLVKNKCVNFNFNGLTGTGVLTESNKKFLPFQQFGRDIADTTDAVRDPQTLEILDITPCSFGGVSVITPGTNTSNQVAVLYQDVNCTEVPVAIHADQLTPTWRVYSTGSNVFQTRAGCLIGAEHVNNSYECDIPIGAGICASYQTQTNSPRRARSVASQSIIAYTMSLGAENSVAYSNNSIAICTNFTISVTTEILPVSMTKTSVDCTMYICGDSTECSNLLLQYGSFCTQLNRALTGIAVEQDKNTQEVFAQVKQIYKTPPIKDFGGFNFSQILPDPSKPSKRSFIEDLLFNKVTLADAGFIKQYGDCLGDIAARDLICAQKFNGLTVLPPLLTDEMIAQYTSALLAGTITSGWTFGAGAALQIPFAMQMAYRFNGIGVTQNVLYENQKLIANQFNSAIGKIQDSLSSTASALGKLQDVVNQNAQALNTLVKQLSSNFGAISSVLNDILSRLDKVEAEVQIDRLITGRLQSLQTYVTQQLIRAAEIRASANLAATKMSECVLGQSKRVDFCGKGYHLMSFPQSAPHGVVFLHVTYVCAQEKNFTTAPAICHDGKAHFPREGVFVSNGTHWFVTQRNFYEPQIITTDNTFVSGNCDVVIGIVNNTVYDPLQPELDSFKEELDKYFKNHTSPDVDLGDISGINASVVNIQKEIDRLNEVAKNLNESLIDLQELGKYEQYIKGGSGYIPEAPRDGQAYVRKDGEWVLLSTFL

SEQ ID NO: 6106 - protein, 1241 aa, Artificial Sequence
  SARS-CoV-2/Guangdong/20SF028/2020__EPI_ISL_403936 spike protein (1-1211)(P715C_P1069C) Foldon construct
MFVFLVLLPLVSSQCVNLTTRTQLPPAYTNSFTRGVYYPDKVFRSSVLYSTQDLFLPFFSNVTWFHAIHVSGTNGTKRFDNPVLPFNDGVYFASTEKSNIIRGWIFGTTLDSKTQSLLIVNNATNVVIKVCEFQFCNDPFLGVYYHKNNKSWMESEFRVYSSANNCTFEYVSQPFLMDLEGKQGNFKNLREFVFKNIDGYFKIYSKHTPINLVRDLPQGFSALEPLVDLPIGINITRFQTLLALHRSYLTPGDSSSGWTAGAAAYYVGYLQPRTFLLKYNENGTITDAVDCALDPLSETKCTLKSFTVEKGIYQTSNFRVQPTESIVRFPNITNLCPFGEVFNATRFASVYAWNRKRISNCVADYSVLYNSASFSTFKCYGVSPTKLNDLCFTNVYADSFVIRGDEVRQIAPGQTGKIADYNYKLPDDFTGCVIAWNSNNLDSKVGGNYNYLYRLFRKSNLKPFERDISTEIYQAGSTPCNGVEGFNCYFPLQSYGFQPTNGVGYQPYRVVVLSFELLHAPATVCGPKKSTNLVKNKCVNFNFNGLTGTGVLTESNKKFLPFQQFGRDIADTTDAVRDPQTLEILDITPCSFGGVSVITPGTNTSNQVAVLYQDVNCTEVPVAIHADQLTPTWRVYSTGSNVFQTRAGCLIGAEHVNNSYECDIPIGAGICASYQTQTNSPRRARSVASQSIIAYTMSLGAENSVAYSNNSIAICTNFTISVTTEILPVSMTKTSVDCTMYICGDSTECSNLLLQYGSFCTQLNRALTGIAVEQDKNTQEVFAQVKQIYKTPPIKDFGGFNFSQILPDPSKPSKRSFIEDLLFNKVTLADAGFIKQYGDCLGDIAARDLICAQKFNGLTVLPPLLTDEMIAQYTSALLAGTITSGWTFGAGAALQIPFAMQMAYRFNGIGVTQNVLYENQKLIANQFNSAIGKIQDSLSSTASALGKLQDVVNQNAQALNTLVKQLSSNFGAISSVLNDILSRLDKVEAEVQIDRLITGRLQSLQTYVTQQLIRAAEIRASANLAATKMSECVLGQSKRVDFCGKGYHLMSFPQSAPHGVVFLHVTYVCAQEKNFTTAPAICHDGKAHFPREGVFVSNGTHWFVTQRNFYEPQIITTDNTFVSGNCDVVIGIVNNTVYDPLQPELDSFKEELDKYFKNHTSPDVDLGDISGINASVVNIQKEIDRLNEVAKNLNESLIDLQELGKYEQYIKGGSGYIPEAPRDGQAYVRKDGEWVLLSTFL

SEQ ID NO: 6107 - protein, 1241 aa, Artificial Sequence
  SARS-CoV-2/Shenzhen/SZTH-001/2020__EPI_ISL_406592 spike protein (1-1211)(P715C_P1069C) Foldon construct
MFVFLVLLPLVSSQCVNLTTRTQLPPAYTNSFTRGVYYPDKVFRSSVLHSTQDLFLPFFSNVTWFHAIHVSGTNGTKRFDNPVLPFNDGVYFASTEKSNIIRGWIFGTTLDSKTQSLLIVNNATNVVIKVCEFQFCNDPFLGVYYHKNNKSWMESEFRVYSSANNCTFEYVSQPFLMDLEGKQGNFKNLREFVFKNIDGYFKIYSKHTPINLVRDLPQGFSALEPLVDLPIGINITRFQTLLALHRSYLTPGDSSSGWTAGAAAYYVGYLQPRTFLLKYNENGTITDAVDCALDPLSETKCTLKSFTVEKGIYQTSNFRVQPTESIVRFPNITNLCPFGEVFNATRFASVYAWNRKRISNCVADYSVLYNSASFSTFKCYGVSPTKLNDLCFTNVYADSFVIRGDEVRQIAPGQTGKIADYNYKLPDDFTGCVIAWNSNNLDSKVGGNYNYLYRLFRKSNLKPFERDISTEIYQAGSTPCNGVEGFNCYFPLQSYGFQPTNGVGYQPYRVVVLSFELLHAPATVCGPKKSTNLVKNKCVNFNFNGLTGTGVLTESNKKFLPFQQFGRDIADTTDAVRDPQTLEILDITPCSFGGVSVITPGTNTSNQVAVLYQDVNCTEVPVAIHADQLTPTWRVYSTGSNVFQTRAGCLIGAEHVNNSYECDIPIGAGICASYQTQTNSPRRARSVASQSIIAYTMSLGAENSVAYSNNSIAICTNFTISVTTEILPVSMTKTSVDCTMYICGDSTECSNLLLQYGSFCTQLNRALTGIAVEQDKNTQEVFAQVKQIYKTPPIKDFGGFNFSQILPDPSKPSKRSFIEDLLFNKVTLADAGFIKQYGDCLGDIAARDLICAQKFNGLTVLPPLLTDEMIAQYTSALLAGTITSGWTFGAGAALQIPFAMQMAYRFNGIGVTQNVLYENQKLIANQFNSAIGKIQDSLSSTASALGKLQDVVNQNAQALNTLVKQLSSNFGAISSVLNDILSRLDKVEAEVQIDRLITGRLQSLQTYVTQQLIRAAEIRASANLAATKMSECVLGQSKRVDFCGKGYHLMSFPQSAPHGVVFLHVTYVCAQEKNFTTAPAICHDGKAHFPREGVFVSNGTHWFVTQRNFYEPQIITTDNTFVSGNCDVLIGIVNNTVYDPLQPELDSFKEELDKYFKNHTSPDVDLGDISGINASVVNIQKEIDRLNEVAKNLNESLIDLQELGKYEQYIKGGSGYIPEAPRDGQAYVRKDGEWVLLSTFL

SEQ ID NO: 6108 - protein, 1241 aa, Artificial Sequence
  SARS-CoV-2/Shenzhen/SZTH-004/2020__EPI_ISL_406595 spike protein (1-1211)(P715C_P1069C) Foldon construct
MFVFLVLLPLVSSQCVNLTTRTQLPPAYTNSFTRGVYYPDKVFRSSVLHSTQDLFLPFFSNVTWFHAIHVSGTNGTKRFDNPVLPFNDGVYFASTEKSNIIRGWIFGTTLDSKTQSLLIVNNATNVVIKVCEFQFCNDPFLGVYYHKNNKSWMESEFRVYSSANNCTFEYVSQPFLMDLEGKQGNFKNLREFVFKNIDGYFKIYSKHTPINLVRDLPQGFSALEPLVDLPIGINITRFQTLLALHRSYLTPGDSSSGWTAGAAAYYVGYLQPRTFLLKYNENGTITDAVDCALDPLSETKCTLKSFTVEKGIYQTSNFRVQPTESIVRFPNITNLCPFGEVFNATRFASVYAWDRKRISNCVAYYSVLYNSASFSTFKCYGVSPTKLNDLCFTNVYADSFVIRGDEVRQIAPGQTGKIADYNYKLPDDFTGCVIAWNSNNLDSKVGGNYNYLYRLFRKSNLKPFERDISTEIYQAGSTPCNGVEGFNCYFPLQSYGFQPTNGVGYQPYRVVVLSFELLHAPATVCGPKKSTNLVKNKCVNFNFNGLTGTGVLTESNKKFLPFQQFGRDIADTTDAVRDPQTLEILDITPCSFGGVSVITPGTNTSNQVAVLYQDVNCTEVPVAIHADQLTPTWRVYSTGSNVFQTRAGCLIGAEHVNNSYECDIPIGAGICASYQTQTNSPRRARSVASQSIIAYTMSLGAENSVAYSNNSIAICTNFTISVTTEILPVSMTKTSVDCTMYICGDSTECSNLLLQYGSFCTQLNRALTGIAVEQDKNTQEVFAQVKQIYKTPPIKDFGGFNFSQILPDPSKPSKRSFIEDLLFNKVTLADAGFIKQYGDCLGDIAARDLICAQKFNGLTVLPPLLTDEMIAQYTSALLAGTITSGWTFGAGAALQIPFAMQMAYRFNGIGVTQNVLYENQKLIANQFNSAIGKIQDSLSSTASALGKLQDVVNQNAQALNTLVKQLSSNFGAISSVLNDILSRLDKVEAEVQIDRLITGRLQSLQTYVTQQLIRAAEIRASANLAATKMSECVLGQSKRVDFCGKGYHLMSFPQSAPHGVVFLHVTYVCAQEKNFTTAPAICHDGKAHFPREGVFVSNGTHWFVTQRNFYEPQIITTDNTFVSGNCDVVIGIVNNTVYDPLQPELDSFKEELDKYFKNHTSPDVDLGDISGINASVVNIQKEIDRLNEVAKNLNESLIDLQELGKYEQYIKGGSGYIPEAPRDGQAYVRKDGEWVLLSTFL

SEQ ID NO: 6109 - protein, 1241 aa, Artificial Sequence
  SARS-CoV-2/France/IDF0372/2020__EPI_ISL_406596 spike protein (1-1211)(P715C_P1069C) Foldon construct
MFVFLVLLPLVSSQCVNLTTRTQLPPAYTNSFTRGVYYPDKVFRSSVLHSTQDLFLPFFSNVTWFHAIHVSGTNGTKRFDNPVLPFNDGVYFASTEKSNIIRGWIFGTTLDSKTQSLLIVNNATNVVIKVCEFQFCNDPFLGVYYHKNNKSWMESEFRVYSSANNCTFEYVSQPFLMDLEGKQGNFKNLREFVFKNIDGYFKIYSKHTPINLVRDLPQGFSALEPLVDLPIGINITRFQTLLALHRSYLTPGDSSSGWTAGAAAYYVGYLQPRTFLLKYNENGTITDAVDCALDPLSETKCTLKSFTVEKGIYQTSNFRVQPTESIVRFPNITNLCPFGEVFNATRFASVYAWNRKRISNCVADYSFLYNSASFSTFKCYGVSPTKLNDLCFTNVYADSFVIRGDEVRQIAPGQTGKIADYNYKLPDDFTGCVIAWNSNNLDSKVGGNYNYLYRLFRKSNLKPFERDISTEIYQAGSTPCNGVEGFNCYFPLQSYGFQPTNGVGYQPYRVVVLSFELLHAPATVCGPKKSTNLVKNKCVNFNFNGLTGTGVLTESNKKFLPFQQFGRDIADTTDAVRDPQTLEILDITPCSFGGVSVITPGTNTSNQVAVLYQDVNCTEVPVAIHADQLTPTWRVYSTGSNVFQTRAGCLIGAEHVNNSYECDIPIGAGICASYQTQTNSPRRARSVASQSIIAYTMSLGAENSVAYSNNSIAICTNFTISVTTEILPVSMTKTSVDCTMYICGDSTECSNLLLQYGSFCTQLNRALTGIAVEQDKNTQEVFAQVKQIYKTPPIKDFGGFNFSQILPDPSKPSKRSFIEDLLFNKVTLADAGFIKQYGDCLGDIAARDLICAQKFNGLTVLPPLLTDEMIAQYTSALLAGTITSGWTFGAGAALQIPFAMQMAYRFNGIGVTQNVLYENQKLIANQFNSAIGKIQDSLSSTASALGKLQDVVNQNAQALNTLVKQLSSNFGAISSVLNDILSRLDKVEAEVQIDRLITGRLQSLQTYVTQQLIRAAEIRASANLAATKMSECVLGQSKRVDFCGKGYHLMSFPQSAPHGVVFLHVTYVCAQEKNFTTAPAICHDGKAHFPREGVFVSNGTHWFVTQRNFYEPQIITTDNTFVSGNCDVVIGIVNNTVYDPLQPELDSFKEELDKYFKNHTSPDVDLGDISGINASVVNIQKEIDRLNEVAKNLNESLIDLQELGKYEQYIKGGSGYIPEAPRDGQAYVRKDGEWVLLSTFL

SEQ ID NO: 6110 - protein, 1241 aa, Artificial Sequence
  SARS-CoV-2/Australia/VIC01/2020__EPI_ISL_406844 spike protein (1-1211)(P715C_P1069C) Foldon construct
MFVFLVLLPLVSSQCVNLTTRTQLPPAYTNSFTRGVYYPDKVFRSSVLHSTQDLFLPFFSNVTWFHAIHVSGTNGTKRFDNPVLPFNDGVYFASTEKSNIIRGWIFGTTLDSKTQSLLIVNNATNVVIKVCEFQFCNDPFLGVYYHKNNKSWMESEFRVYSSANNCTFEYVSQPFLMDLEGKQGNFKNLREFVFKNIDGYFKIYSKHTPINLVRDLPQGFSALEPLVDLPIGINITRFQTLLALHRRYLTPGDSSSGWTAGAAAYYVGYLQPRTFLLKYNENGTITDAVDCALDPLSETKCTLKSFTVEKGIYQTSNFRVQPTESIVRFPNITNLCPFGEVFNATRFASVYAWNRKRISNCVADYSVLYNSASFSTFKCYGVSPTKLNDLCFTNVYADSFVIRGDEVRQIAPGQTGKIADYNYKLPDDFTGCVIAWNSNNLDSKVGGNYNYLYRLFRKSNLKPFERDISTEIYQAGSTPCNGVEGFNCYFPLQSYGFQPTNGVGYQPYRVVVLSFELLHAPATVCGPKKSTNLVKNKCVNFNFNGLTGTGVLTESNKKFLPFQQFGRDIADTTDAVRDPQTLEILDITPCSFGGVSVITPGTNTSNQVAVLYQDVNCTEVPVAIHADQLTPTWRVYSTGSNVFQTRAGCLIGAEHVNNSYECDIPIGAGICASYQTQTNSPRRARSVASQSIIAYTMSLGAENSVAYSNNSIAICTNFTISVTTEILPVSMTKTSVDCTMYICGDSTECSNLLLQYGSFCTQLNRALTGIAVEQDKNTQEVFAQVKQIYKTPPIKDFGGFNFSQILPDPSKPSKRSFIEDLLFNKVTLADAGFIKQYGDCLGDIAARDLICAQKFNGLTVLPPLLTDEMIAQYTSALLAGTITSGWTFGAGAALQIPFAMQMAYRFNGIGVTQNVLYENQKLIANQFNSAIGKIQDSLSSTASALGKLQDVVNQNAQALNTLVKQLSSNFGAISSVLNDILSRLDKVEAEVQIDRLITGRLQSLQTYVTQQLIRAAEIRASANLAATKMSECVLGQSKRVDFCGKGYHLMSFPQSAPHGVVFLHVTYVCAQEKNFTTAPAICHDGKAHFPREGVFVSNGTHWFVTQRNFYEPQIITTDNTFVSGNCDVVIGIVNNTVYDPLQPELDSFKEELDKYFKNHTSPDVDLGDISGINASVVNIQKEIDRLNEVAKNLNESLIDLQELGKYEQYIKGGSGYIPEAPRDGQAYVRKDGEWVLLSTFL

SEQ ID NO: 6111 - protein, 1241 aa, Artificial Sequence
  SARS-CoV-2/Germany/BavPat1/2020__EPI_ISL_406862 spike protein (1-1211)(P715C_P1069C) Foldon construct
MFVFLVLLPLVSSQCVNLTTRTQLPPAYTNSFTRGVYYPDKVFRSSVLHSTQDLFLPFFSNVTWFHAIHVSGTNGTKRFDNPVLPFNDGVYFASTEKSNIIRGWIFGTTLDSKTQSLLIVNNATNVVIKVCEFQFCNDPFLGVYYHKNNKSWMESEFRVYSSANNCTFEYVSQPFLMDLEGKQGNFKNLREFVFKNIDGYFKIYSKHTPINLVRDLPQGFSALEPLVDLPIGINITRFQTLLALHRSYLTPGDSSSGWTAGAAAYYVGYLQPRTFLLKYNENGTITDAVDCALDPLSETKCTLKSFTVEKGIYQTSNFRVQPTESIVRFPNITNLCPFGEVFNATRFASVYAWNRKRISNCVADYSVLYNSASFSTFKCYGVSPTKLNDLCFTNVYADSFVIRGDEVRQIAPGQTGKIADYNYKLPDDFTGCVIAWNSNNLDSKVGGNYNYLYRLFRKSNLKPFERDISTEIYQAGSTPCNGVEGFNCYFPLQSYGFQPTNGVGYQPYRVVVLSFELLHAPATVCGPKKSTNLVKNKCVNFNFNGLTGTGVLTESNKKFLPFQQFGRDIADTTDAVRDPQTLEILDITPCSFGGVSVITPGTNTSNQVAVLYQGVNCTEVPVAIHADQLTPTWRVYSTGSNVFQTRAGCLIGAEHVNNSYECDIPIGAGICASYQTQTNSPRRARSVASQSIIAYTMSLGAENSVAYSNNSIAICTNFTISVTTEILPVSMTKTSVDCTMYICGDSTECSNLLLQYGSFCTQLNRALTGIAVEQDKNTQEVFAQVKQIYKTPPIKDFGGFNFSQILPDPSKPSKRSFIEDLLFNKVTLADAGFIKQYGDCLGDIAARDLICAQKFNGLTVLPPLLTDEMIAQYTSALLAGTITSGWTFGAGAALQIPFAMQMAYRFNGIGVTQNVLYENQKLIANQFNSAIGKIQDSLSSTASALGKLQDVVNQNAQALNTLVKQLSSNFGAISSVLNDILSRLDKVEAEVQIDRLITGRLQSLQTYVTQQLIRAAEIRASANLAATKMSECVLGQSKRVDFCGKGYHLMSFPQSAPHGVVFLHVTYVCAQEKNFTTAPAICHDGKAHFPREGVFVSNGTHWFVTQRNFYEPQIITTDNTFVSGNCDVVIGIVNNTVYDPLQPELDSFKEELDKYFKNHTSPDVDLGDISGINASVVNIQKEIDRLNEVAKNLNESLIDLQELGKYEQYIKGGSGYIPEAPRDGQAYVRKDGEWVLLSTFL

SEQ ID NO: 6112 - protein, 1241 aa, Artificial Sequence
  SARS-CoV-2/Wuhan/HBCDC-HB-02/2020__EPI_ISL_412978 spike protein (1-1211)(P715C_P1069C) Foldon construct
MFVFLVLLPLVSSQCVNLTTRTQLPPAYTNSFTRGVYYPDKVFRSSVLHSTQDLFLPFFSNVTWFHAIHVSGTNGTKRFDNPVLPFNDGVYFASTEKSNIIRGWIFGTTLDSKTQSLLIVNNATNVVIKVCEFQFCNDPFLGVYYHKNNKSWMESEFRVYSSANNCTFEYVSQPFLMDLEGKQGNFKNLREFVFKNIDGYFKIYSKHTPINLVRDLPQGFSALEPLVDLPIGINITRFQTLLALHRSYLTPGDSSSGWTAGAAAYYVGYLQPRTFLLKYNENGTITDAVDCALDPLSETKCTLKSFTVEKGIYQTSNFRVQPTESIVRFPNITNLCPFGEVFNATRFASVYAWNRKRISNCVADYSVLYNSASFSTFKCYGVSPTKLNDLCFTNVYADSFVIRGDEVRQIAPGQTGKIADYNYKLPDDFTGCVIAWNSNNLDSKVGGNYNYLYRLFRKSNLKPFERDISTEIYQAGSTPCNGVEGFNCYFPLQSYGFQPTNGVGYQPYRVVVLSFELLHAPATVCGPKKSTNLVKNKCVNFNFNGLTGTGVLTESNKKFLPFQQFGRDIADTTDAVRDPQTLEILDITPCSFGGVSVITPGTNTSNQVAVLYQDVNCTEVPVAIHADQLTPTWRVYSTGSNVFQTRAGCLIGAEHVNNSYECDIPIGAGICASYQTQTNSPRRARSVASQSIIAYTMSLGAENSVAYSNNSIAICTNFTISVTTEILPVSMTKTSVDCTMYICGDSTECSNFLLQYGSFCTQLNRALTGIAVEQDKNTQEVFAQVKQIYKTPPIKDFGGFNFSQILPDPSKPSKRSFIEDLLFNKVTLADAGFIKQYGDCLGDIAARDLICAQKFNGLTVLPPLLTDEMIAQYTSALLAGTITSGWTFGAGAALQIPFAMQMAYRFNGIGVTQNVLYENQKLIANQFNSAIGKIQDSLSSTASALGKLQDVVNQNAQALNTLVKQLSSNFGAISSVLNDILSRLDKVEAEVQIDRLITGRLQSLQTYVTQQLIRAAEIRASANLAATKMSECVLGQSKRVDFCGKGYHLMSFPQSAPHGVVFLHVTYVCAQEKNFTTAPAICHDGKAHFPREGVFVSNGTHWFVTQRNFYEPQIITTDNTFVSGNCDVVIGIVNNTVYDPLQPELDSFKEELDKYFKNHTSPDVDLGDISGINASVVNIQKEIDRLNEVAKNLNESLIDLQELGKYEQYIKGGSGYIPEAPRDGQAYVRKDGEWVLLSTFL

SEQ ID NO: 6113 - protein, 1241 aa, Artificial Sequence
  SARS-CoV-2/Australia/QLD02/2020__EPI_ISL_407896 spike protein (1-1211)(P715C_P1069C) Foldon construct
MFVFLVLLPLVSSQCVNLTTRTQLPPAYTNSFTRGVYYPDKVFRSSVLHSTQDLFLPFFSNVTWFHAIHVSGTNGTKRFDNPVLPFNDGVYFASTEKSNIIRGWIFGTTLDSKTQSLLIVNNATNVVIKVCEFQFCNDPFLGVYYHKNNKSWMESEFRVYSSANNCTFEYVSQPFLMDLEGKQGNFKNLREFVFKNIDGYFKIYSKHTPINLVRDLPQGFSALEPLVDLPIGINITRFQTLLALHRSYLTPGDSSSGWTAGAAAYYVGYLQPRTFLLKYNENGTITDAVDCALDPLSETKCTLKSFTVEKGIYQTSNFRVQPTESIVRFPNITNLCPFGEVFNATRFASVYAWNRKRISNCVADYSVLYNSASFSTFKCYGVSPTKLNDLCFTNVYADSFVIRGDEVRQIAPGQTGKIADYNYKLPDDFTGCVIAWNSNNLDSKVGGNYNYLYRLFRKSNLKPFERDISTEIYQAGSTPCNGVEGFNCYFPLQSYGFQPTNGVGYQPYRVVVLSFELLHAPATVCGPKKSTNLVKNKCVNFNFNGLTGTGVLTESNKKFLPFQQFGRDIADTTDAVRDPQTLEILDITPCSFGGVSVITPGTNTSNQVAVLYQDVNCTEVPVAIHADQLTPTWRVYSTGSNVFQTRAGCLIGAEHVNNSYECDIPIGAGICASYQTQTNSPRRARSVASQSIIAYTMSLGAENSVAYSNNSIAICTNFTISVTTEILPVSMTKTSVDCTMYICGDSTECSNLLLQYGSFCTQLNRALTGIAVEQDKNTQEVFAQVKQIYKTPPIKDFGGFNFSQILPDPSKPSKRSFIEDLLFNKVTLADAGFIKQYGDCLGDIAARDLICAQKFNGLTVLPPLLTDEMIAQYTSALLAGTITSGWTFGAGAALQIPFAMQMAYRFNGIGVTQNVLYENQKLIANQFNSAIGKIQDSLSSTASALGKLQDVVNQNAQALNTLVKQLSSNFGAISSVLNDILSRLDKVEAEVQIDRLITGRLQSLQTYVTQQLIRAAEIRASANLAATKMSECVLGQSKRVDFCGKGYHLMSFPQSAPHGVVFLHVTYVCAQEKNFTTAPAICHDGKAHFPREGVFVSNGTHWFVTQRNFYEPQIITTDNTFVSGNCDVVIGIVNNTVYDPLQLELDSFKEELDKYFKNHTSPDVDLGDISGINASVVNIQKEIDRLNEVAKNLNESLIDLQELGKYEQYIKGGSGYIPEAPRDGQAYVRKDGEWVLLSTFL

SEQ ID NO: 6114 - protein, 1241 aa, Artificial Sequence
  SARS-CoV-2/India/1-31/2020__EPI_ISL_413523 spike protein (1-1211)(P715C_P1069C) Foldon construct
MFVFLVLLPLVSSQCVNLTTRTQLPPAYTNSFTRGVYYPDKVFRSSVLHSTQDLFLPFFSNVTWFHAIHVSGTNGTKRFDNPVLPFNDGVYFASTEKSNIIRGWIFGTTLDSKTQSLLIVNNATNVVIKVCEFQFCNDPFLGVYYHKNNKSWMESEFRVYSSANNCTFEYVSQPFLMDLEGKQGNFKNLREFVFKNIDGYFKIYSKHTPINLVRDLPQGFSALEPLVDLPIGINITRFQTLLALHRSYLTPGDSSSGWTAGAAAYYVGYLQPRTFLLKYNENGTITDAVDCALDPLSETKCTLKSFTVEKGIYQTSNFRVQPTESIVRFPNITNLCPFGEVFNATRFASVYAWNRKRISNCVADYSVLYNSASFSTFKCYGVSPTKLNDLCFTNVYADSFVIRGDEVRQIAPGQTGKIADYNYKLPDDFTGCVIAWNSNNLDSKVGGNYNYLYRLFRKSNLKPFERDISTEIYQAGSTPCNGVEGFNCYFPLQSYGFQPTNGVGYQPYRVVVLSFELLHAPATVCGPKKSTNLVKNKCVNFNFNGLTGTGVLTESNKKFLPFQQFGRDIADTTDAVRDPQTLEILDITPCSFGGVSVITPGTNTSNQVAVLYQDVNCTEVPVAIHADQLTPTWRVYSTGSNVFQTRAGCLIGAEHVNNSYECDIPIGAGICASYQTQTNSPRRARSVASQSIIAYTMSLGAENSVAYSNNSIAICTNFTISVTTEILPVSMTKTSVDCTMYICGDSTECSNLLLQYGSFCTQLNRALTGIAVEQDKNTQEVFAQVKQIYKTPPIKDFGGFNFSQILPDPSKPSKRSFIEDLLFNKVTLADAGFIKQYGDCLGDIAARDLICAQKFNGLTVLPPLLTDEMIAQYTSALLAGTITSGWTFGAGAALQIPFAMQMAYRFNGIGVTQNVLYENQKLIANQFNSVIGKIQDSLSSTASALGKLQDVVNQNAQALNTLVKQLSSNFGAISSVLNDILSRLDKVEAEVQIDRLITGRLQSLQTYVTQQLIRAAEIRASANLAATKMSECVLGQSKRVDFCGKGYHLMSFPQSAPHGVVFLHVTYVCAQEKNFTTAPAICHDGKAHFPREGVFVSNGTHWFVTQRNFYEPQIITTDNTFVSGNCDVVIGIVNNTVYDPLQPELDSFKEELDKYFKNHTSPDVDLGDISGINASVVNIQKEIDRLNEVAKNLNESLIDLQELGKYEQYIKGGSGYIPEAPRDGQAYVRKDGEWVLLSTFL

SEQ ID NO: 6115 - protein, 1241 aa, Artificial Sequence
  SARS-CoV-2/Guangdong/GD2020087-P0008/2020__EPI_ISL_413863 spike protein (1-1211)(P715C_P1069C) Foldon construct
MFVFLVLLPLVSSQCVNLTTRTQLPPAYTNSFTRGVYYPDKVFRSSVLHSTQDLFLPFFSNVTWFHAIHVSGTNGTKRFDNPVLPFNDGVYFASTEKSNIIRGWIFGTTLDSKTQSLLIVNNATNVVIKVCEFQFCNDPFLGVYYHKNNKSWMESEFRVYSSANNCTFEYVSQPFLMDLEGKQGNFKNLREFVFKNIDGYFKIYSKHTPINLVRDLPQGFSALEPLVDLPIGINITRFQTLLALHRSYLTPGDSSSGWTAGAAAYYVGYLQPRTFLLKYNENGTITDAVDCALDPLSETKCTLKSFTVEKGIYQTSNFRVQPTESIVRFPNITNLCPFGEVFNATRFASVYAWNRKRISNCVADYSVLYNSASFSTFKCYGVSPTKLNDLCFTNVYADSFVIRGDEVREIAPGQTGKIADYNYKLPDDFTGCVIAWNSNNLDSKVGGNYNYLYRLFRKSNLKPFERDISTEIYQAGSTPCNGVEGFNCYFPLQSYGFQPTNGVGYQPYRVVVLSFELLHAPATVCGPKKSTNLVKNKCVNFNFNGLTGTGVLTESNKKFLPFQQFGRDIADTTDAVRDPQTLEILDITPCSFGGVSVITPGTNTSNQVAVLYQDVNCTEVPVAIHADQLTPTWRVYSTGSNVFQTRAGCLIGAEHVNNSYECDIPIGAGICASYQTQTNSPRRARSVASQSIIAYTMSLGAENSVAYSNNSIAICTNFTISVTTEILPVSMTKTSVDCTMYICGDSTECSNLLLQYGSFCTQLNRALTGIAVEQDKNTQEVFAQVKQIYKTPPIKDFGGFNFSQILPDPSKPSKRSFIEDLLFNKVTLADAGFIKQYGDCLGDIAARDLICAQKFNGLTVLPPLLTDEMIAQYTSALLAGTITSGWTFGAGAALQIPFAMQMAYRFNGIGVTQNVLYENQKLIANQFNSAIGKIQDSLSSTASALGKLQDVVNQNAQALNTLVKQLSSNFGAISSVLNDILSRLDKVEAEVQIDRLITGRLQSLQTYVTQQLIRAAEIRASANLAATKMSECVLGQSKRVDFCGKGYHLMSFPQSAPHGVVFLHVTYVCAQEKNFTTAPAICHDGKAHFPREGVFVSNGTHWFVTQRNFYEPQIITTDNTFVSGNCDVVIGIVNNTVYDPLQPELDSFKEELDKYFKNHTSPDVDLGDISGINASVVNIQKEIDRLNEVAKNLNESLIDLQELGKYEQYIKGGSGYIPEAPRDGQAYVRKDGEWVLLSTFL

SEQ ID NO: 6116 - protein, 1241 aa, Artificial Sequence
  SARS-CoV-2/Sweden/01/2020__EPI_ISL_411951 spike protein (1-1211)(P715C_P1069C) Foldon construct
MFVFLVLLPLVSSQCVNLTTRTQLPPAYTNSFTRGVYYPDKVFRSSVLHSTQDLFLPFFSNVTWFHAIHVSGTNGTKRFDNPVLPFNDGVYFASTEKSNIIRGWIFGTTLDSKTQSLLIVNNATNVVIKVCEFQFCNDPFLGVYYHKNNKSWMESEFRVYSSANNCTFEYVSQPFLMDLEGKQGNFKNLREFVFKNIDGYFKIYSKHTPINLVRDLPQGFSALEPLVDLPIGINITRFQTLLALHRSYLTPGDSSSGWTAGAAAYYVGYLQPRTFLLKYNENGTITDAVDCALDPLSETKCTLKSFTVEKGIYQTSNFRVQPTESIVRFPNITNLCPFGEVFNATRFASVYAWNRKRISNCVADYSVLYNSASFSTFKCYGVSPTKLNDLCFTNVYADSFVIRGDEVRQIAPGQTGKIADYNYKLPDDFTGCVIAWNSNNLDSKVGGNYNYLYRLFRKSNLKPFERDISTEIYQAGSTPCNGVEGFNCYFPLQSYGFQPTNGVGYQPYRVVVLSFELLHAPATVCGPKKSTNLVKNKCVNFNFNGLTGTGVLTESNKKFLPFQQFGRDIADTTDAVRDPQTLEILDITPCSFGGVSVITPGTNTSNQVAVLYQDVNCTEVPVAIHADQLTPTWRVYSTGSNVFQTRAGCLIGAEHVNNSYECDIPIGAGICASYQTQTNSPRRARSVASQSIIAYTMSLGAENSVAYSNNSIAICTNFTISVTTEILPVSMTKTSVDCTMYICGDSTECSNLLLQYGSFCTQLNRALTGIAVEQDKNTQEVFAQVKQIYKTPPIKDCGGFNFSQILPDPSKPSKRSFIEDLLFNKVTLADAGFIKQYGDCLGDIAARDLICAQKFNGLTVLPPLLTDEMIAQYTSALLAGTITSGWTFGAGAALQIPFAMQMAYRFNGIGVTQNVLYENQKLIANQFNSAIGKIQDSLSSTASALGKLQDVVNQNAQALNTLVKQLSSNFGAISSVLNDILSRLDKVEAEVQIDRLITGRLQSLQTYVTQQLIRAAEIRASANLAATKMSECVLGQSKRVDFCGKGYHLMSFPQSAPHGVVFLHVTYVCAQEKNFTTAPAICHDGKAHFPREGVFVSNGTHWFVTQRNFYEPQIITTDNTFVSGNCDVVIGIVNNTVYDPLQPELDSFKEELDKYFKNHTSPDVDLGDISGINASVVNIQKEIDRLNEVAKNLNESLIDLQELGKYEQYIKGGSGYIPEAPRDGQAYVRKDGEWVLLSTFL

SEQ ID NO: 6117 - protein, 1241 aa, Artificial Sequence
  SARS-CoV-2/Tianmen/HBCDC-HB-07/2020__EPI_ISL_412983 spike protein (1-1211)(P715C_P1069C) Foldon construct
MFVFLVLLPLVSSQCVNLTTRTQLPPAYTNSFTRGVYYPDKVFRSSVLHSTQDLFLPFFSNVTWFHAIHVSGTNGTKRFDNPVLPFNDGVYFASTEKSNIIRGWIFGTTLDSKTQSLLIVNNATNVVIKVCEFQFCNDPFLGVYYHKNNKSWMESEFRVYSSANNCTFEYVSQPFLMDLEGKQGNFKNLREFVFKNIDGYFKIYSKHTPINLVRDLPQGFSALEPLVDLPIGINITRFQTLLALHRSYLTPGDSSSGWTAGAAAYYVGYLQPRTFLLKYNENGTITDAVDCALDPLSETKCTLKSFTVEKGIYQTSNFRVQPTESIVRFPNITNLCPFGEVFNATRFASVYAWNRKRISNCVADYSVLYNSASFSTFKCYGVSPTKLNDLCFTNVYADSFVIRGDEVRQIAPGQTGKIADYNYKLPDDFTGCVIAWNSNNLDSKVGGNYNYLYRLFRKSNLKPFERDISTEIYQAGSTPCNGVEGFNCYFPLQSYGFQPTNGVGYQPYRVVVLSFELLHAPATVCGPKKSTNLVKNKCVNFNFNGLTGTGVLTESNKKFLPFQQFGRDIADTTDAVRDPQTLEILDITPCSFGGVSVITPGTNTSNQVAVLYQDLNCTEVPVAIHADQLTPTWRVYSTGSNVFQTRAGCLIGAEHVNNSYECDIPIGAGICASYQTQTNSPRRARSVASQSIIAYTMSLGAENSVAYSNNSIAICTNFTISVTTEILPVSMTKTSVDCTMYICGDSTECSNLLLQYGSFCTQLNRALTGIAVEQDKNTQEVFAQVKQIYKTPPIKDFGGFNFSQILPDPSKPSKRSFIEDLLFNKVTLADAGFIKQYGDCLGDIAARDLICAQKFNGLTVLPPLLTDEMIAQYTSALLAGTITSGWTFGAGAALQIPFAMQMAYRFNGIGVTQNVLYENQKLIANQFNSAIGKIQDSLSSTASALGKLQDVVNQNAQALNTLVKQLSSNFGAISSVLNDILSRLDKVEAEVQIDRLITGRLQSLQTYVTQQLIRAAEIRASANLAATKMSECVLGQSKRVDFCGKGYHLMSFPQSAPHGVVFLHVTYVCAQEKNFTTAPAICHDGKAHFPREGVFVSNGTHWFVTQRNFYEPQIITTDNTFVSGNCDVVIGIVNNTVYDPLQPELDSFKEELDKYFKNHTSPDVDLGDISGINASVVNIQKEIDRLNEVAKNLNESLIDLQELGKYEQYIKGGSGYIPEAPRDGQAYVRKDGEWVLLSTFL

SEQ ID NO: 6118 - protein, 1241 aa, Artificial Sequence
  SARS-CoV-2/Hong Kong/case42_VM20002493/2020__EPI_ISL_414527 spike protein (1-1211)(P715C_P1069C) Foldon construct
MFVFLVLLPLVSSQCVNLTTRTQLPPAYTNSFTRGVYYPDKVFRSSVLHSTQDLFLPFFSNVTWFHAIHVSGTNGTKRFDNPVLPFNDGVYFASTEKSNIIRGWIFGTTLDSKTQSLLIVNNATNVVIKVCEFQFCNDPFLGVYYHKNNKSWMESEFRVYSSANNCTFEYVSQPFLMDLEGKQGNFKNLREFVFKNIDGYFKIYSKHTPINLVRDLPQGFSALEPLVDLPIGINITRFQTLLALHRSYLTPGDSSSGWTAGAAAYYVGYLQPRTFLLKYNENGTITDAVDCALDPLSETKCTLKSFTVEKGIYQTSNFRVQPTESIVRFPNITNLCPFGEVFNATRFASVYAWNRKRISNCVADYSVLYNSASFSTFKCYGVSPTKLNDLCFTNVYADSFVIRGDEVRQIAPGQTGKIADYNYKLPDDFTGCVIAWNSNNLDSKVGGNYNYLYRLFRKSNLKPFERDISTEIYQAGSTPCNGVEGFNCYFPLQSYGFQPTNGVGYQPYRVVVLSFELLHAPATVCGPKKSTNLVKNKCVNFNFNGLTGTGVLTESNKKFLPFQQFGRDIADTTDAVRDPQTLEILDITPCSFGGVSVITPGTNTSNQVAVLYQDVNCTEVPVAIHADQLTPTWRVYSTGSNVFQTRAGCLIGAEHVNNSYECDIPIGAGICASYQTQTNSPRRARSVASQSIIAYTMSLGAENSVAYSNNSIAICTNFAISVTTEILPVSMTKTSVDCTMYICGDSTECSNLLLQYGSFCTQLNRALTGIAVEQDKNTQEVFAQVKQIYKTPPIKDFGGFNFSQILPDPSKPSKRSFIEDLLFNKVTLADAGFIKQYGDCLGDIAARDLICAQKFNGLTVLPPLLTDEMIAQYTSALLAGTITSGWTFGAGAALQIPFAMQMAYRFNGIGVTQNVLYENQKLIANQFNSAIGKIQDSLSSTASALGKLQDVVNQNAQALNTLVKQLSSNFGAISSVLNDILSRLDKVEAEVQIDRLITGRLQSLQTYVTQQLIRAAEIRASANLAATKMSECVLGQSKRVDFCGKGYHLMSFPQSAPHGVVFLHVTYVCAQEKNFTTAPAICHDGKAHFPREGVFVSNGTHWFVTQRNFYEPQIITTDNTFVSGNCDVVIGIVNNTVYDPLQPELDSFKEELDKYFKNHTSPDVDLGDISGINASVVNIQKEIDRLNEVAKNLNESLIDLQELGKYEQYIKGGSGYIPEAPRDGQAYVRKDGEWVLLSTFL

SEQ ID NO: 6119 - protein, 1241 aa, Artificial Sequence
  SARS-CoV-2/USA/CruiseA-23/2020__EPI_ISL_414482 spike protein (1-1211)(P715C_P1069C) Foldon construct
MFVFLVLLPLVSSQCVNLTTRTQLPPAYTNSFTRGVYYPDKVFRSSVLHSTQDLFLPFFSNVTWFHAIHVSGTNGTKRFDNPVLPFNDGVYFASTEKSNIIRGWIFGTTLDSKTQSLLIVNNATNVVIKVCEFQFCNDPFLGVYYHKNNKSWMESEFRVYSSANNCTFEYVSQPFLMDLEVKQGNFKNLREFVFKNIDGYFKIYSKHTPINLVRDLPQGFSALEPLVDLPIGINITRFQTLLALHRSYLTPGDSSSGWTAGAAAYYVGYLQPRTFLLKYNENGTITDAVDCALDPLSETKCTLKSFTVEKGIYQTSNFRVQPTESIVRFPNITNLCPFGEVFNATRFASVYAWNRKRISNCVADYSVLYNSASFSTFKCYGVSPTKLNDLCFTNVYADSFVIRGDEVRQIAPGQTGKIADYNYKLPDDFTGCVIAWNSNNLDSKVGGNYNYLYRLFRKSNLKPFERDISTEIYQAGSTPCNGVEGFNCYFPLQSYGFQPTNGVGYQPYRVVVLSFELLHAPATVCGPKKSTNLVKNKCVNFNFNGLTGTGVLTESNKKFLPFQQFGRDIADTTDAVRDPQTLEILDITPCSFGGVSVITPGTNTSNQVAVLYQDVNCTEVPVAIHADQLTPTWRVYSTGSNVFQTRAGCLIGAEHVNNSYECDIPIGAGICASYQTQTNSPRRARSVASQSIIAYTMSLGAENSVAYSNNSIAICTNFTISVTTEILPVSMTKTSVDCTMYICGDSTECSNLLLQYGSFCTQLNRALTGIAVEQDKNTQEVFAQVKQIYKTPPIKDFGGFNFSQILPDPSKPSKRSFIEDLLFNKVTLADAGFIKQYGDCLGDIAARDLICAQKFNGLTVLPPLLTDEMIAQYTSALLAGTITSGWTFGAGAALQIPFAMQMAYRFNGIGVTQNVLYENQKLIANQFNSAIGKIQDSLSSTASALGKLQDVVNQNAQALNTLVKQLSSNFGAISSVLNDILSRLDKVEAEVQIDRLITGRLQSLQTYVTQQLIRAAEIRASANLAATKMSECVLGQSKRVDFCGKGYHLMSFPQSAPHGVVFLHVTYVCAQEKNFTTAPAICHDGKAHFPREGVFVSNGTHWFVTQRNFYEPQIITTDNTFVSGNCDVVIGIVNNTVYDPLQPELDSFKEELDKYFKNHTSPDVDLGDISGINASVVNIQKEIDRLNEVAKNLNESLIDLQELGKYEQYIKGGSGYIPEAPRDGQAYVRKDGEWVLLSTFL

SEQ ID NO: 6120 - protein, 1241 aa, Artificial Sequence
  SARS-CoV-2/Hong Kong/case85_VM20002868/2020__EPI_ISL_414519 spike protein (1-1211)(P715C_P1069C) Foldon construct
MFVFLVLVPLVSSQCVNLTTRTQLPPAYTNSFTRGVYYPDKVFRSSVLHSTQDLFLPFFSNVTWFHAIHVSGTNGTKRFDNPVLPFNDGVYFASTEKSNIIRGWIFGTTLDSKTQSLLIVNNATNVVIKVCEFQFCNDPFLGVYYHKNNKSWMESEFRVYSSANNCTFEYVSQPFLMDLEGKQGNFKNLREFVFKNIDGYFKIYSKHTPINLVRDLPQGFSALEPLVDLPIGINITRFQTLLALHRSYLTPGDSSSGWTAGAAAYYVGYLQPRTFLLKYNENGTITDAVDCALDPLSETKCTLKSFTVEKGIYQTSNFRVQPTESIVRFPNITNLCPFGEVFNATRFASVYAWNRKRISNCVADYSVLYNSASFSTFKCYGVSPTKLNDLCFTNVYADSFVIRGDEVRQIAPGQTGKIADYNYKLPDDFTGCVIAWNSNNLDSKVGGNYNYLYRLFRKSNLKPFERDISTEIYQAGSTPCNGVEGFNCYFPLQSYGFQPTNGVGYQPYRVVVLSFELLHAPATVCGPKKSTNLVKNKCVNFNFNGLTGTGVLTESNKKFLPFQQFGRDIADTTDAVRDPQTLEILDITPCSFGGVSVITPGTNTSNQVAVLYQDVNCTEVPVAIHADQLTPTWRVYSTGSNVFQTRAGCLIGAEHVNNSYECDIPIGAGICASYQTQTNSPRRARSVASQSIIAYTMSLGAENSVAYSNNSIAICTNFTISVTTEILPVSMTKTSVDCTMYICGDSTECSNLLLQYGSFCTQLNRALTGIAVEQDKNTQEVFAQVKQIYKTPPIKDFGGFNFSQILPDPSKPSKRSFIEDLLFNKVTLADAGFIKQYGDCLGDIAARDLICAQKFNGLTVLPPLLTDEMIAQYTSALLAGTITSGWTFGAGAALQIPFAMQMAYRFNGIGVTQNVLYENQKLIANQFNSAIGKIQDSLSSTASALGKLQDVVNQNAQALNTLVKQLSSNFGAISSVLNDILSRLDKVEAEVQIDRLITGRLQSLQTYVTQQLIRAAEIRASANLAATKMSECVLGQSKRVDFCGKGYHLMSFPQSAPHGVVFLHVTYVCAQEKNFTTAPAICHDGKAHFPREGVFVSNGTHWFVTQRNFYEPQIITTDNTFVSGNCDVVIGIVNNTVYDPLQPELDSFKEELDKYFKNHTSPDVDLGDISGINASVVNIQKEIDRLNEVAKNLNESLIDLQELGKYEQYIKGGSGYIPEAPRDGQAYVRKDGEWVLLSTFL

SEQ ID NO: 6121 - protein, 1241 aa, Artificial Sequence; identical to SEQ ID NO: 6111
  SARS-CoV-2/England/200990660/2020__EPI_ISL_414523 spike protein (1-1211)(P715C_P1069C) Foldon construct

SEQ ID NO: 6122 - protein, 1241 aa, Artificial Sequence
  SARS-CoV-2/Australia/NSW09/2020__EPI_ISL_413595 spike protein (1-1211)(P715C_P1069C) Foldon construct
MFVFLVLLPLVSSQCVNLTTRTQLPPAYTNSFTRGVYYPDKVFRSSVLHSTQDLFLPFFSNVTWFHAIHVSGTNGTKRFDNPVLPFNDGVYFASTEKSNIIRGWIFGTTLDSKTQSLLIVNNATNVVIKVCEFQFCNDPFLGVYYHKNNKSWMESEFRVYSSANNCTFEYVSQPFLMDLEGKQGNFKNLREFVFKNIDGYFKIYSKHTPINLVRDLPQGFSALEPLVDLPIGINITRFQTLLALHRSYLTPGDSSSGWTAGAAAYYVGYLQPRTFLLKYNENGTITDAVDCALDPLSETKCTLKSFTVEKGIYQTSNFRVQPTESIVRFPNITNLCPFGEVFNATRFASVYAWNRKRISNCVADYSVLYNSASFSTFKCYGVSPTKLNDLCFTNVYADSFVIRGDEVRQIAPGQTGKIADYNYKLPDDFTGCVIAWNSNNLDSKVGGNYNYLYRLFRKSNLKPFERDISTEIYQAGSTPCNGVEGFNCYFPLQSYGFQPTNGVGYQPYRVVVLSFELLHAPATVCGPKKSTNLVKNKCVNFNFNGLTGTGVLTESNKKFLPFQQFGRDIADTTDAVRDPQTLEILDITPCSFGGVSVITPGTNTSNQVAVLYQDVNCTEVPVAIHADQLTPTWRVYSTGSNVFQTRAGCLIGAEHVNNSYECDIPIGAGICASYQTQTNSPRRARSVASQSIIAYTMSLGAENSVAYSNNSIAICTNFTISVTTEILPVSMTKTSVDCTMYICGDSTECSNLLLQYGSFCTQLNRALTGIAVEQDKNTQEVFAQVKQIYKTPPIKDFGGFNFSQILPDPSKPSKRSFIEDLLFNKVTLADAGFIKQYGDCLGDIAARDLICAQKFNGLTVLPPLLTDEMIAQYTSALLAGTITSGWTFGAGAALQIPFAMQMAYRFNGIGVTQNVLYENQKLIANQFNSAIGKIQDSLSFTASALGKLQDVVNQNAQALNTLVKQLSSNFGAISSVLNDILSRLDKVEAEVQIDRLITGRLQSLQTYVTQQLIRAAEIRASANLAATKMSECVLGQSKRVDFCGKGYHLMSFPQSAPHGVVFLHVTYVCAQEKNFTTAPAICHDGKAHFPREGVFVSNGTHWFVTQRNFYEPQIITTDNTFVSGNCDVVIGIVNNTVYDPLQPELDSFKEELDKYFKNHTSPDVDLGDISGINASVVNIQKEIDRLNEVAKNLNESLIDLQELGKYEQYIKGGSGYIPEAPRDGQAYVRKDGEWVLLSTFL

SEQ ID NO: 6123 - protein, 1241 aa, Artificial Sequence; identical to SEQ ID NO: 6103
  SARS-CoV-2/Australia/NSW10/2020__EPI_ISL_413596 spike protein (1-1211)(P715C_P1069C) Foldon construct

SEQ ID NO: 6124 - protein, 1241 aa, Artificial Sequence
  SARS-CoV-2/Switzerland/1000477797/2020__EPI_ISL_413023 spike protein (1-1211)(P715C_P1069C) Foldon construct
MFVFLVLLPLVSSQCVNLTTRTQLPPAYTNSFTRGVYYPDKVFRSSVLHSTQDLFLPFFSNVTWFHAIHVSGTNGTKRFDNPVLPFNDGVYFASTEKSNIIRGWIFGTTLDSKTQSLLIVNNATNVVIKVCEFQFCNDPFLGVYYHKNNKSWMESEFRVYSSANNCTFEYVSQPFLMDLEGKQGNFKNLREFVFKNIDGYFNIYSKHTPINLVRDLPQGFSALEPLVDLPIGINITRFQTLLALHRSYLTPGDSSSGWTAGAAAYYVGYLQPRTFLLKYNENGTITDAVDCALDPLSETKCTLKSFTVEKGIYQTSNFRVQPTESIVRFPNITNLCPFGEVFNATRFASVYAWNRKRISNCVADYSVLYNSASFSTFKCYGVSPTKLNDLCFTNVYADSFVIRGDEVRQIAPGQTGKIADYNYKLPDDFTGCVIAWNSNNLDSKVGGNYNYLYRLFRKSNLKPFERDISTEIYQAGSTPCNGVEGFNCYFPLQSYGFQPTNGVGYQPYRVVVLSFELLHAPATVCGPKKSTNLVKNKCVNFNFNGLTGTGVLTESNKKFLPFQQFGRDIADTTDAVRDPQTLEILDITPCSFGGVSVITPGTNTSNQVAVLYQGVNCTEVPVAIHADQLTPTWRVYSTGSNVFQTRAGCLIGAEHVNNSYECDIPIGAGICASYQTQTNSPRRARSVASQSIIAYTMSLGAENSVAYSNNSIAICTNFTISVTTEILPVSMTKTSVDCTMYICGDSTECSNLLLQYGSFCTQLNRALTGIAVEQDKNTQEVFAQVKQIYKTPPIKDFGGFNFSQILPDPSKPSKRSFIEDLLFNKVTLADAGFIKQYGDCLGDIAARDLICAQKFNGLTVLPPLLTDEMIAQYTSALLAGTITSGWTFGAGAALQIPFAMQMAYRFNGIGVTQNVLYENQKLIANQFNSAIGKIQDSLSSTASALGKLQDVVNQNAQALNTLVKQLSSNFGAISSVLNDILSRLDKVEAEVQIDRLITGRLQSLQTYVTQQLIRAAEIRASANLAATKMSECVLGQSKRVDFCGKGYHLMSFPQSAPHGVVFLHVTYVCAQEKNFTTAPAICHDGKAHFPREGVFVSNGTHWFVTQRNFYEPQIITTDNTFVSGNCDVVIGIVNNTVYDPLQPELDSFKEELDKYFKNHTSPDVDLGDISGINASVVNIQKEIDRLNEVAKNLNESLIDLQELGKYEQYIKGGSGYIPEAPRDGQAYVRKDGEWVLLSTFL

SEQ ID NO: 6125 - protein, 1241 aa, Artificial Sequence
  SARS-CoV-2/Belgium/BA-02291/2020__EPI_ISL_415159 spike protein (1-1211)(P715C_P1069C) Foldon construct
MFVFLVLLPLVSSQCVNLTTRTQLPPAYTNSFTRGVYYPDKVFRSSVLHSTQDLFLPFFSNVTWFHAIHVSGTNGTKRFDNPVLPFNDGVYFASTEKSNIIRGWIFGTTLDSKTQSLLIVNNATNVVIKVCEFQFCNDPFLGVYYHKNNKSWMESEFRVYSSANNCTFEYVSQPFLMDLEGKQGNFKNLREFVFKNIDGYFKIYSKHTPINLVRDLPQGFSALEPLVDLPIGINITRFQTLLALHRSYLTPGDSSSGWTAGAAAYYVGYLQPRTFLLKYNENGTITDAVDCALDPLSETKCTLKSFTVEKGIYQTSNFRVQPTESIVRFPNITNLCPFGEVFNATRFASVYAWNRKRISNCVADYSVLYNSASFSTFKCYGVSPTKLNDLCFTNVYADSFVIRGDEVRQIAPGQTGKIADYNYKLPDDFTGCVIAWNSNNLDSKVGGNYNYLYRLFRRSNLKPFERDISTEIYQAGSTPCNGVEGFNCYFPLQSYGFQPTNGVGYQPYRVVVLSFELLPAPATVCGPKKSTNLVKNKCVNFNFNGLTGTGVLTESNKKFLPFQQFGRDIADTTDAVRDPQTLEILDITPCSFGGVSVITPGTNTSNQVAVLYQGVNCTEVPVAIHADQLTPTWRVYSTGSNVFQTRAGCLIGAEHVNNSYECDIPIGAGICASYQTQTNSPRRARSVASQSIIAYTMSLGAENSVAYSNNSIAICTNFTISVTTEILPVSMTKTSVDCTMYICGDSTECSNLLLQYGSFCTQLNRALTGIAVEQDKNTQEVFAQVKQIYKTPPIKDFGGFNFSQILPDPSKPSKRSFIEDLLFNKVTLADAGFIKQYGDCLGDIAARDLICAQKFNGLTVLPPLLTDEMIAQYTSALLAGTITSGWTFGAGAALQIPFAMQMAYRFNGIGVTQNVLYENQKLIANQFNSAIGKIQDSLSSAAPALGKLQDVVNQNAQALNTLVKQLSSNFGAISSVLNDILSRLDKVEAEVQIDRLITGRLQSLQTYVTQQLIRAAEIRASANLAATKMSECVLGQSKRVDFCGKGYHLMSFPQSAPHGVVFLHVTYVCAQEKNFTTAPAICHDGKAHFPREGVFVSNGTHWFVTQRNFYEPQIITTDNTFVSGNCDVVIGIVNNTVYDPLQPELDSFKEELDKYFKNHTSPDVDLGDISGINASVVNIQKEIDRLNEVAKNLNESLIDLQELGKYEQYIKGGSGYIPEAPRDGQAYVRKDGEWVLLSTFL

SEQ ID NO: 6126 - protein, 1241 aa, Artificial Sequence
  SARS-CoV-2/USA/WA8-UW5/2020__EPI_ISL_413486 spike protein (1-1211)(P715C_P1069C) Foldon construct
MFVFLVLLPLVSSQCVNLTTRTQLPPAYTNSFTRGVYYPDKVFRSSVLHSTQDLFLPFFSNVTWFHAIHVSGTNGTKRFDNPVLPFNDGVYFASTEKSNIIRGWIFGTTLDSKTQSLLIVNNATNVVIKVCEFQFCNDPFLGVYYHKNNKSWMESEFRVYSSANNCTFEYVSQPFLMDLEGKQGNFKNLREFVFKNIDGYFKIYSKHTPINLVRDLPQGFSALEPLVDLPIGINITRFQTLLALHRSYLTPGDSSSGWTAGAAAYYVGYLQPRTFLLKYNENGTITDAVDCALDPLSETKCTLKSFTVEKGIYQTSNFRVQPTESIVRFPNITNLCPFGEVFNATRFASVYAWNRKRISNCVADYSVLYNSASFSTFKCYGVSPTKLNDLCFTNVYADSFVIRGDEVRQIAPGQTGKIADYNYKLPDDFTGCVIAWNSNNLDSKVGGNYNYLYRLFRKSNLKPFERDISTEIYQAGSTPCNGVEGFNCYFPLQSYGFQPTNGVGYQPYRVVVLSFELLHAPATVCGPKKSTNLVKNKCVNFNFNGLTGTGVLTESNKKFLPFQQFGRDIADTTDAVRDPQTLEILDITPCSFGGVSVITPGTNTSNQVAVLYQDVNCTEVPVAIHADQLTPTWRVYSTGSNVFQTRAGCLIGAEYVNNSYECDIPIGAGICASYQTQTNSPRRARSVASQSIIAYTMSLGAENSVAYSNNSIAICTNFTISVTTEILPVSMTKTSVDCTMYICGDSTECSNLLLQYGSFCTQLNRALTGIAVEQDKNTQEVFAQVKQIYKTPPIKDFGGFNFSQILPDPSKPSKRSFIEDLLFNKVTLADAGFIKQYGDCLGDIAARDLICAQKFNGLTVLPPLLTDEMIAQYTSALLAGTITSGWTFGAGAALQIPFAMQMAYRFNGIGVTQNVLYENQKLIANQFNSAIGKIQDSLSSTASALGKLQDVVNQNAQALNTLVKQLSSNFGAISSVLNDILSRLDKVEAEVQIDRLITGRLQSLQTYVTQQLIRAAEIRASANLAATKMSECVLGQSKRVDFCGKGYHLMSFPQSAPHGVVFLHVTYVCAQEKNFTTAPAICHDGKAHFPREGVFVSNGTHWFVTQRNFYEPQIITTDNTFVSGNCDVVIGIVNNTVYDPLQPELDSFKEELDKYFKNHTSPDVDLGDISGINASVVNIQKEIDRLNEVAKNLNESLIDLQELGKYEQYIKGGSGYIPEAPRDGQAYVRKDGEWVLLSTFL

SEQ ID NO: 6127 - protein, 1241 aa, Artificial Sequence
  SARS-CoV-2/England/20102000506/2020__EPI_ISL_415147 spike protein (1-1211)(P715C_P1069C) Foldon construct
MFVFLVLLPLVSSQCVNLTTRTQLPPAYTNSFTRGVYYPDKVFRSSVLHSTQDLFLPFFSNVTWFHAIHVSGTNGTKRFDNPVLPFNDGVYFASTEKSNIIRGWIFGTTLDSKTQSLLIVNNATNVVIKVCEFQFCNDPFLGVYYHKNNKSWMESEFRVYSSANNCTFEYVSQPFLMDLEGKQGNFKNLREFVFKNIDGYFKIYSKHTPINLVRDLPQGFSALEPLVDLPIGINITRFQTLLALHRSYLTPGDSSSGWTAGAAAYYVGYLQPRTFLLKYNENGTITDAVDCALDPLSETKCTLKSFTVEKGIYQTSNFRVQPTESIVRFPNITNLCPFGEVFNATRFASVYAWNRKRISNCVADYSVLYNSASFSTFKCYGVSPTKLNDLCFTNVYADSFVIRGDEVRQIAPGQTGKIADYNYKLPDDFTGCVIAWNSNNLDSKVGGNYNYLYRLFRKSNLKPFERDISTEIYQAGSTPCNGVEGFNCYFPLQSYGFQPTNGVGYQPYRVVVLSFELLHAPATVCGPKKSTNLVKNKCVNFNFNGLTGTGVLTESNKKFLPFQQFGRDIADTTDAVRDPQTLEILDITPCSFGGVSVITPGTNTSNQVAVLYQGVNCTEVPVAIHADQLTPTWRVYSTGSNVFQTRAGCLIGAEHVNNSYECDIPIGAGICASYQTQTNSPRRARSVASQSIIAYTMSLGAENSVAYSNNSIAICTNFTISVTTEILPVSMTKTSVDCTMYICGDSTECSNLLLQYGSFCTQLNRALTGIAVEQDKNTQEVFAQVKQIYKTPPIKDFGGFNFSQILPDPSKPSKRSFIEDLLFNKVTLADAGFIKQYGYCLGDIAARDLICAQKFNGLTVLPPLLTDEMIAQYTSALLAGTITSGWTFGAGAALQIPFAMQMAYRFNGIGVTQNVLYENQKLIANQFNSAIGKIQDSLSSTASALGKLQDVVNQNAQALNTLVKQLSSNFGAISSVLNDILSRLDKVEAEVQIDRLITGRLQSLQTYVTQQLIRAAEIRASANLAATKMSECVLGQSKRVDFCGKGYHLMSFPQSAPHGVVFLHVTYVCAQEKNFTTAPAICHDGKAHFPREGVFVSNGTHWFVTQRNFYEPQIITTDNTFVSGNCDVVIGIVNNTVYDPLQPELDSFKEELDKYFKNHTSPDVDLGDISGINASVVNIQKEIDRLNEVAKNLNESLIDLQELGKYEQYIKGGSGYIPEAPRDGQAYVRKDGEWVLLSTFL

SEQ ID NO: 6128 - protein, 1241 aa, Artificial Sequence
  SARS-CoV-2/Belgium/VAG-03013/2020__EPI_ISL_415155 spike protein (1-1211)(P715C_P1069C) Foldon construct
MFVFLVLLPLVSSQCVNLTTRTQLPPAYTNSFTRGVYYPDKVFRSSVLHSTQDLFLPFFSNVTWFHAIHVSGTNGTKRFDNPVLPFNDGVYFASTEKSNIIRGWIFGTTLDSKTQSLLIVNNATNVVIKVCEFQFCNDPFLGVYYHKNNKSWMESEFRVYSSANNCTFEYVSQPFLMDLEGKQGNFKNLREFVFKNIDGYFKIYSKHTPINLVRDLPQGFSALEPLVDLPIGINITRFQTLLALHRSYLTPGDSSSGWTAGAAAYYVGYLQPRTFLLKYNENGTITDAVDCALDPLSETKCTLKSFTVEKGIYQTSNFRVQPTESIVRFPNITNLCPFGEVFNATRFASVYAWNRKRISNCVADYSVLYNSASFSTFKCYGVSPTKLNDLCFTNVYADSFVIRGDEVRQIAPGQTGKIADYNYKLPDDFTGCVIAWNSNNLDSKVGGNYNYLYRLFRKSNLKPFERDISTEIYQAGSTPCNGVEGFNCYFPLQSYGFQPTNGVGYQPYRVVVLSFELLHAPATVCGPKKSTNLVKNKCVNFNFNGLTGTGVLTESNKKFLPFQQFGRDIADTTDAVRDPQTLEILDITPCSFGGVSVITPGTNTSNQVAVLYQGVNCTEVPVAIHADQLTPTWRVYSTGSNVFQTRAGCLIGAEHVNNSYECDIPIGAGICASYQTQTNSPRRARSVASQSIIAYTMSLGAENSVAYSNNSIAICTNFTISVTTEILPVSMTKTSVDCTMYICGDSTECSNLLLQYGSFCTQLNRALTGIAVEQDKNTQEVFAQVKQIYKTPPIKDFGGFNFSQILPDPSKPSKRSFIEDLLFNKVTLADAGFIKQYGDCLGDIAARDLICAQKFNGLTVLPPLLTDEMIAQYTSALLAGTITSGWTFGAGAALQIPFAMQMAYRFNGIGVTQNVLYENQKLIANQFNSAIGKIQDSLSSTATALGKLQDVVNQNAQALNTLVKQLSSNFGAISSVLNDILSRLDKVEAEVQIDRLITGRLQSLQTYVTQQLIRAAEIRASANLAATKMSECVLGQSKRVDFCGKGYHLMSFPQSAPHGVVFLHVTYVCAQEKNFTTAPAICHDGKAHFPREGVFVSNGTHWFVTQRNFYEPQIITTDNTFVSGNCDVVIGIVNNTVYDPLQPELDSFKEELDKYFKNHTSPDVDLGDISGINASVVNIQKEIDRLNEVAKNLNESLIDLQELGKYEQYIKGGSGYIPEAPRDGQAYVRKDGEWVLLSTFL

SEQ ID NO: 6129 - protein, 1241 aa, Artificial Sequence
  SARS-CoV-2/Belgium/BC-03016/2020__EPI_ISL_415157 spike protein (1-1211)(P715C_P1069C) Foldon construct
MFVFLVLLPLVSSQCVNLTTRTQLPPAYTNSFTRGVYYPDKVFRSSVLHSTQDLFLPFFSNVTWFHAIHVSGTNGTKRFDNPVLPFNDGVYFASTEKSNIIRGWIFGTTLDSKTQSLLIVNNATNVVIKVCEFQFCNDPFLGVYYHKNNKSWMESEFRVYSSANNCTFEYVSQPFLMDLEGKQGNFKNLREFVFKNIDGYFKIYSKHTPINLVRDLPQGFSALEPLVDLPIGINITRFQTLLALHRSYLTPGDSSSGWTAGAAAYYVGYLQPRTFLLKYNENGTITDAVDCALDPLSETKCTLKSFTVEKGIYQTSNFRVQPTESIVRFPNITNLCPFGEVFNATRFASVYAWNRKRISNCVADYSVLYNSASFSTFKCYGVSPTKLNDLCFTNVYADSFVIRGDEVRQIAPGQTGKIADYNYKLPDDFTGCVIAWNSNNLDSKVGGNYNYLYRLFRKSNLKPFERDISTEIYQAGSTPCNGVEGFNCYFPLQSYGFQPTNGVGYQPYRVVVLSFELLHAPATVCGPKKSTNLVKNKCVNFNFNGLTGTGVLTESNKKFLPFQQFGRDIADTTDAVRDPQTLEILDITPCSFGGVSVITPGTNTSNQVAVLYQGVNCTEVPVAIHADQLTPTWRVYSTGSNVFQTRAGCLIGAEHVNNSYECDIPIGAGICASYQTQTNSPRRARSVASQSIIAYTMSLGAENSVAYSNNSIAICTNFTISVTTEILPVSMTKTSVDCTMYICGDSTECSNLLLQYGSFCTQLNRALTGIAVEQDKNTQEVFAQVKQIYKTPPIKDFGGFNFSQILPDPSKPSKRSFIEDLLFNKVTLADAGFIKQYGDCLGDIAARDLICAQKFNGLTVLPPLLTDEMIAQYTSALLAGTITSGWTFGAGAALQIPFAMQMAYRFNGIGVTQNVLYENQKLIANQFNSAIGKIQDSLSSTAPALGKLQDVVNQNAQALNTLVKQLSSNFGAISSVLNDILSRLDKVEAEVQIDRLITGRLQSLQTYVTQQLIRAAEIRASANLAATKMSECVLGQSKRVDFCGKGYHLMSFPQSAPHGVVFLHVTYVCAQEKNFTTAPAICHDGKAHFPREGVFVSNGTHWFVTQRNFYEPQIITTDNTFVSGNCDVVIGIVNNTVYDPLQPELDSFKEELDKYFKNHTSPDVDLGDISGINASVVNIQKEIDRLNEVAKNLNESLIDLQELGKYEQYIKGGSGYIPEAPRDGQAYVRKDGEWVLLSTFL

SEQ ID NO: 6130 - protein, 1241 aa, Artificial Sequence
  SARS-CoV-2/Germany/BavPat3/2020__EPI_ISL_414521 spike protein (1-1211)(P715C_P1069C) Foldon construct
MFVFLVLLPLVSSQCVNLTTRTQLPPAYTNSFTRGVYYPDKVFRSSVLHSTQDLFLPFFSNVTWFHAIHVSGTNGTKRFDNPVLPFNDGVYFASTEKSNIIRGWIFGTTLDSKTQSLLIVNNATNVVIKVCEFQFCNDPFLGVYYHKNNKSWMESEFRVYSSANNCTFEYVSQPFLMDLEGKQGNFKNLREFVFKNIDGYFKIYSKHTPINLVRDLPQGFSALEPLVDLPIGINITRFQTLLALHRSYLTPGDSSSGWTAGAAAYYVGYLQPRTFLLKYNENGTITDAVDCALDPLSETKCTLKSFTVEKGIYQTSNFRVQPTESIVRFPNITNLCPFGEVFNATRFASVYAWNRKRISNCVADYSVLYNSASFSTFKCYGVSPTKLNDLCFTNVYADSFVIRGDEVRQIAPGQTGKIADYNYKLPDDFTGCVIAWNSNNLDSKVGGNYNYLYRLFRKSNLKPFERDISTEIYQAGSTPCNGVEGFNCYFPLQSYGFQPTNGVGYQPYRVVVLSFELLHAPATVCGPKKSTNLVKNKCVNFNFNGLTGTGVLTESNKKFLPFQQFGRDIADTTDAVRDPQTLEILDITPCSFGGVSVITPGTNTSNQVAVLYQDVNCTEVPVAIHADQLTPTWRVYSTGSNVFQTRAGCLIGAEHVNNSYECDIPIGAGICASYQTQTNSPRRARSVASQSIIAYTMSLGAENSVAYSNNSIAICTNFTISVTTEILPVSMTKTSVDCTMYICGDSTECSNLLLQYGSFCTQLNRALTGIAVEQDKNTQQVFAQVKQIYKTPPIKDFGGFNFSQILPDPSKPSKRSFIEDLLFNKVTLADAGFIKQYGDCLGDIAARDLICAQKFNGLTVLPPLLTDEMIAQYTSALLAGTITSGWTFGAGAALQIPFAMQMAYRFNGIGVTQNVLYENQKLIANQFNSAIGKIQDSLSSTASALGKLQDVVNQNAQALNTLVKQLSSNFGAISSVLNDILSRLDKVEAEVQIDRLITGRLQSLQTYVTQQLIRAAEIRASANLAATKMSECVLGQSKRVDFCGKGYHLMSFPQSAPHGVVFLHVTYVCAQEKNFTTAPAICHDGKAHFPREGVFVSNGTHWFVTQRNFYEPQIITTDNTFVSGNCDVVIGIVNNTVYDPLQPELDSFKEELDKYFKNHTSPDVDLGDISGINASVVNIQKEIDRLNEVAKNLNESLIDLQELGKYEQYIKGGSGYIPEAPRDGQAYVRKDGEWVLLSTFL

SEQ ID NO: 6131 - protein, 1241 aa, Artificial Sequence
  SARS-CoV-2/France/HF1805/2020__EPI_ISL_414628 spike protein (1-1211)(P715C_P1069C) Foldon construct
MFVFLVLLPLVSSQCVNLTTRTQLPPAYTNSFTRGVYYPDKVFRSSVLHSTQDLFLPFFSNVTWFHAIHVSGTNGTKRFDNPVLPFNDGVYFASTEKSNIIRGWIFGTTLDSKTQSLLIVNNATNVVIKVCEFQFCNDPFLGVYYHKNNKSWMESEFRVYSSANNCTFEYVSQPFLMDLEGKQGNFKNLREFVFKNIDGYFKIYSKHTPINLVRDLPQGFSALEPLVDLPIGINITRFQTLLALHRSYLTPGDSSSGWTAGAAAYYVGYLQPRTFLLKYNENGTITDAVDCALDPLSETKCTLKSFTVEKGIYQTSNFRVQPTESIVRFPNITNLCPFGEVFNATRFASVYAWNRKRISNCVADYSVLYNSASFSTFKCYGVSPTKLNDLCFTNVYADSFVIRGDEVRQIAPGQTGKIADYNYKLPDDFTGCVIAWNSNNLDSKVGGNYNYLYRLFRKSNLKPFERDISTEIYQAGSTPCNGVEGFNCYFPLQSYGFQPTNGVGYQPYRVVVLSFELLHAPATVCGPKKSTNLVKNKCVNFNFNGLTGTGVLTESNKKFLPFQQFGRDIADTTDAVRDPQTLEILDITPCSFGGVSVITPGTNTSNQVAVLYQGVNCTEVPVAIHADQLTPTWRVYSTGSNVFQTRAGCLIGAEHVNNSYECDIPIGAGICASYQTQTNSPRRARSVASQSIIAYTMSLGAENSVAYSNNSIAICTNFTISVTTEILPVSMTKTSVDCTMYICGDSTECSNLLLQYGSFCTQLNRALTGIAVEQDKNTQEVFAQVKQIYKTPPIKDFGGFNFSQILPDPSKPSKRSFIEDLLFNKVTLADAGFIKQYGDCLGDIAARDLICAQKFNGLTVLPPLLTDEMIAQYTSALLAGTITSGWTFGAGAALQIPFAMQMAYRFNGIGVTQNVLYENQKLIANQFNSAIGKIQDSLSSTASALGKLQDVVNQNAQALNTLVKQLSSNFGAISSVLNDILSRLDKVEAEVQIDRLITGRLQSLQTYVTQQLIRAAEIRASANLAATKMSECVLGQSKRVDFCGKGYHLMSFPQSAPHGVVFLHVTYVCAQEKNFTTAPAICHDGKAHFPREGVFVSNGTHWFVTQRNFYEPQIITTDNTFVSGNCDVVIGVVNNTVYDPLQPELDSFKEELDKYFKNHTSPDVDLGDISGINASVVNIQKEIDRLNEVAKNLNESLIDLQELGKYEQYIKGGSGYIPEAPRDGQAYVRKDGEWVLLSTFL

SEQ ID NO: 6132 - protein, 1241 aa, Artificial Sequence
  SARS-CoV-2/Netherlands/ZuidHolland_9/2020__EPI_ISL_414445 spike protein (1-1211)(P715C_P1069C) Foldon construct
MFVFLVLLPLVSSQCVNLTTRTQLPPAYTNSFTRGVYYPDKVFRSSVLHSTQDLFLPFFSNVTWFHAIHVSGTNGTKRFDNPVLPFNDGVYFASTEKSNIIRGWIFGTTLDSKTQSLLIVNNATNVVIKVCEFQFCNDPFLGVYYHKNNKSWMESEFRVYSSANNCTFEYVSQPFLMDLEGKQGNFKNLREFVFKNIDGYFKIYSKHTPINLVRDLPQGFSALEPLVDLPIGINITRFQTLLALHRSYLTPGDSSSGWTAGAAAYYVGYLQPRTFLLKYNENGTITDAVDCALDPLSETKCTLKSFTVEKGIYQTSNFRVQPTESIVRFPNITNLCPFGEVFNATRFASVYAWNRKRISNCVADYSVLYNSASFSTFKCYGVSPTKLNDLCFTNVYADSFVIRGDEVRQIAPGQTGKIADYNYKLPDDFTGCVIAWNSNNLDSKVGGNYNYLYRLFRKSNLKPFERDISTEIYQAGSTPCNGVEGFNCYFPLQSYGFQPTNGVGYQPYRVVVLSFELLHAPATVCGPKKSTNLVKNKCVNFNFNGLTGTGVLTESNKKFLPFQQFGRDIADTTDAVRDPQTLEILDITPCSFGGVSVITPGTNTSNQVAVLYQGVNCTEVPVAIHADQLTPTWRVYSTGSNVFQTRAGCLIGAEHVNNSYECDIPIGAGICASYQTQTNSPRRARSVASQSIIAYTMSLGAENSVAYSNNSIAICTNFTISVTTEILPVSMTKTSVDCTMYICGDSTECSNLLLQYGSFCTQLNRALTGIAVEQDKNTQEVFAQVKQIYKTPPIKDFGGFNFSQILPDPSKPSKRSFIEDLLFNKVTLADAGFIKQYGDCLGDIAARDLICVQKFNGLTVLPPLLTDEMIAQYTSALLAGTITSGWTFGAGAALQIPFAMQMAYRFNGIGVTQNVLYENQKLIANQFNSAIGKIQDSLSSTASALGKLQDVVNQNAQALNTLVKQLSSNFGAISSVLNDILSRLDKVEAEVQIDRLITGRLQSLQTYVTQQLIRAAEIRASANLAATKMSECVLGQSKRVDFCGKGYHLMSFPQSAPHGVVFLHVTYVCAQEKNFTTAPAICHDGKAHFPREGVFVSNGTHWFVTQRNFYEPQIITTDNTFVSGNCDVVIGIVNNTVYDPLQPELDSFKEELDKYFKNHTSPDVDLGDISGINASVVNIQKEIDRLNEVAKNLNESLIDLQELGKYEQYIKGGSGYIPEAPRDGQAYVRKDGEWVLLSTFL

SEQ ID NO: 6133 - protein, 1241 aa, Artificial Sequence
  SARS-CoV-2/Finland/FIN03032020A/2020__EPI_ISL_413602 spike protein (1-1211)(P715C_P1069C) Foldon construct
MFVFLVLLPLVSSQCVNLTTRTQLPPAYTNSFTRGVYYPDKVFRSSVLHSTQDLFLPFFSNVTWFHAIHVSGTNGTKRFDNPVLPFNDGVYFASTEKSNIIRGWIFGTTLDSKTQSLLIVNNATNVVIKVCEFQFCNDPFLGVYYHKNNKSWMESEFRVYSSANNCTFEYVSQPFLMDLEGKQGNFKNLREFVFKNIDGYFKIYSKHTPINLVRDLPQGFSALEPLVDLPIGINITRFQTLLALHRSYLTPGDSSSGWTAGAAAYYVGYLQPRTFLLKYNENGTITDAVDCALDPLSETKCTLKSFTVEKGIYQTSNFRVQPTESIVRFPNITNLCPFGEVFNATRFASVYAWNRKRISNCVADYSVLYNSASFSTFKCYGVSPTKLNDLCFTNVYADSFVIRGDEVRQIAPGQTGKIADYNYKLPDDFTGCVISWNSNNLDSKVGGNYNYLYRLFRKSNLKPFERDISTEIYQAGSTPCNGVEGFNCYFPLQSYGFQPTNGVGYQPYRVVVLSFELLHAPATVCGPKKSTNLVKNKCVNFNFNGLTGTGVLTESNKKFLPFQQFGRDIADTTDAVRDPQTLEILDITPCSFGGVSVITPGTNTSNQVAVLYQGVNCTEVPVAIHADQLTPTWRVYSTGSNVFQTRAGCLIGAEHVNNSYECDIPIGAGICASYQTQTNSPRRARSVASQSIIAYTMSLGAENSVAYSNNSIAICTNFTISVTTEILPVSMTKTSVDCTMYICGDSTECSNLLLQYGSFCTQLNRALTGIAVEQDKNTQEVFAQVKQIYKTPPIKDFGGFNFSQILPDPSKPSKRSFIEDLLFNKVTLADAGFIKQYGDCLGDIAARDLICAQKFNGLTVLPPLLTDEMIAQYTSALLAGTITSGWTFGAGAALQIPFAMQMAYRFNGIGVTQNVLYENQKLIANQFNSAIGKIQDSLSSTASALGKLQDVVNQNAQALNTLVKQLSSNFGAISSVLNDILSRLDKVEAEVQIDRLITGRLQSLQTYVTQQLIRAAEIRASANLAATKMSECVLGQSKRVDFCGKGYHLMSFPQSAPHGVVFLHVTYVCAQEKNFTTAPAICHDGKAHFPREGVFVSNGTHWFVTQRNFYEPQIITTDNTFVSGNCDVVIGIVNNTVYDPLQPELDSFKEELDKYFKNHTSPDVDLGDISGINASVVNIQKEIDRLNEVAKNLNESLIDLQELGKYEQYIKGGSGYIPEAPRDGQAYVRKDGEWVLLSTFL

SEQ ID NO: 6134 - protein, 1241 aa, Artificial Sequence
  SARS-CoV-2/France/GE1977/2020__EPI_ISL_414632 spike protein (1-1211)(P715C_P1069C) Foldon construct
MFVFLVLLPLVSSQCVNLTTRTQLPPAYTNSFTRGVYYPDKVFRSSVLHSTQDLFLPFFSNVTWFHAIHVSGTNGTKRFDNPVLPFNDGVYFASTEKSNIIRGWIFGTTLDSKTQSLLIVNNATNVVIKVCEFQFCNDPFLGVYYHKNNKSWMESEFRVYSSANNCTFEYVSQPFLMDLEGKQGNFKNLREFVFKNIDGYFKIYSKHTPINLVRDLPQGFSALEPLVDLPIGINITRFQTLLALHRSYLTPGDSSSGWTAGAAAYYVGYLQPRTFLLKYNENGTITDAVDCALDPLSETKCTLKSFTVEKGIYQTSNFRVQPTESIVRFPNITNLCPFGEVFNATRFASVYAWNRKRISNCVADYSVLYNSASFSTFKCYGVSPTKLNDLCFTNVYADSFVIRGDEVRQIAPGQTGKIADYNYKLPDDFTGCVIAWNSNNLDSKVGGNYNYLYRLFRKSNLKPFERDISTEIYQAGSTPCNGVEGFNCYFPLQSYGFQPTNGVGYQPYRVVVLSFELLHAPATVCGPKKSTNLVKNKCVNFNFNGLTGTGVLTESNKKFLPFQQFGRDIADTTDAVRDPQTLEILDITPCSFGGVSVITPGTNTSNQVAVLYQGVNCTEVPVAIHADQLTPTWRVYSTGSNVFQTRAGCLIGAEHVNNSYECDIPIGAGICASYQTQTNSPRRARSVASQSIIAYTMSLGAENSVAYSNNSIAICTNFTISVTTEILPVSMTKTSVDCTMYICGDSTECSNLLLQYGSFCTQLNRALTGIAVEQDKNTQEVFAQVKQIYKTPPIKDFGGFNFSQILPDPSKPSKRSFIEDLLFNKVTLADAGFIKQYGDCLGDIAARDLICAQKFNGLTVLPPLLTDEMIAQYTSALLAGTITSGWTFGAGAALQIPFAMQMAYRFNGIGVTQNVLYENQKLIANQFNSAIGKIQDSLFSTASALGKLQDVVNQNAQALNTLVKQLSSNFGAISSVLNDILSRLDKVEAEVQIDRLITGRLQSLQTYVTQQLIRAAEIRASANLAATKMSECVLGQSKRVDFCGKGYHLMSFPQSAPHGVVFLHVTYVCAQEKNFTTAPAICHDGKAHFPREGVFVSNGTHWFVTQRNFYEPQIITTDNTFVSGNCDVVIGIVNNTVYDPLQPELDSFKEELDKYFKNHTSPDVDLGDISGINASVVNIQKEIDRLNEVAKNLNESLIDLQELGKYEQYIKGGSGYIPEAPRDGQAYVRKDGEWVLLSTFL

SEQ ID NO: 6135 - protein, 1241 aa, Artificial Sequence
  SARS-CoV-2/Finland/FIN-313/2020__EPI_ISL_414641 spike protein (1-1211)(P715C_P1069C) Foldon construct
MFVFLVLLPLVSSQCVNLTTRTQLPPAYTNSFTRGVYYPDKVFRSSVLHSTQDLFLPFFSNVTWFHAIHVSGTNGTKRFDNPVLPFNDGVYFASTEKSNIIRGWIFGTTLDSKTQSLLIVNNATNVVIKVCEFQFCNDPFLGVYYHKNNKSWMESEFRVYSSANNCTFEYVSQPFLMDLEGKQGNFKNLREFVFKNIDGYFKIYSKHTPINLVRDLPQGFSALEPLVDLPIGINITRFKTLLALHRSYLTPGDSSSGWTAGAAAYYVGYLQPRTFLLKYNENGTITDAVDCALDPLSETKCTLKSFTVEKGIYQTSNFRVQPTESIVRFPNITNLCPFGEVFNATRFASVYAWNRKRISNCVADYSVLYNSASFSTFKCYGVSPTKLNDLCFTNVYADSFVIRGDEVRQIAPGQTGKIADYNYKLPDDFTGCVIAWNSNNLDSKVGGNYNYLYRLFRKSNLKPFERDISTEIYQAGSTPCNGVEGFNCYFPLQSYGFQPTNGVGYQPYRVVVLSFELLHAPATVCGPKKSTNLVKNKCVNFNFNGLTGTGVLTESNKKFLPFQQFGRDIADTTDAVRDPQTLEILDITPCSFGGVSVITPGTNTSNQVAVLYQGVNCTEVPVAIHADQLTPTWRVYSTGSNVFQTRAGCLIGAEHVNNSYECDIPIGAGICASYQTQTNSPRRARSVASQSIIAYTMSLGAENSVAYSNNSIAICTNFTISVTTEILPVSMTKTSVDCTMYICGDSTECSNLLLQYGSFCTQLNRALTGIAVEQDKNTQEVFAQVKQIYKTPPIKDFGGFNFSQILPDPSKPSKRSFIEDLLFNKVTLADAGFIKQYGDCLGDIAARDLICAQKFNGLTVLPPLLTDEMIAQYTSALLAGTITSGWTFGAGAALQIPFAMQMAYRFNGIGVTQNVLYENQKLIANQFNSAIGKIQDSLSSTASALGKLQDVVNQNAQALNTLVKQLSSNFGAISSVLNDILSRLDKVEAEVQIDRLITGRLQSLQTYVTQQLIRAAEIRASANLAATKMSECVLGQSKRVDFCGKGYHLMSFPQSAPHGVVFLHVTYVCAQEKNFTTAPAICHDGKAHFPREGVFVSNGTHWFVTQRNFYEPQIITTDNTFVSGNCDVVIGIVNNTVYDPLQPELDSFKEELDKYFKNHTSPDVDLGDISGINASVVNIQKEIDRLNEVAKNLNESLIDLQELGKYEQYIKGGSGYIPEAPRDGQAYVRKDGEWVLLSTFL

SEQ ID NO: 6136 - protein, 1241 aa, Artificial Sequence
  SARS-CoV-2/Netherlands/ZuidHolland_2/2020__EPI_ISL_414556 spike protein (1-1211)(P715C_P1069C) Foldon construct
MFVFLVLLPLVSSQCVNLTTRTQLPPAYTNSFTRGVYYPDKVFRSSVLHSTQDLFLPFFSNVTWFHAIHVSGTNGTKRFDNPVLPFNDGVYFASTEKSNIIRGWIFGTTLDSKTQSLLIVNNATNVVIKVCEFQFCNDPFLGVYYHKNNKSWMESEFRVYSSANNCTFEYVSQPFLMDLEGKQGNFKNLREFVFKNIDGYFKIYSKHTPINLVRDLPQGFSALEPLVDLPIGINITRFQTLLALHRSYLTPGDSSSGWTAGAAAYYVGYLQPRTFLLKYNENGTITDAVDCALDPLSETKCTLKSFTVEKGIYQTSNFRVQPTESIVRFPNITNLCPFGEVFNATRFASVYAWNRKRISNCVADYSVLYNSASFSTFKCYGVSPTKLNDLCFTNVYADSFVIRGDEVRQIAPGQTGKIADYNYKLPDDFTGCVIAWNSNNLDSKVGGNYNYLYRLFRKSNLKPFERDISTEIYQAGSTPCNGVEGFNCYFPLQSYGFQPTNGVGYQPYRVVVLSFELLHAPATVCGPKKSTNLVKNKCVNFNFNGLTGTGVLTESNKKFLPFQQFGRDIADTTDAVRDPQTLEILDITPCSFGGVSVITPGTNTSNQVAVLYQGVNCTEVPVAIHADQLTPTWRVYSTGSNVFQTRAGCLIGAEHVNNSYECDIPIGAGICASYQTQTNSPRRARSVASQSIIAYTMSLGAENSVAYSNNSIAICTNFTISVTTEILPVSMTKTSVDCTMYICGDSTECSNLLLQYGSFCTQLNRALTGIALEQDKNTQEVFAQVKQIYKTPPIKDFGGFNFSQILPDPSKPSKRSFIEDLLFNKVTLADAGFIKQYGDCLGDIAARDLICAQKFNGLTVLPPLLTDEMIAQYTSALLAGTITSGWTFGAGAALQIPFAMQMAYRFNGIGVTQNVLYENQKLIANQFNSAIGKIQDSLSSTASALGKLQDVVNQNAQALNTLVKQLSSNFGAISSVLNDILSRLDKVEAEVQIDRLITGRLQSLQTYVTQQLIRAAEIRASANLAATKMSECVLGQSKRVDFCGKGYHLMSFPQSAPHGVVFLHVTYVCAQEKNFTTAPAICHDGKAHFPREGVFVSNGTHWFVTQRNFYEPQIITTDNTFVSGNCDVVIGIVNNTVYDPLQPELDSFKEELDKYFKNHTSPDVDLGDISGINASVVNIQKEIDRLNEVAKNLNESLIDLQELGKYEQYIKGGSGYIPEAPRDGQAYVRKDGEWVLLSTFL

SEQ ID NO: 6137 - protein, 1241 aa, Artificial Sequence
  SARS-CoV-2/USA/WA-UW31/2020__EPI_ISL_414618 spike protein (1-1211)(P715C_P1069C) Foldon construct
MFVFLVLLPLVSSQCVNLTTRTQLPPAYTNSFTRGVYYPDKVFRSSVLHSTQDLFLPFFSNVTWFHAIHVSGTNGTKRFDNPVLPFNDGVYFASTEKSNIIRGWIFGTTLDSKTQSLLIVNNATNVVIKVCEFQFCNDPFLGVYYHKNNKSWMESEFRVYSSANNCTFEYVSQPFLMDLEGKQGNFKNLREFVFKNIDGYFKIYSKHTPINLVRDLPQGFSALEPLVDLPIGINITRFQTLLALHRSYLTPGDSSSGWTAGAAAYYVGYLQPRTFLLKYNENGTITDAVDCALDPLSETKCTLKSFTVEKGIYQTSNFRVQPTESIVRFPNITNLCPFGEVFNATRFASVYAWNRKRISNCVADYSVLYNSASFSTFKCYGVSPTKLNDLCFTNVYADSFVIRGDEVRQIAPGQTGKIADYNYKLPDDFTGCVIAWNSNNLDSKVGGNYNYLYRLFRKSNLKPFERDISTEIYQAGSTPCNGAEGFNCYFPLQSYGFQPTNGVGYQPYRVVVLSFELLHAPATVCGPKKSTNLVKNKCVNFNFNGLTGTGVLTESNKKFLPFQQFGRDIADTTDAVRDPQTLEILDITPCSFGGVSVITPGTNTSNQVAVLYQDVNCTEVPVAIHADQLTPTWRVYSTGSNVFQTRAGCLIGAEHVNNSYECDIPIGAGICASYQTQTNSPRRARSVASQSIIAYTMSLGAENSVAYSNNSIAICTNFTISVTTEILPVSMTKTSVDCTMYICGDSTECSNLLLQYGSFCTQLNRALTGIAVEQDKNTQEVFAQVKQIYKTPPIKDFGGFNFSQILPDPSKPSKRSFIEDLLFNKVTLADAGFIKQYGDCLGDIAARDLICAQKFNGLTVLPPLLTDEMIAQYTSALLAGTITSGWTFGAGAALQIPFAMQMAYRFNGIGVTQNVLYENQKLIANQFNSAIGKIQDSLSSTASALGKLQDVVNQNAQALNTLVKQLSSNFGAISSVLNDILSRLDKVEAEVQIDRLITGRLQSLQTYVTQQLIRAAEIRASANLAATKMSECVLGQSKRVDFCGKGYHLMSFPQSAPHGVVFLHVTYVCAQEKNFTTAPAICHDGKAHFPREGVFVSNGTHWFVTQRNFYEPQIITTDNTFVSGNCDVVIGIVNNTVYDPLQPELDSFKEELDKYFKNHTSPDVDLGDISGINASVVNIQKEIDRLNEVAKNLNESLIDLQELGKYEQYIKGGSGYIPEAPRDGQAYVRKDGEWVLLSTFL

SEQ ID NO: 6138 - protein, 1241 aa, Artificial Sequence
  SARS-CoV-2/South Korea/SNU01/2020__EPI_ISL_411929 spike protein (1-1211)(P715C_P1069C) Foldon construct
MFVFLVLLPLVSSQCVNLTTRTQLPPAYTNSFTRGVYYPDKVFRSSVLHSTQDLFLPFFSNVTWFHAIHVSGTNGTKRFDNPVLPFNDGVYFASTEKSNIIRGWIFGTTLDSKTQSLLIVNNATNVVIKVCEFQFCNDPFLGVYYHKNNKSWMESEFRVYSSANNCTFEYVSQPFLMDLEGKQGNFKNLREFVFKNIDGYFKIYSKHTPINLVRDLPQGFWALEPLVDLPIGINITRFQTLLALHRSYLTPGDSSSGWTAGAAAYYVGYLQPRTFLLKYNENGTITDAVDCALDPLSETKCTLKSFTVEKGIYQTSNFRVQPTESIVRFPNITNLCPFGEVFNATRFASVYAWNRKRISNCVADYSVLYNSASFSTFKCYGVSPTKLNDLCFTNVYADSFVIRGDEVRQIAPGQTGKIADYNYKLPDDFTGCVIAWNSNNLDSKVGGNYNYLYRLFRKSNLKPFERDISTEIYQAGSTPCNGVEGFNCYFPLQSYGFQPTNGVGYQPYRVVVLSFELLHAPATVCGPKKSTNLVKNKCVNFNFNGLTGTGVLTESNKKFLPFQQFGRDIADTTDAVRDPQTLEILDITPCSFGGVSVITPGTNTSNQVAVLYQDVNCTEVPVAIHADQLTPTWRVYSTGSNVFQTRAGCLIGAEHVNNSYECDIPIGAGICASYQTQTNSPRRARSVASQSIIAYTMSLGAENSVAYSNNSIAICTNFTISVTTEILPVSMTKTSVDCTMYICGDSTECSNLLLQYGSFCTQLNRALTGIAVEQDKNTQEVFAQVKQIYKTPPIKDFGGFNFSQILPDPSKPSKRSFIEDLLFNKVTLADAGFIKQYGDCLGDIAARDLICAQKFNGLTVLPPLLTDEMIAQYTSALLAGTITSGWTFGAGAALQIPFAMQMAYRFNGIGVTQNVLYENQKLIANQFNSAIGKIQDSLSSTASALGKLQDVVNQNAQALNTLVKQLSSNFGAISSVLNDILSRLDKVEAEVQIDRLITGRLQSLQTYVTQQLIRAAEIRASANLAATKMSECVLGQSKRVDFCGKGYHLMSFPQSAPHGVVFLHVTYVCAQEKNFTTAPAICHDGKAHFPREGVFVSNGTHWFVTQRNFYEPQIITTDNTFVSGNCDVVIGIVNNTVYDPLQPELDSFKEELDKYFKNHTSPDVDLGDISGINASVVNIQKEIDRLNEVAKNLNESLIDLQELGKYEQYIKGGSGYIPEAPRDGQAYVRKDGEWVLLSTFL

SEQ ID NO: 6139 - protein, 1241 aa, Artificial Sequence
  SARS-CoV-2/China/WF0004/2020__EPI_ISL_413694 spike protein (1-1211)(P715C_P1069C) Foldon construct
MFVFLVLLPLVSSQCVNLTTRTQLPPAYTNSFTRGVYYPDKVFRSSVLHSTQDLFLPFFSNVTWFHAIHVSGTNGTKRFDNPVLPFNDGVYFASTEKSNIIRGWIFGTTLDSKTQSLLIVNNATNVVIKVCEFQFCNDPFLGVYYHKNNKSWTESEFRVYSSANNCTFEYVSQPFLMDLEGKQGNFKNLREFVFKNIDGYFKIYSKHTPINLVRDLPQGFSALEPLVDLPIGINITRFQTLLALHRSYLTPGDSSSGWTAGAAAYYVGYLQPRTFLLKYNENGTITDAVDCALDPLSETKCTLKSFTVEKGIYQTSNFRVQPTESIVRFPNITNLCPFGEVFNATRFASVYAWNRKRISNCVADYSVLYNSASFSTFKCYGVSPTKLNDLCFTNVYADSFVIRGDEVRQIAPGQTGKIADYNYKLPDDFTGCVIAWNSNNLDSKVGGNYNYLYRLFRKSNLKPFERDISTEIYQAGSTPCNGVEGFNCYFPLQSYGFQPTNGVGYQPYRVVVLSFELLHAPATVCGPKKSTNLVKNKCVNFNFNGLTGTGVLTESNKKFLPFQQFGRDIADTTDAVRDPQTLEILDITPCSFGGVSVITPGTNTSNQVAVLYQDVNCTEVPVAIHADQLTPTWRVYSTGSNVFQTRAGCLIGAEHVNNSYECDIPIGAGICASYQTQTNSPRRARSVASQSIIAYTMSLGAENSVAYSNNSIAICTNFTISVTTEILPVSMTKTSVDCTMYICGDSTECSNLLLQYGSFCTQLNRALTGIAVEQDKNTQEVFAQVKQIYKTPPIKDFGGFNFSQILPDPSKPSKRSFIEDLLFNKVTLADAGFIKQYGDCLGDIAARDLICAQKFNGLTVLPPLLTDEMIAQYTSALLAGTITSGWTFGAGAALQIPFAMQMAYRFNGIGVTQNVLYENQKLIANQFNSAIGKIQDSLSSTASALGKLQDVVNQNAQALNTLVKQLSSNFGAISSVLNDILSRLDKVEAEVQIDRLITGRLQSLQTYVTQQLIRAAEIRASANLAATKMSECVLGQSKRFDFCGKGYHLMSFPQSAPHGVVFLHVTYVCAQEKNFTTAPAICHDGKAHFPREGVFVSNGTHWFVTQRNFYEPQIITTDNTFVSGNCDVVIGIVNNTVYDPLQPELDSFKEELDKYFKNHTSPDVDLGDISGINASVVNIQKEIDRLNEVAKNLNESLIDLQELGKYEQYIKGGSGYIPEAPRDGQAYVRKDGEWVLLSTFL

SEQ ID NO: 6140 - protein, 1241 aa, Artificial Sequence
  SARS-CoV-2/China/WF0028/2020__EPI_ISL_413791 spike protein (1-1211)(P715C_P1069C) Foldon construct
MFVFLVLLPLVSSQCVNLTTRTQLPPAYTNSFTRGVYYPDKVFRSSVLHSTQDLFLPFFSNVTWFHAIHVSGTNGTKRFDNPVLPFNDGVYFASTEKSNIIRGWIFGTTLDSKTQSLLIVNNATNVVIKVCEFQFCNDPFLGVYYHKNNKSWMESEFRVYSSANNCTFEYVSQPFLMDLEGKQGNFKNLREFVFKNIDGYFKIYSKHTPINLVRDLPQGFSALEPLVDLPIGINITRFQTLLALHRSYLTPGDSSSGWTAGAAAYYVGYLQPRTFLLKYNENGTITDAVDCALDPLSETKCTLKSFTVEKGIYQTSNFRVQPTESIVRFPNITNLCPFGEVFNATRFASVYAWNRKRISNCVADYSVLYNSASFSTFKCYGVSPTKLNDLCFTNVYADSFVIRGDEVRQIAPGQTGKIADYNYKLPDDFTGCVIAWNSNNLDSKVGGNYNYLYRLFRKSNLKPFERDISTEIYQAGSTPCNGVEGFNCYFPLQSYGFQPTNGVGYQPYRVVVLSFELLHAPATVCGPKKSTNLVKNKCVNFNFNGLTGTGVLTESNKKFLPFQQFGRDIADTTDAVRDPQTLEILDITPCSFGGVSVITPGTNTSNQVAVLYQDVNCTEVPVAIHADQLTPTWRVYSTGSNVFQTRAGCLIGAEHVNNSYECDIPIGAGICASYQTQTNSPRRARSVASQSIIAYTMSLGAENSVAYSNNSIAICTNFTISVTTEILPVSMTKTSVDCTMYICGDSTECSNLLLQYGSFCTQLNRALTGIAVEQDKNTQEVFAQVKQIYKTPPIKDFGGFNFSQILPDPSKPSKRSFIEDLLFNKVTLADAGFIKQYGDCLGDIAARDLICAQKFNGLTVLPPLLTDEMIAQYTSALLAGTITSGWTFGAGAALQIPFAMQMAYRFNGIGVTQNVLYENQKLIANQFNSAIGKIQDSLSSTASALGKLQDVVNQNAQALNTLVKQLSSNFGAISSVLNDILSRLDKVEAEVQIDRLITGRLQSLQTYVTQQLIRAAEIRASANLAATKMSECVLGQSKRVDFCGKGYHLMSFPQSAPHGVVFLHVTYVCAQEKNFTTAPAICHDGKAHFPREGVFVSNGTHWFVTQRNFYEPQIITTDNTFVSGNCDVVIGIVNNTVYDPLQPELESFKEELDKYFKNHTSPDVDLGDISGINASVVNIQKEIDRLNEVAKNLNESLIDLQELGKYEQYIKGGSGYIPEAPRDGQAYVRKDGEWVLLSTFL

SEQ ID NO: 6141 - protein, 1241 aa, Artificial Sequence
  SARS-CoV-2/2019-nCoV/USA-CruiseA-18/2020__MT159716.1 spike protein (1-1211)(P715C_P1069C) Foldon construct
MFVFLVLLPLVSSQCVNLTTRTQLPPAYTNSFTRGVYYPDKVFRSSVLHSTQDLFLPFFSNVTWFHAIHVSGTNGTKRFDNPVLPFNDGVYFASTEKSNIIRGWIFGTTLDSKTQSLLIVNNATNVVIKVCEFQFCNDPFLGVYYHKNNKSWMESELRVYSSANNCTFEYVSQPFLMDLEGKQGNFKNLREFVFKNIDGYFKIYSKHTPINLVRDLPQGFSALEPLVDLPIGINITRFQTLLALHRSYLTPGDSSSGWTAGAAAYYVGYLQPRTFLLKYNENGTITDAVDCALDPLSETKCTLKSFTVEKGIYQTSNFRVQPTESIVRFPNITNLCPFGEVFNATRFASVYAWNRKRISNCVADYSVLYNSASFSTFKCYGVSPTKLNDLCFTNVYADSFVIRGDEVRQIAPGQTGKIADYNYKLPDDFTGCVIAWNSNNLDSKVGGNYNYLYRLFRKSNLKPFERDISTEIYQAGSTPCNGVEGFNCYFPLQSYGFQPTNGVGYQPYRVVVLSFELLHAPATVCGPKKSTNLVKNKCVNFNFNGLTGTGVLTESNKKFLPFQQFGRDIADTTDAVRDPQTLEILDITPCSFGGVSVITPGTNTSNQVAVLYQDVNCTEVPVAIHADQLTPTWRVYSTGSNVFQTRAGCLIGAEHVNNSYECDIPIGAGICASYQTQTNSPRRARSVASQSIIAYTMSLGAENSVAYSNNSIAICTNFTISVTTEILPVSMTKTSVDCTMYICGDSTECSNLLLQYGSFCTQLNRALTGIAVEQDKNTQEVFAQVKQIYKTPPIKDFGGFNFSQILPDPSKPSKRSFIEDLLFNKVTLADAGFIKQYGDCLGDIAARDLICAQKFNGLTVLPPLLTDEMIAQYTSALLAGTITSGWTFGAGAALQIPFAMQMAYRFNGIGVTQNVLYENQKLIANQFNSAIGKIQDSLSSTASALGKLQDVVNQNAQALNTLVKQLSSNFGAISSVLNDILSRLDKVEAEVQIDRLITGRLQSLQTYVTQQLIRAAEIRASANLAATKMSECVLGQSKRVDFCGKGYHLMSFPQSAPHGVVFLHVTYVCAQEKNFTTAPAICHDGKAHFPREGVFVSNGTHWFVTQRNFYEPQIITTDNTFVSGNCDVVIGIVNNTVYDPLQPELDSFKEELDKYFKNHTSPDVDLGDISGINASVVNIQKEIDRLNEVAKNLNESLIDLQELGKYEQYIKGGSGYIPEAPRDGQAYVRKDGEWVLLSTFL

SEQ ID NO: 6142 - protein, 1241 aa, Artificial Sequence
  SARS-CoV-2/SARS-CoV-2/Yunnan-01/human/2020/CHN__MT049951.1 spike protein (1-1211)(P715C_P1069C) Foldon construct
MFVFLVLLPLVSSQCVNLTTRTQLPPANTNSFTRGVYYPDKVFRSSVLHSTQDLFLPFFSNVTWFHAIHVSGTNGTKRFDNPVLPFNDGVYFASTEKSNIIRGWIFGTTLDSKTQSLLIVNNATNVVIKVCEFQFCNDPFLGVYYHKNNKSWMESEFRVYSSANNCTFEYVSQPFLMDLEGKQGNFKNLREFVFKNIDGYFKIYSKHTPINLVRDLPQGFSALEPLVDLPIGINITRFQTLLALHRSYLTPGDSSSGWTAGAAAYYVGYLQPRTFLLKYNENGTITDAVDCALDPLSETKCTLKSFTVEKGIYQTSNFRVQPTESIVRFPNITNLCPFGEVFNATRFASVYAWNRKRISNCVADYSVLYNSASFSTFKCYGVSPTKLNDLCFTNVYADSFVIRGDEVRQIAPGQTGKIADYNYKLPDDFTGCVIAWNSNNLDSKVGGNYNYLYRLFRKSNLKPFERDISTEIYQAGSTPCNGVEGFNCYFPLQSYGFQPTNGVGYQPYRVVVLSFELLHAPATVCGPKKSTNLVKNKCVNFNFNGLTGTGVLTESNKKFLPFQQFGRDIADTTDAVRDPQTLEILDITPCSFGGVSVITPGTNTSNQVAVLYQDVNCTEVPVAIHADQLTPTWRVYSTGSNVFQTRAGCLIGAEHVNNSYECDIPIGAGICASYQTQTNSPRRARSVASQSIIAYTMSLGAENSVAYSNNSIAICTNFTISVTTEILPVSMTKTSVDCTMYICGDSTECSNLLLQYGSFCTQLNRALTGIAVEQDKNTQEVFAQVKQIYKTPPIKDFGGFNFSQILPDPSKPSKRSFIEDLLFNKVTLADAGFIKQYGDCLGDIAARDLICAQKFNGLTVLPPLLTDEMIAQYTSALLAGTITSGWTFGAGAALQIPFAMQMAYRFNGIGVTQNVLYENQKLIANQFNSAIGKIQDSLSSTASALGKLQDVVNQNAQALNTLVKQLSSNFGAISSVLNDILSRLDKVEAEVQIDRLITGRLQSLQTYVTQQLIRAAEIRASANLAATKMSECVLGQSKRVDFCGKGYHLMSFPQSAPHGVVFLHVTYVCAQEKNFTTAPAICHDGKAHFPREGVFVSNGTHWFVTQRNFYEPQIITTDNTFVSGNCDVVIGIVNNTVYDPLQPELDSFKEELDKYFKNHTSPDVDLGDISGINASVVNIQKEIDRLNEVAKNLNESLIDLQELGKYEQYIKGGSGYIPEAPRDGQAYVRKDGEWVLLSTFL

SEQ ID NO: 6143 - protein, 1241 aa, Artificial Sequence
  SARS-CoV-2/USA/WA-UW292/2020__EPI_ISL_418077 spike protein (1-1211)(P715C_P1069C) Foldon construct
MFVFLVLLPLVSSQCVNLTTRTQLPPAYTNSFTRGVYYPDKVFRSSVLHSTQDLFLPFFSNVTWFHAIHVSGTNGTKRFDNPVLPFNDGVYFASTEKSNIIRGWIFGTTLDSKTQSLLIVNNATNVVIKVCEFQFCNDPFLGVYYHKNNKSWMESEFRVYSSANNCTFEYVSQPFLMDLEGKQGNFKNLREFVFKNIDGYFKIYSKHTPINLVRDLPQGFSALEPLVDLPIGINITRFQTLLALHRSYLTPGDSSSGWTAGAAAYYVGYLQPRTFLLKYNENGTITDAVDCALDPLSETKCTLKSFTVEKGIYQTSNFRVQPTESIVRFPNITNLCPFGEVFNATRFASVYAWNRKRISNCVADYSVLYNSASFSTFKCYGVSPTKLNDLCFTNVYADSFVIRGDEVRQIAPGQTGKIADYNYKLPDDFTGCVIAWNSNNLDSKVGGNYNYLYRLFRKSNLKPFERDISTEIYQASSTPCNGVEGFNCYFPLQSYGFQPTNGVGYQPYRVVVLSFELLHAPATVCGPKKSTNLVKNKCVNFNFNGLTGTGVLTESNKKFLPFQQFGRDIADTTDAVRDPQTLEILDITPCSFGGVSVITPGTNTSNQVAVLYQDVNCTEVPVAIHADQLTPTWRVYSTGSNVFQTRAGCLIGAEHVNNSYECDIPIGAGICASYQTQTNSPRRARSVASQSIIAYTMSLGAENSVAYSNNSIAICTNFTISVTTEILPVSMTKTSVDCTMYICGDSTECSNLLLQYGSFCTQLNRALTGIAVEQDKNTQEVFAQVKQIYKTPPIKDFGGFNFSQILPDPSKPSKRSFIEDLLFNKVTLADAGFIKQYGDCLGDIAARDLICAQKFNGLTVLPPLLTDEMIAQYTSALLAGTITSGWTFGAGAALQIPFAMQMAYRFNGIGVTQNVLYENQKLIANQFNSAIGKIQDSLSSTASALGKLQDVVNQNAQALNTLVKQLSSNFGAISSVLNDILSRLDKVEAEVQIDRLITGRLQSLQTYVTQQLIRAAEIRASANLAATKMSECVLGQSKRVDFCGKGYHLMSFPQSAPHGVVFLHVTYVCAQEKNFTTAPAICHDGKAHFPREGVFVSNGTHWFVTQRNFYEPQIITTDNTFVSGNCDVVIGIVNNTVYDPLQPELDSFKEELDKYFKNHTSPDVDLGDISGINASVVNIQKEIDRLNEVAKNLNESLIDLQELGKYEQYIKGGSGYIPEAPRDGQAYVRKDGEWVLLSTFL

SEQ ID NO: 6144 - protein, 1241 aa, Artificial Sequence
  SARS-CoV-2/Iceland/192/2020__EPI_ISL_417819 spike protein (1-1211)(P715C_P1069C) Foldon construct
MFVFFVLLPLVSSQCVNLTTRTQLPPAYTNSFTRGVYYPDKVFRSSVLHSTQDLFLPFFSNVTWFHAIHVSGTNGTKRFDNPVLPFNDGVYFASTEKSNIIRGWIFGTTLDSKTQSLLIVNNATNVVIKVCEFQFCNDPFLGVYYHKNNKSWMESEFRVYSSANNCTFEYVSQPFLMDLEGKQGNFKNLREFVFKNIDGYFKIYSKHTPINLVRDLPQGFSALEPLVDLPIGINITRFQTLLALHRSYLTPGDSSSGWTAGAAAYYVGYLQPRTFLLKYNENGTITDAVDCALDPLSETKCTLKSFTVEKGIYQTSNFRVQPTESIVRFPNITNLCPFGEVFNATRFASVYAWNRKRISNCVADYSVLYNSASFSTFKCYGVSPTKLNDLCFTNVYADSFVIRGDEVRQIAPGQTGKIADYNYKLPDDFTGCVIAWNSNNLDSKVGGNYNYLYRLFRKSNLKPFERDISTEIYQAGSTPCNGVEGFNCYFPLQSYGFQPTNGVGYQPYRVVVLSFELLHAPATVCGPKKSTNLVKNKCVNFNFNGLTGTGVLTESNKKFLPFQQFGRDIADTTDAVRDPQTLEILDITPCSFGGVSVITPGTNTSNQVAVLYQGVNCTEVPVAIHADQLTPTWRVYSTGSNVFQTRAGCLIGAEHVNNSYECDIPIGAGICASYQTQTNSPRRARSVASQSIIAYTMSLGAENSVAYSNNSIAICTNFTISVTTEILPVSMTKTSVDCTMYICGDSTECSNLLLQYGSFCTQLNRALTGIAVEQDKNTQEVFAQVKQIYKTPPIKDFGGFNFSQILPDPSKPSKRSFIEDLLFNKVTLADAGFIKQYGDCLGDIAARDLICAQKFNGLTVLPPLLTDEMIAQYTSALLAGTITSGWTFGAGAALQIPFAMQMAYRFNGIGVTQNVLYENQKLIANQFNSAIGKIQDSLSSTASALGKLQDVVNQNAQALNTLVKQLSSNFGAISSVLNDILSRLDKVEAEVQIDRLITGRLQSLQTYVTQQLIRAAEIRASANLAATKMSECVLGQSKRVDFCGKGYHLMSFPQSAPHGVVFLHVTYVCAQEKNFTTAPAICHDGKAHFPREGVFVSNGTHWFVTQRNFYEPQIITTDNTFVSGNCDVVIGIVNNTVYDPLQPELDSFKEELDKYFKNHTSPDVDLGDISGINASVVNIQKEIDRLNEVAKNLNESLIDLQELGKYEQYIKGGSGYIPEAPRDGQAYVRKDGEWVLLSTFL

SEQ ID NO: 6145 - protein, 1241 aa, Artificial Sequence
  SARS-CoV-2/Belgium/ULG-6939/2020__EPI_ISL_417020 spike protein (1-1211)(P715C_P1069C) Foldon construct
MFVFLVLLPLVSSQCVNLTTRTQLPPAYTNSFTRGVYYPDKVFRSSVLHSTQDLFLPFFSNVTWFHAIHVSGTNGTKRFDNPVLPFNDGVYFASTEKSNIIRGWIFGTTLDSKTQSLLIVNNATNVVIKVCEFQFCNDPFLGVYYHKNNKSWMESEFRVYSSANNCTFEYVSQPFLMDLEGKQGNFKNLREFVFKNIDGYFKIYSKHTPINLVRDLPQGFSALEPLVDLPIGINITRFQTLLALHRSYLTPGDSSSGWTAGAAAYYVGYLQPRTFLLKYNENGTITDAVDCALDPLSETKCTLKSFTVEKGIYQTSNFRVQPTESIVRFPNITNLCPFGEVFNATRFASVYAWNRKRISNCVADYSVLYNSASFSTFKCYGVSPTKLNDLCFTNVYADSFVIRGDEVRQIAPGQTGKIADYNYKLPDDFTGCVIAWNSNNLDSKVGGNYNYLYRLFRKSNLKPFERDISTEIYQAGSTPCNGVEGFNCYFPLQSYGFQPTNGVGYQPYRVVVLSFELLHAPATVCGPKKSTNLVKNKCVNFNFNGLTGTGVLTESNKKFLPFQQFGRDIADTTDAVRDPQTLEILDITPCSFGGVSVITPGTNTSNQVAVLYQGVNCTEVPVAIHADQLTPTWRVYSTGSNVFQTRAGCLIGAEHVNNSYECDIPIGAGICASYQTQTNSPRRARSVASQSIIAYTMSLGAENSVVYSNNSIAICTNFTISVTTEILPVSMTKTSVDCTMYICGDSTECSNLLLQYGSFCTQLNRALTGIAVEQDKNTQEVFAQVKQIYKTPPIKDFGGFNFSQILPDPSKPSKRSFIEDLLFNKVTLADAGFIKQYGDCLGDIAARDLICAQKFNGLTVLPPLLTDEMIAQYTSALLAGTITSGWTFGAGAALQIPFAMQMAYRFNGIGVTQNVLYENQKLIANQFNSAIGKIQDSLSSTASALGKLQDVVNQNAQALNTLVKQLSSNFGAISSVLNDILSRLDKVEAEVQIDRLITGRLQSLQTYVTQQLIRAAEIRASANLAATKMSECVLGQSKRVDFCGKGYHLMSFPQSAPHGVVFLHVTYVCAQEKNFTTAPAICHDGKAHFPREGVFVSNGTHWFVTQRNFYEPQIITTDNTFVSGNCDVVIGIVNNTVYDPLQPELDSFKEELDKYFKNHTSPDVDLGDISGINASVVNIQKEIDRLNEVAKNLNESLIDLQELGKYEQYIKGGSGYIPEAPRDGQAYVRKDGEWVLLSTFL

SEQ ID NO: 6146 - protein, 1241 aa, Artificial Sequence
  SARS-CoV-2/France/HF2496/2020__EPI_ISL_418231 spike protein (1-1211)(P715C_P1069C) Foldon construct
MFVFLVLLPLVSSQCVNLTTRTQLPPAYTNSFTRGVYYPDKVFRSSVLHSTQDLFLPFFSNVTWFHAIHVSGTNGTKRFDNPVLPFNDGVYFASTEKSNIIRGWIFGTTLDSKTQSLLIVNNATNVVIKVCEFQFCNDPFLGVYYHKNNKSWMESEFRVYSSANNCTFEYVSQPFLMDLEGKQGNFKNLREFVFKNIDGYFKIYSKHTPINLVRDLPQGFSALEPLVDLPIGINITRFQTLLALHRSYLTPGDSSSGWTAGAAAYYVGYLQPRTFLLKYNENGTITDAVDCALDPLSETKCTLKSFTVEKGIYQTSNFRVQPTESIVRFPNITNLCPFGEVFNATRFASVYAWNRKRISNCVADYSVLYNSASFSTFKCYGVSPTKLNDLCFTNVYADSFVIRGDEVRQIAPGQTGKIADYNYKLPDDFTGCVIAWNSNNLDSKVGGNYNYLYRLFRKSNLKPFERDISTEIYQAGSTPCNGVEGFNCYFPLQSYGFQPTNGVGYQPYRVVVLSFELLHAPATVCGPKKSTNLVKNKCVNFNFNGLTGTGVLTESNKKFLPFQQFGRDIADTTDAVRDPQTLEILDITPCSFGGVSVITPGTNTSNQVAVLYQGVNCTEVPVAIHADQLTPTWRVYSTGSNVFQTRAGCLIGAEHVNNSYECDIPIGAGICASYQTQTNSPRRARSVASQSIIAYTMSLGAENSVAYSNNSIAICTNFTISVTTEILPVSMTKTSVDCTMYICGDSTECSNLLLQYGSFCTQLNRALTGIAVEQDKNTQEVFAQVKQIYKTPPIKDFGGFNFSQILPDPSKPSKRSFIEDLLFNKVTLADAGFIKQYGDCLGDIVARDLICAQKFNGLTVLPPLLTDEMIAQYTSALLAGTITSGWTFGAGAALQIPFAMQMAYRFNGIGVTQNVLYENQKLIANQFNSAIGKIQDSLSSTASALGKLQDVVNQNAQALNTLVKQLSSNFGAISSVLNDILSRLDKVEAEVQIDRLITGRLQSLQTYVTQQLIRAAEIRASANLAATKMSECVLGQSKRVDFCGKGYHLMSFPQSAPHGVVFLHVTYVCAQEKNFTTAPAICHDGKAHFPREGVFVSNGTHWFVTQRNFYEPQIITTDNTFVSGNCDVVIGIVNNTVYDPLQPELDSFKEELDKYFKNHTSPDVDLGDISGINASVVNIQKEIDRLNEVAKNLNESLIDLQELGKYEQYIKGGSGYIPEAPRDGQAYVRKDGEWVLLSTFL

SEQ ID NO: 6147 - protein, 1241 aa, Artificial Sequence
  SARS-CoV-2/USA/WA-UW291/2020__EPI_ISL_418076 spike protein (1-1211)(P715C_P1069C) Foldon construct
MFVFLVLLPLVSSQCVNLTTRTQLPPAYTNSFTRGVYYPDKVFRSSVLHSTQDLFLPFFSNVTWFHAIHVSGTNGTKRFDNPVLPFNDGVYFASTEKSNIIRGWIFGTTLDSKTQSLLIVNNATNVVIKVCEFQFCNDPFLGVYYHKNNKSWMESEFRVYSSANNCTFEYVSQPFLMDLEGKQGNFKNLREFVFKNIDGYFKIYSKHTPINLVRDLPQGFSALEPLVDLPIGINITRFQTLLALHRSYLTPGDSSSGWTAGAAAYYVGYLQPRTFLLKYNENGTITDAVDCALDPLSETKCTLKSFTVEKGIYQTSNFRVQPTESIVRFPNITNLCPFGEVFNATRFASVYAWNRKRISNCVADYSVLYNSASFSTFKCYGVSPTKLNDLCFTNVYADSFVIRGDEVRQIAPGQTGKIADYNYKLPDDFTGCVIAWNSNNLDSKVGGNYNYLYRLFRKSNLKPFERDISTEIYQAGSTPCNGVEGFNCYFPLQSYGFQPTNGVGYQPYRVVVLSFELLHAPATVCGPKKSTNLVKNKCVNFNFNGLTGTGVLTESNKKFLPFQQFGRDIADTTDAVRDPQTLEILDITPCSFGGVSVITPGTNTSNQVAVLYQGVNCTEVPVAIHADQLTPTWRVYSTGSNVFQTRAGCLIGAEHVNNSYECDIPIGAGICASYQTQTNSPRRARSVASQSIIAYTMSLGAENSVAYSNNSIAICTNFTISVTTEILPVSMTKTSVDCTMYICGDSTECSNLLLQYGSFCTQLNRALTGIAVEQDKNTQEVFAQVKQIYKTPPIKDFGGFNFSQILPDPSKPSKRSFIEDLLFNKVTLADAGFIKQYGDCLGDIAARDLICAQKFNGLTVLPPLLTDEMIAQYTSALLAGTITSGWTFGAGAALQIPFAMQMAYRFNGIGVTQNVLYENQKLIANQFNSAIGKIQYSLSSTASALGKLQDVVNQNAQALNTLVKQLSSNFGAISSVLNDILSRLDKVEAEVQIDRLITGRLQSLQTYVTQQLIRAAEIRASANLAATKMSECVLGQSKRVDFCGKGYHLMSFPQSAPHGVVFLHVTYVCAQEKNFTTAPAICHDGKAHFPREGVFVSNGTHWFVTQRNFYEPQIITTDNTFVSGNCDVVIGIVNNTVYDPLQPELDSFKEELDKYFKNHTSPDVDLGDISGINASVVNIQKEIDRLNEVAKNLNESLIDLQELGKYEQYIKGGSGYIPEAPRDGQAYVRKDGEWVLLSTFL

SEQ ID NO: 6148 - protein, 1241 aa, Artificial Sequence; identical to SEQ ID NO: 6111
  SARS-CoV-2/Portugal/PT0034/2020__EPI_ISL_418019 spike protein (1-1211)(P715C_P1069C) Foldon construct

SEQ ID NO: 6149 - protein, 1241 aa, Artificial Sequence
  SARS-CoV-2/Iceland/202/2020__EPI_ISL_417750 spike protein (1-1211)(P715C_P1069C) Foldon construct
MFVFLVLLPLVSSQCVNLTTRTQLPPAYTNSFTRGVYYPDKVFRSSVLHSTQDLFLPFFSNVTWFHAIHVSGTNGTKRFDNPVLPFNDGVYFASTEKSNIIRGWIFGTTLDSKTQSLLIVNNATNVVIKVCEFQFCNDPFLGVYYHKNNKSWMESEFRVYSSANNCTFEYVSQPFLMDLEGKQGNFKNLREFVFKNIDGYFKIYSKHTPINLVRDLPQGFSALEPLVDLPIGINITRFQTLLALHRSYLTPGDSSSGWTAGAAAYYVGYLQPRTFLLKYNENGTITDAVDCALDPLSETKCTLKSFTVEKGIYQTSNFRVQPTESIVRFPNITNLCPFGEVFNATRFASVYAWNRKRISNCVADYSVLYNSASFSTFKCYGVSPTKLNDLCFTNVYADSFVIRGDEVRQIAPGQTGKIADYNYKLPDDFTGCVIAWNSNNLDSKVGGNYNYLYRLFRKSNLKPFERDISTEIYQAGSTPCNGVEGFNCYFPLQSYGFQPTNGVGYQPYRVVVLSFELLHAPATVCGPKKSTNLVKNKCVNFNFNGLTGTGVLTESNKKFLPFQQFGRDIADTTDAVRDPQTLEILDITPCSFGGVSVITPGTNTSNQVAVLYQDVNCTEVPVAIHADQLTPTWRVYSTGSNVFQTRAGCLIGAEHVNNSYECDIPIGAGICASYQTQTNSPRRARSVASQSIIAYTMSLGAENSVAYSNNSIAICTNFTISVTTEILPVSMTKTSVDCTMYICGDSTECSNLLLQYGSFCTQLNRALTGIAVEQDKNTQEVFAQVKQIYKTPPIKDFGGFNFSQILPDPSKPSKRSFIEDLLFNKVTLADAGFIKQYGDCLGDIAARDLICAQKFNGLTVLPPLLTDEMIAQYTSALLAGTITSGWTFGAGAALQIPFAMQMAYRFNGIGVTQNVLYENQKLIANQFNSAIGKIQDSLSSTASALGKLQDVVNQNAQALNTLVKQLSSNFGAISSVLNDILSRLDKVEAEVQIDRLITGRLQSLQTYVTQQLIRAAEIRASANLAATKMSECVLGQSKRVDFCGKGYHLMSFPQSAPHGVVFLHVTYVCAQEKNFTTAPAICHDGKAHFPREGVFVSNGTHWFVTQRNFYEPQIITTDNTFVSGNCDVVIGIVNNTVYDPLQPELDSFKEELDKYFKNHTSPDVDLGDIPGINASVVNIQKEIDRLNEVAKNLNESLIDLQELGKYEQYIKGGSGYIPEAPRDGQAYVRKDGEWVLLSTFL

SEQ ID NO: 6150 - protein, 1241 aa, Artificial Sequence
  SARS-CoV-2/USA/WA-UW261/2020__EPI_ISL_418046 spike protein (1-1211)(P715C_P1069C) Foldon construct
MFVFLVLLPLVSSQCVNLTTRTQLPPAYTNSFTRGVYYPDKVFRSSVLHSTQDLFLPFFSNVTWFHAIHVSGTNGTKRFDNPVLPFNDGVYFASTEKSNIIRGWIFGTTLDSKTQSLLIVNNATNVVIKVCEFQFCNDPFLGVYYHKNNKSWMESEFRVYSSANNCTFEYVSQPFLMDLEGKQGNFKNLREFVFKNIDGYFKIYSKHTPINLVRDLPQGFSALEPLVDLPIGINITRFQTLLALHRSYLTPGDSSSGWTAGAAAYYVGYLQPRTFLLKYNENGTITDAVDCALDPLSETKCTLKSFTVEKGIYQTSNFRVQPTESIVRFPNITNLCPFGEVFNATRFTSVYAWNRKRISNCVADYSVLYNSASFSTFKCYGVSPTKLNDLCFTNVYADSFVIRGDEVRQIAPGQTGKIADYNYKLPDDFTGCVIAWNSNNLDSKVGGNYNYLYRLFRKSNLKPFERDISTEIYQAGSTPCNGVEGFNCYFPLQSYGFQPTNGVGYQPYRVVVLSFELLHAPATVCGPKKSTNLVKNKCVNFNFNGLTGTGVLTESNKKFLPFQQFGRDIADTTDAVRDPQTLEILDITPCSFGGVSVITPGTNTSNQVAVLYQDVNCTEVPVAIHADQLTPTWRVYSTGSNVFQTRAGCLIGAEHVNNSYECDIPIGAGICASYQTQTNSPRRARSVASQSIIAYTMSLGAENSVAYSNNSIAICTNFTISVTTEILPVSMTKTSVDCTMYICGDSTECSNLLLQYGSFCTQLNRALTGIAVEQDKNTQEVFAQVKQIYKTPPIKDFGGFNFSQILPDPSKPSKRSFIEDLLFNKVTLADAGFIKQYGDCLGDIAARDLICAQKFNGLTVLPPLLTDEMIAQYTSALLAGTITSGWTFGAGAALQIPFAMQMAYRFNGIGVTQNVLYENQKLIANQFNSAIGKIQDSLSSTASALGKLQDVVNQNAQALNTLVKQLSSNFGAISSVLNDILSRLDKVEAEVQIDRLITGRLQSLQTYVTQQLIRAAEIRASANLAATKMSECVLGQSKRVDFCGKGYHLMSFPQSAPHGVVFLHVTYVCAQEKNFTTAPAICHDGKAHFPREGVFVSNGTHWFVTQRNFYEPQIITTDNTFVSGNCDVVIGIVNNTVYDPLQPELDSFKEELDKYFKNHTSPDVDLGDISGINASVVNIQKEIDRLNEVAKNLNESLIDLQELGKYEQYIKGGSGYIPEAPRDGQAYVRKDGEWVLLSTFL

SEQ ID NO: 6151 - protein, 1241 aa, Artificial Sequence
  SARS-CoV-2/Portugal/PT0035/2020__EPI_ISL_418020 spike protein (1-1211)(P715C_P1069C) Foldon construct
MFVFLVLLPLVSSQCVNLTTRTQLPPAYTNSFTRGVYYPDKVFRSSVLHSTQDLFLPFFSNVTWFHAIHVSGTNGTKRFDNPVLPFNDGVYFASTEKSNIIRGWIFGTTLDSKTQSLLIVNNATNVVIKVCEFQFCNDPFLGVYYHKNNKSWMESEFRVYSSANNCTFEYVSQPFLMDLEGKQGNFKNLREFVFKNIDGYFKIYSKHTPINLVRDLPQGFSALEPLVDLPIGINITRFQTLLALHRSYLTPGDSSSGWTAGAAAYYVGYLQPRTFLLKYNENGTITDAVDCALDPLSETKCTLKSFTVEKGIYQTSNFRVQPTESIVRFPNITNLCPFGEVFNATRFASVYAWNRKRISNCVADYSVLYNSASFSTFKCYGVSPTKLNDLCFTNVYADSFVIRGDEVRQIAPGQTGKIADYNYKLPDDFTGCVIAWNSNNLDSKVGGNYNYLYRLFRKSNLKPFERDISTEIYQAGSTPCNGVEGFNCYFPLQSYGFQPTNGVGYQPYRVVVLSFELLHAPATVCGPKKSTNLVKNKCVNFNFNGLTGTGVLTESNKKFLPFQQFGRDIADTTDAVRDPQTLEILDITPCSFGGVSVITPGTNTSNQVAVLYQDVNCTEVPVAIHADQLTPTWRVYSTGSNVFQTRAGCLIGAEHVNNSYECDIPIGAGICASYQTQTNSPRRARSVASQSIIAYTMSLGAENSVAYSNNSIAICTNFTISVTTEILPVSMTKTSVDCTMYICGDSTECSNLLLQYGSFCTQLNRALTGIAVEQDKNTQEVFAQVKQIYKTPPIKDFGGFNFSQILPDPSKPSKRSFIEDLLFNKVTLADAGFIKQYGDCLGDISARDLICAQKFNGLTVLPPLLTDEMIAQYTSALLAGTITSGWTFGAGAALQIPFAMQMAYRFNGIGVTQNVLYENQKLIANQFNSAIGKIQDSLSSTASALGKLQDVVNQNAQALNTLVKQLSSNFGAISSVLNDILSRLDKVEAEVQIDRLITGRLQSLQTYVTQQLIRAAEIRASANLAATKMSECVLGQSKRVDFCGKGYHLMSFPQSAPHGVVFLHVTYVCAQEKNFTTAPAICHDGKAHFPREGVFVSNGTHWFVTQRNFYEPQIITTDNTFVSGNCDVVIGIVNNTVYDPLQPELDSFKEELDKYFKNHTSPDVDLGDISGINASVVNIQKEIDRLNEVAKNLNESLIDLQELGKYEQYIKGGSGYIPEAPRDGQAYVRKDGEWVLLSTFL

SEQ ID NO: 6152 - protein, 1241 aa, Artificial Sequence
  SARS-CoV-2/USA/NY-NYUMC7/2020__EPI_ISL_418192 spike protein (1-1211)(P715C_P1069C) Foldon construct
MFVFLVLLPLVSSQCVNLTTRTQLPPAYTNSFTRGVYYPDKVFRSSVLHSTQDLFLPFFSNVTWFHAIHVSGTNGTKRFDNPVLPFNDGVYFASTEKSNIIRGWIFGTTLDSKTQSLLIVNNATNVVIKVCEFQFCNDPFLGVYHHKNNKSWMESEFRVYSSANNCTFEYVSQPFLMDLEGKQGNFKNLREFVFKNIDGYFKIYSKHTPINLVRDLPQGFSALEPLVDLPIGINITRFQTLLALHRSYLTPGDSSSGWTAGAAAYYVGYLQPRTFLLKYNENGTITDAVDCALDPLSETKCTLKSFTVEKGIYQTSNFRVQPTESIVRFPNITNLCPFGEVFNATRFASVYAWNRKRISNCVADYSVLYNSASFSTFKCYGVSPTKLNDLCFTNVYADSFVIRGDEVRQIAPGQTGKIADYNYKLPDDFTGCVIAWNSNNLDSKVGGNYNYLYRLFRKSNLKPFERDISTEIYQAGSTPCNGVEGFNCYFPLQSYGFQPTNGVGYQPYRVVVLSFELLHAPATVCGPKKSTNLVKNKCVNFNFNGLTGTGVLTESNKKFLPFQQFGRDIADTTDAVRDPQTLEILDITPCSFGGVSVITPGTNTSNQVAVLYQGVNCTEVPVAIHADQLTPTWRVYSTGSNVFQTRAGCLIGAEHVNNSYECDIPIGAGICASYQTQTNSPRRARSVASQSIIAYTMSLGAENSVAYSNNSIAICTNFTISVTTEILPVSMTKTSVDCTMYICGDSTECSNLLLQYGSFCTQLNRALTGIAVEQDKNTQEVFAQVKQIYKTPPIKDFGGFNFSQILPDPSKPSKRSFIEDLLFNKVTLADAGFIKQYGDCLGDIAARDLICAQKFNGLTVLPPLLTDEMIAQYTSALLAGTITSGWTFGAGAALQIPFAMQMAYRFNGIGVTQNVLYENQKLIANQFNSAIGKIQDSLSSTASALGKLQDVVNQNAQALNTLVKQLSSNFGAISSVLNDILSRLDKVEAEVQIDRLITGRLQSLQTYVTQQLIRAAEIRASANLAATKMSECVLGQSKRVDFCGKGYHLMSFPQSAPHGVVFLHVTYVCAQEKNFTTAPAICHDGKAHFPREGVFVSNGTHWFVTQRNFYEPQIITTDNTFVSGNCDVVIGIVNNTVYDPLQPELDSFKEELDKYFKNHTSPDVDLGDISGINASVVNIQKEIDRLNEVAKNLNESLIDLQELGKYEQYIKGGSGYIPEAPRDGQAYVRKDGEWVLLSTFL

SEQ ID NO: 6153 - protein, 1241 aa, Artificial Sequence
  SARS-CoV-2/Iceland/189/2020__EPI_ISL_417709 spike protein (1-1211)(P715C_P1069C) Foldon construct
MFVFLVLLPLVSSQCVNLTTRTQLPPAYTNSFTRGVYYPDKVFRSSVLHSTQDLFLPFFSNVTWFHAIHVSGTNGTKRFDNPVLPFNDGVYFASTEKSNIIRGWIFGTTLDSKTQSLLIVNNATNVVIKVCEFQFCNDPFLGVYYHKNNKSWMESEFRVYSSANNCTFEYVSQPFLMDLEGKQGNFKNLREFVFKNIDGYFKIYSKHTPINLVRDLPQGFSALEPLVDLPIGINITRFQTLLALHRSYLTPGDSSSGWTAGAAAYYVGYLQPRTFLLKYNENGTITDAVDCALDPLSETKCTLKSFTVEKGIYQTSNFRVQPTESIVRFPNITNLCPFGEVFNATRFASVYAWNRKRISNCVADYSVLYNSASFSTFKCYGVSPTKLNDLCFTNVYADSFVIRGDEVRQIAPGQTGKIADYNYKLPDDFTGCVIAWNSNNLDSKVGGNYNYLYRLFRKSNLKPFERDISTEIYQAGSTPCNGVEGFNCYFPLQSYGFQPTNGVGYQPYRVVVLSFELLHAPATVCGPKKSTNLVKNKCVNFNFNGLTGTGVLTESNKKFLPFQQFGRDIADTTDAVRDPQTLEILDITPCSFGGVSVITPGTNTSNQVAVLYQGVNCTEVPVAIHADQLTPTWRVYSTGSNVFQTRAGCLIGAEHVNNSYECDIPIGAGICASYQTQTNSPRRARSVASQSIIAYTMSLGAENSVAYSNNSIAICTNFTISVTTEILPVSMTKTSVDCTMYICGDSTECSNLLLQYGSFCTQLNRALTGIAVEQDKNTQEVFAQVKQIYKTPPIKDFGGFNFSQILPDPSKPSKRSFIEDLLFNKVTLADAGFTKQYGDCLGDIAARDLICAQKFNGLTVLPPLLTDEMIAQYTSALLAGTITSGWTFGAGAALQIPFAMQMAYRFNGIGVTQNVLYENQKLIANQFNSAIGKIQDSLSSTASALGKLQDVVNQNAQALNTLVKQLSSNFGAISSVLNDILSRLDKVEAEVQIDRLITGRLQSLQTYVTQQLIRAAEIRASANLAATKMSECVLGQSKRVDFCGKGYHLMSFPQSAPHGVVFLHVTYVCAQEKNFTTAPAICHDGKAHFPREGVFVSNGTHWFVTQRNFYEPQIITTDNTFVSGNCDVVIGIVNNTVYDPLQPELDSFKEELDKYFKNHTSPDVDLGDISGINASVVNIQKEIDRLNEVAKNLNESLIDLQELGKYEQYIKGGSGYIPEAPRDGQAYVRKDGEWVLLSTFL

SEQ ID NO: 6154 - protein, 1241 aa, Artificial Sequence
  SARS-CoV-2/Australia/NSW56/2020__EPI_ISL_417408 spike protein (1-1211)(P715C_P1069C) Foldon construct
MFVFLVLLPLVSSQCVNLTTRTQLPPAYTNSFTRGVYYPDKVFRSSVLHSTQDLFLPFFSNVTWFHAIHVSGTNGTKRFDNPVLPFNDGVYFASTEKSNIIRGWIFGTTLDSKTQSLLIVNNATNVVIKVCEFQFCNDPFLGVYYHKNNKSWMESEFRVYSSANNCTFEYVSQPFLMDLEGKQGNFKNLREFVFKNIDGYFKIYSKHTPINLVRDLPQGFSALEPLVDLPIGINITRFQTLLALHRSYLTPGDSSSGWTAGAAAYYVGYLQPRTFLLKYNENGTITDAVDCALDPLSETKCTLKSFTVEKGIYQTSNFRVQPTESIVRFPNITNLCPFGEVFNATRFASVYAWNRKRISNCVADYSVLYNSASFSTFKCYGVSPTKLNDLCFTNVYADSFVIRGDEVRQIAPGQTGKIADYNYKLPDDFTGCVIAWNSNNLDSKVGGNYNYLYRLFRKSNLKPFERDISTEIYQAGSTPCNGVEGFNCYFPLQSYGFQPTNGVGYQPYRVVVLSFELLHAPATVCGPKKSTNLVKNKCVNFNFNGLTGTGVLTESNKKFLPFQQFGRDIADTTDAVRDPQTLEILDITPCSFGGVSVITPGTNTSNQVAVLYQDVNCTEVPVAIHADQLTPTWRVYSTGSNVFQTRAGCLIGAEHVNNSYECDIPIGAGICASYQTQTNSPRRARSVASQSIIAYTMSLGAENSVAYSNNSIAICTNFTISVTTEILPVSMTKTSVDCTMYICGDSTECSNLLLQYGSFCTQLNRALTGIAVEQDKNTQEVFAQVKQIYKTPPIKDFGGFNFSQILPDSSKPSKRSFIEDLLFNKVTLADAGFIKQYGDCLGDIAARDLICAQKFNGLTVLPPLLTDEMIAQYTSALLAGTITSGWTFGAGAALQIPFAMQMAYRFNGIGVTQNVLYENQKLIANQFNSAIGKIQDSLSSTASALGKLQDVVNQNAQALNTLVKQLSSNFGAISSVLNDILSRLDKVEAEVQIDRLITGRLQSLQTYVTQQLIRAAEIRASANLAATKMSECVLGQSKRVDFCGKGYHLMSFPQSAPHGVVFLHVTYVCAQEKNFTTAPAICHDGKAHFPREGVFVSNGTHWFVTQRNFYEPQIITTDNTFVSGNCDVVIGIVNNTVYDPLQPELDSFKEELDKYFKNHTSPDVDLGDISGINASVVNIQKEIDRLNEVAKNLNESLIDLQELGKYEQYIKGGSGYIPEAPRDGQAYVRKDGEWVLLSTFL

SEQ ID NO: 6155 - protein, 1241 aa, Artificial Sequence
  SARS-CoV-2/Iceland/280/2020__EPI_ISL_417608 spike protein (1-1211)(P715C_P1069C) Foldon construct
MFVFLVLLPLVSSQCVNLTTRTQLPPAYTNSFTRGVYYPDKVFRSSVLHSTQDLFLPFFSNVTWFHAIHVSGTNGTKRFDNPVLPFNDGVYFASTEKSNIIRGWIFGTTLDSKTQSLLIVNNATNVVIKVCEFQFCNDPFLGVYYHKNNKSWMESEFRVYSSANNCTFEYVSQPFLMDLEGKQGNFKNLREFVFKNIDGYFKIYSKHTPINLVRDLPQGFSALEPLVDLPIGINITRFQTLLALHRSYLTPGDSSSGWTAGAAAYYVGYLQPRTFLLKYNENGTITDAVDCALDPLSETKCTLKSFTVEKGIYQTSNFRVQPTESIVRFPNITNLCPFGEVFNATRFASVYAWNRKRISNCVADYSVLYNSASFSTFKCYGVSPTKLNDLCFTNVYADSFVIRGDEVRQIAPGQTGKIADYNYKLPDDFTGCVIAWNSNNLDSKVGGNYNYLYRLFRKSNLKPFERDISTEIYQAGSTPCNGVEGFNCYFPLQSYGFQPTNGVGYQPYRVVVLSFELLHAPATVCGPKKSTNLVKNKCVNFNFNGLTGTGVLTESNKKFLPFQQFGRDIADTTDAVRDPQTLEILDITPCSFGGVSVITPGTNTSNQVAVLYQGVNCTEVPVAIHADQLTPTWRVYSTGSNVFQTRAGCLIGAEHVNNSYECDIPIGAGICASYHTQTNSPRRARSVASQSIIAYTMSLGAENSVAYSNNSIAICTNFTISVTTEILPVSMTKTSVDCTMYICGDSTECSNLLLQYGSFCTQLNRALTGIAVEQDKNTQEVFAQVKQIYKTPPIKDFGGFNFSQILPDPSKPSKRSFIEDLLFNKVTLADAGFIKQYGDCLGDIAARDLICAQKFNGLTVLPPLLTDEMIAQYTSALLAGTITSGWTFGAGAALQIPFAMQMAYRFNGIGVTQNVLYENQKLIANQFNSAIGKIQDSLSSTASALGKLQDVVNQNAQALNTLVKQLSSNFGAISSVLNDILSRLDKVEAEVQIDRLITGRLQSLQTYVTQQLIRAAEIRASANLAATKMSECVLGQSKRVDFCGKGYHLMSFPQSAPHGVVFLHVTYVCAQEKNFTTAPAICHDGKAHFPREGVFVSNGTHWFVTQRNFYEPQIITTDNTFVSGNCDVVIGIVNNTVYDPLQPELDSFKEELDKYFKNHTSPDVDLGDISGINASVVNIQKEIDRLNEVAKNLNESLIDLQELGKYEQYIKGGSGYIPEAPRDGQAYVRKDGEWVLLSTFL

SEQ ID NO: 6156 - protein, 1241 aa, Artificial Sequence; identical to SEQ ID NO: 6111
  SARS-CoV-2/Iceland/247/2020__EPI_ISL_417575 spike protein (1-1211)(P715C_P1069C) Foldon construct

SEQ ID NO: 6157 - protein, 1241 aa, Artificial Sequence
  SARS-CoV-2/Iceland/238/2020__EPI_ISL_417566 spike protein (1-1211)(P715C_P1069C) Foldon construct
MFVFLVLLPLVSSQCVNLTTRTQLPPAYTNSFTRGVYYPDKVFRSSVLHSTQDLFLPFFSNVTWFHAIHVSGTNGTKRFDNPVLPFNDGVYFASTEKSNIIRGWIFGTTLDSKTQSLLIVNNATNVVIKVCEFQFCNDPFLGVYYHKNNKSWMESEFRVYSSANNCTFEYVSQPFLMDLEGKQGNFKNLREFVFKNIDGYFKIYSKHTPINLVRDLPQGFSALEPLVDLPIGINITRFQTLLALHRSYLTPGDSSSGWTAGAAAYYVGYLQPRTFLLKYNENGTITDAVDCALDPLSETKCTLKSFTVEKGIYQTSNFRVQPTESIVRFPNITNLCPFGEVFNATRFASVYAWNRKRISNCVADYSVLYNSASFSTFKCYGVSPTKLNDLCFTNVYADSFVIRGDEVRQIAPGQTGKIADYNYKLPDDFTGCVIAWNSNNLDSKVGGNYNYLYRLFRKSNLKPFERDISTEIYQAGSTPCNGVEGFNCYFPLQSYGFQPTNGVGYQPYRVVVLSFELLHAPATVCGPKKSTNLVKNKCVNFNFNGLTGTGVLTESNKKFLPFQQFGRDIADTTDAVRDPQTLEILDITPCSFGGVSVITPGTNTSNQVAVLYQGVNCTEVPVAIHADQLTPTWRVYSTGSNVFQTRAGCLIGAEHVNNSYECDIPIGAGICASYQTQTNSPRRARSVASQSIIAYTMSLGAENSVAYSNNSIAICTNFTISVTTEILPVSMTKTSVDCTMYICGDSTECSNLLLQYGSFCTQLNRALTGIAVEQDKNTQEVFAQVKQIYKTPPIKDFGGFNFSQILPDPSKPSKRSFIEDLLFNKVTLADVGFIKQYGDCLGDIAARDLICAQKFNGLTVLPPLLTDEMIAQYTSALLAGTITSGWTFGAGAALQIPFAMQMAYRFNGIGVTQNVLYENQKLIANQFNSAIGKIQDSLSSTASALGKLQDVVNQNAQALNTLVKQLSSNFGAISSVLNDILSRLDKVEAEVQIDRLITGRLQSLQTYVTQQLIRAAEIRASANLAATKMSECVLGQSKRVDFCGKGYHLMSFPQSAPHGVVFLHVTYVCAQEKNFTTAPAICHDGKAHFPREGVFVSNGTHWFVTQRNFYEPQIITTDNTFVSGNCDVVIGIVNNTVYDPLQPELDSFKEELDKYFKNHTSPDVDLGDISGINASVVNIQKEIDRLNEVAKNLNESLIDLQELGKYEQYIKGGSGYIPEAPRDGQAYVRKDGEWVLLSTFL

SEQ ID NO: 6158 - protein, 1241 aa, Artificial Sequence
  SARS-CoV-2/Greece/16/2020__EPI_ISL_418265 spike protein (1-1211)(P715C_P1069C) Foldon construct
MFVFLVLLPLVSSQCVNLTTRTQLPPAYTNSFTRGVYYPDKVFRSSVLHSTQDLFLPFFSNVTWFHAIHVSGTNGTKRFDNPVLPFNDGVYFASTEKSNIIRGWIFGTTLDSKTQSLLIVNNATNVVIKVCEFQFCNDPFLGVYYHKNNKSWMESEFRVYSSANNCTFEYVSQPFLMDLEGKQGNFKNLREFVFKNVDGYFKIYSKHTPINLVRDLPQGFSALEPLVDLPIGINITRFQTLLALHRSYLTPGDSSSGWTAGAAAYYVGYLQPRTFLLKYNENGTITDAVDCALDPLSETKCTLKSFTVEKGIYQTSNFRVQPTESIVRFPNITNLCPFGEVFNATRFASVYAWNRKRISNCVADYSVLYNSASFSTFKCYGVSPTKLNDLCFTNVYADSFVIRGDEVRQIAPGQTGKIADYNYKLPDDFTGCVIAWNSNNLDSKVGGNYNYLYRLFRKSNLKPFERDISTEIYQAGSTPCNGVEGFNCYFPLQSYGFQPTNGVGYQPYRVVVLSFELLHAPATVCGPKKSTNLVKNKCVNFNFNGLTGTGVLTESNKKFLPFQQFGRDIADTTDAVRDPQTLEILDITPCSFGGVSVITPGTNTSNQVAVLYQDVNCTEVPVAIHADQLTPTWRVYSTGSNVFQTRAGCLIGAEHVNNSYECDIPIGAGICASYQTQTNSPRRARSVASQSIIAYTMSLGAENSVAYSNNSIAICTNFTISVTTEILPVSMTKTSVDCTMYICGDSTECSNLLLQYGSFCTQLNRALTGIAVEQDKNTQEVFAQVKQIYKTPPIKDFGGFNFSQILPDPSKPSKRSFIEDLLFNKVTLADAGFIKQYGDCLGDIAARDLICAQKFNGLTVLPPLLTDEMIAQYTSALLAGTITSGWTFGAGAALQIPFAMQMAYRFNGIGVTQNVLYENQKLIANQFNSAIGKIQDSLSSTASALGKLQDVVNQNAQALNTLVKQLSSNFGAISSVLNDILSRLDKVEAEVQIDRLITGRLQSLQTYVTQQLIRAAEIRASANLAATKMSECVLGQSKRVDFCGKGYHLMSFPQSAPHGVVFLHVTYVCAQEKNFTTAPAICHDGKAHFPREGVFVSNGTHWFVTQRNFYEPQIITTDNTFVSGNCDVVIGIVNNTVYDPLQPELDSFKEELDKYFKNHTSPDVDLGDISGINASVVNIQKEIDRLNEVAKNLNESLIDLQELGKYEQYIKGGSGYIPEAPRDGQAYVRKDGEWVLLSTFL

SEQ ID NO: 6159 - protein, 1241 aa, Artificial Sequence
  SARS-CoV-2/Iceland/319/2020__EPI_ISL_417648 spike protein (1-1211)(P715C_P1069C) Foldon construct
MFVFLVLLPLVSSQCVNLTTRTQLPPAYTNSFTRGVYYPDKVFRSSVLHSTQDLFLPFFSNVTWFHAIHVSGTNGTKRFDNPVLPFNDGVYFASTEKSNIIRGWIFGTTLDSKTQSLLIVNNATNVVIKVCEFQFCNDPFLGVYYHKNNKSWMESEFRVYSSANNCTFEYVSQPFLIDLEGKQGNFKNLREFVFKNIDGYFKIYSKHTPINLVRDLPQGFSALEPLVDLPIGINITRFQTLLALHRSYLTPGDSSSGWTAGAAAYYVGYLQPRTFLLKYNENGTITDAVDCALDPLSETKCTLKSFTVEKGIYQTSNFRVQPTESIVRFPNITNLCPFGEVFNATRFASVYAWNRKRISNCVADYSVLYNSASFSTFKCYGVSPTKLNDLCFTNVYADSFVIRGDEVRQIAPGQTGKIADYNYKLPDDFTGCVIAWNSNNLDSKVGGNYNYLYRLFRKSNLKPFERDISTEIYQAGSTPCNGVEGFNCYFPLQSYGFQPTNGVGYQPYRVVVLSFELLHAPATVCGPKKSTNLVKNKCVNFNFNGLTGTGVLTESNKKFLPFQQFGRDIADTTDAVRDPQTLEILDITPCSFGGVSVITPGTNTSNQVAVLYQGVNCTEVPVAIHADQLTPTWRVYSTGSNVFQTRAGCLIGAEHVNNSYECDIPIGAGICASYQTQTNSPRRARSVASQSIIAYTMSLGAENSVAYSNNSIAICTNFTISVTTEILPVSMTKTSVDCTMYICGDSTECSNLLLQYGSFCTQLNRALTGIAVEQDKNTQEVFAQVKQIYKTPPIKDFGGFNFSQILPDPSKPSKRSFIEDLLFNKVTLADAGFIKQYGDCLGDIAARDLICAQKFNGLTVLPPLLTDEMIAQYTSALLAGTITSGWTFGAGAALQIPFAMQMAYRFNGIGVTQNVLYENQKLIANQFNSAIGKIQDSLSSTASALGKLQDVVNQNAQALNTLVKQLSSNFGAISSVLNDILSRLDKVEAEVQIDRLITGRLQSLQTYVTQQLIRAAEIRASANLAATKMSECVLGQSKRVDFCGKGYHLMSFPQSAPHGVVFLHVTYVCAQEKNFTTAPAICHDGKAHFPREGVFVSNGTHWFVTQRNFYEPQIITTDNTFVSGNCDVVIGIVNNTVYDPLQPELDSFKEELDKYFKNHTSPDVDLGDISGINASVVNIQKEIDRLNEVAKNLNESLIDLQELGKYEQYIKGGSGYIPEAPRDGQAYVRKDGEWVLLSTFL

SEQ ID NO: 6160 - protein, 1241 aa, Artificial Sequence
  SARS-CoV-2/Congo/94/2020__EPI_ISL_417947 spike protein (1-1211)(P715C_P1069C) Foldon construct
MFVFLVLLPLVSSQCVNLTTRTQLPPAYTNSFTRGVYYPDKVFRSSVLHSTQDLFLPFFSNVTWFHAIHVSGTNGTKRFDNPVLPFNDGVYFASTEKSNIIRGWIFGTTLDSKTQSLLIVNNATNVVIKVCEFQFCNDPFLGVYYHKNNKSWMESEFRVYSSANNCTFEYVSQPFLMDLEGKQGNFKNLREFVFKNIDGYFKIYSKHTPINLVRDLPQGFSALEPLVDLPIGINITRFQTLLALHRSYLTPGDSSSGWTAGAAAYYVGYLQPRTFLLKYNENGTITDAVDCALDPLSETKCTLKSFTVEKGIYQTSNFRVQPTESIVRFPNITNLCPFGEVFNATRFASVYAWNRKRISNCVADYSVLYNSASFSTFKCYGVSPTKLNDLCFTNVYADSFVIRGDEVRQIAPGQTGKIADYNYKLPDDFTGCVIAWNSNNLDSKVGGNYNYLYRLFRKSNLKPFERDISTEIYQAGSTPCNGVEGFNCYFPLQSYGFQPTNGVGYQPYRVVVLSFELLHAPATVCGPKKSTNLVKNKCVNFNFNGLTGTGVLTESNKKFLPFQQFGRDIADTTDAVRDPQTLEILDITPCSFGGVSVITPGTNTSNQVAVLYQGVNCTEVPVAIHADQLTPTWRVYSTGSNVFQTRAGCLIGAEHVNNSYECDIPIGAGICASYQTQTNSPRRARSVASQSIIAYTMSLGAENSVAYSNNSIAICTNFTISVTTEILPVSMTKTSVDCTMYICGDSTECSNLLLQYGSFCTQLNRALTGIAVEQDKNTQEVFAQVKQIYKTPPIKDFGGFNFSQILPDPSKPSKRSFIEDILFNKVTLADAGFIKQYGDCLGDIAARDLICAQKFNGLTVLPPLLTDEMIAQYTSALLAGTITSGWTFGAGAALQIPFAMQMAYRFNGIGVTQNVLYENQKLIANQFNSAIGKIQDSLSSTASALGKLQDVVNQNAQALNTLVKQLSSNFGAISSVLNDILSRLDKVEAEVQIDRLITGRLQSLQTYVTQQLIRAAEIRASANLAATKMSECVLGQSKRVDFCGKGYHLMSFPQSAPHGVVFLHVTYVCAQEKNFTTAPAICHDGKAHFPREGVFVSNGTHWFVTQRNFYEPQIITTDNTFVSGNCDVVIGIVNNTVYDPLQPELDSFKEELDKYFKNHTSPDVDLGDISGINASVVNIQKEIDRLNEVAKNLNESLIDLQELGKYEQYIKGGSGYIPEAPRDGQAYVRKDGEWVLLSTFL

SEQ ID NO: 6161 - protein, 1241 aa, Artificial Sequence
  SARS-CoV-2/Congo/158/2020__EPI_ISL_417950 spike protein (1-1211)(P715C_P1069C) Foldon construct
MFVFLVLLPLVSSQCVNLTTRTQLPPAYTNSFTRGVYYPDKVFRSSVLHSTQDLFLPFFSNVTWFHAIHVSGTNGTKRFDNPVLPFNDGVYFASTEKSNIIRGWIFGTTLDSKTQSLLIVNNATNVVIKVCEFQFCNDPFLGVYYHKNNKSWMESEFRVYSSANNCTFEYVSQPFLMDLEGKQGNFKNLREFVFKNIDGYFKIYSKHTPINLVRDLPQGFSALEPLVDLPIGINITRFQTLLALHRSYLTPGDSSSGWTAGAAAYYVGYLQPRTFLLKYNENGTITDAVDCALDPLSETKCTLKSFTVEKGIYQTSNFRVQPTESIVRFPNITNLCPFGEVFNATRFASVYAWNRKRISNCVADYSVLYNSASFSTFKCYGVSPTKLNDLCFTNVYADSFVIRGDEVRQIAPGQTGKIADYNYKLPDDFTGCVIAWNSNNLDSKVGGNYNYLYRLFRKSNLKPFERDISTEIYQAGSTPCNGVEGFNCYFPLQSYGFQPTNGVGYQPYRVVVLSFELLHAPATVCGPKKSTNLVKNKCVNFNFNGLTGTGVLTESNKKFLPFQQFGRDIADTTDAVRDPQTLEILDITPCSFGGVSVITPGTNTSNQVAVLYQDVNCTEVPVAIHADQLTPTWRVYSTGSNVFQTRAGCLIGAEHVNNSYECDIPIGAGICASYQTQTNSPRRARSVASQSIIAYTMSLGAENSVAYSNNSIAICTNFTISVTTEILPVSMTKTSVDCTMYICGDSTECSNLLLQYGSFCTQLNRALTGIAVEQDKNTQEVFAQVKQIYKTPPIKDFGGFNFSQILPDPSKPSKRSFIEDLLFNKVTLADAGFIKQYGDCLGDIAARDLICAQKFNGLTVLPPLLTDEMIAQYTSALLAGTITSGWTFGAGAALQIPFAMQMAYRFNGIGVTQNVLYENQKLIANQFNSAIGKIQDSLSSTASALGKLQDVVNQNAQALNTLVKQLSSNFGAISSVLNDILSRLDKVEAEVQIDRLITGRLQSLQTYVTQQLIRAAEIRASANLAATKMSECVLGQSKRVDFCGKGYHLMSFPQSAPHGVVFLHVTYVCAQEKNFTTAPAICHDGKAHFPREGVFVSNGTHWFVTQRNFYEPQIITTDNTFLSGNCDVVIGIVNNTVYDPLQPELDSFKEELDKYFKNHTSPDVDLGDISGINASVVNIQKEIDRLNEVAKNLNESLIDLQELGKYEQYIKGGSGYIPEAPRDGQAYVRKDGEWVLLSTFL

SEQ ID NO: 6162 - protein, 1241 aa, Artificial Sequence
  SARS-CoV-2/USA/UT-00034/2020__EPI_ISL_417977 spike protein (1-1211)(P715C_P1069C) Foldon construct
MFVFLVLLPLVSSQCVNLTTRTQLPPAYTNSFTRGVYYPDKVFRSSVLHSTQDLFLPFFSNVTWFHAIHVSGTNGTKRFDNPVLPFNDGVYFASTEKSNIIRGWIFGTTLDSKTQSLLIVNNATNVVIKVCEFQFCNDPFLGVYYYKNNKSWMESEFRVYSSANNCTFEYVSQPFLMDLEGKQGNFKNLREFVFKNIDGYFKIYSKHTPINLVRDLPQGFSALEPLVDLPIGINITRFQTLLALHRSYLTPGDSSSGWTAGAAAYYVGYLQPRTFLLKYNENGTITDAVDCALDPLSETKCTLKSFTVEKGIYQTSNFRVQPTESIVRFPNITNLCPFGEVFNATRFASVYAWNRKRISNCVADYSVLYNSASFSTFKCYGVSPTKLNDLCFTNVYADSFVIRGDEVRQIAPGQTGKIADYNYKLPDDFTGCVIAWNSNNLDSKVGGNYNYLYRLFRKSNLKPFERDISTEIYQAGSTPCNGVEGFNCYFPLQSYGFQPTNGVGYQPYRVVVLSFELLHAPATVCGPKKSTNLVKNKCVNFNFNGLTGTGVLTESNKKFLPFQQFGRDIADTTDAVRDPQTLEILDITPCSFGGVSVITPGTNTSNQVAVLYQGVNCTEVPVAIHADQLTPTWRVYSTGSNVFQTRAGCLIGAEHVNNSYECDIPIGAGICASYQTQTNSPRRARSVASQSIIAYTMSLGAENSVAYSNNSIAICTNFTISVTTEILPVSMTKTSVDCTMYICGDSTECSNLLLQYGSFCTQLNRALTGIAVEQDKNTQEVFAQVKQIYKTPPIKDFGGFNFSQILPDPSKPSKRSFIEDLLFNKVTLADAGFIKQYGDCLGDIAARDLICAQKFNGLTVLPPLLTDEMIAQYTSALLAGTITSGWTFGAGAALQIPFAMQMAYRFNGIGVTQNVLYENQKLIANQFNSAIGKIQDSLSSTASALGKLQDVVNQNAQALNTLVKQLSSNFGAISSVLNDILSRLDKVEAEVQIDRLITGRLQSLQTYVTQQLIRAAEIRASANLAATKMSECVLGQSKRVDFCGKGYHLMSFPQSAPHGVVFLHVTYVCAQEKNFTTAPAICHDGKAHFPREGVFVSNGTHWFVTQRNFYEPQIITTDNTFVSGNCDVVIGIVNNTVYDPLQPELDSFKEELDKYFKNHTSPDVDLGDISGINASVVNIQKEIDRLNEVAKNLNESLIDLQELGKYEQYIKGGSGYIPEAPRDGQAYVRKDGEWVLLSTFL

SEQ ID NO: 6163 - protein, 1241 aa, Artificial Sequence
  SARS-CoV-2/USA/UT-00033/2020__EPI_ISL_417976 spike protein (1-1211)(P715C_P1069C) Foldon construct
MFVFLVLLPLVSSQCVNLTTRTQLPPAYTNSFTRGVYYPDKVFRSSVLHSTQDLFLPFFSNVTWFHAIHVSGTNGTKRFDNPVLPFNDGVYFASTEKSNIIRGWIFGTTLDSKTQSLLIVNNATNVVIKVCEFQFCNDPFLGVYYHKNNKSWMESEFRVYSSANNCTFEYVSQPFLMDLEGKQGNFKNLREFVFKNIDGYFKIYSKHTPINLVRDLPQGFSALEPLVDLPIGINITRFQTLLALHRSYLTPGDSSSGLTAGAAAYYVGYLQPRTFLLKYNENGTITDAVDCALDPLSETKCTLKSFTVEKGIYQTSNFRVQPTESIVRFPNITNLCPFGEVFNATRFASVYAWNRKRISNCVADYSVLYNSASFSTFKCYGVSPTKLNDLCFTNVYADSFVIRGDEVRQIAPGQTGKIADYNYKLPDDFTGCVIAWNSNNLDSKVGGNYNYLYRLFRKSNLKPFERDISTEIYQAGSTPCNGVEGFNCYFPLQSYGFQPTNGVGYQPYRVVVLSFELLHAPATVCGPKKSTNLVKNKCVNFNFNGLTGTGVLTESNKKFLPFQQFGRDIADTTDAVRDPQTLEILDITPCSFGGVSVITPGTNTSNQVAVLYQGVNCTEVPVAIHADQLTPTWRVYSTGSNVFQTRAGCLIGAEHVNNSYECDIPIGAGICASYQTQTNSPRRARSVASQSIIAYTMSLGAENSVAYSNNSIAICTNFTISVTTEILPVSMTKTSVDCTMYICGDSTECSNLLLQYGSFCTQLNRALTGIAVEQDKNTQEVFAQVKQIYKTPPIKDFGGFNFSQILPDPSKPSKRSFIEDLLFNKVTLADAGFIKQYGDCLGDIAARDLICAQKFNGLTVLPPLLTDEMIAQYTSALLAGTITSGWTFGAGAALQIPFAMQMAYRFNGIGVTQNVLYENQKLIANQFNSAIGKIQDSLSSTASALGKLQDVVNQNAQALNTLVKQLSSNFGAISSVLNDILSRLDKVEAEVQIDRLITGRLQSLQTYVTQQLIRAAEIRASANLAATKMSECVLGQSKRVDFCGKGYHLMSFPQSAPHGVVFLHVTYVCAQEKNFTTAPAICHDGKAHFPREGVFVSNGTHWFVTQRNFYEPQIITTDNTFVSGNCDVVIGIVNNTVYDPLQPELDSFKEELDKYFKNHTSPDVDLGDISGINASVVNIQKEIDRLNEVAKNLNESLIDLQELGKYEQYIKGGSGYIPEAPRDGQAYVRKDGEWVLLSTFL

SEQ ID NO: 6164 - protein, 1241 aa, Artificial Sequence
  SARS-CoV-2/USA/WI-13/2020__EPI_ISL_417516 spike protein (1-1211)(P715C_P1069C) Foldon construct
MFVFLVLLPLVSSQCVNLTTRTQLPPAYTNSFTRGVYYPDKVFRSSVLHSTQDLFLPFFSNVTWFHAIHVSGTNGTKRFDNPVLPFNDGVYFASTEKSNIIRGWIFGTTLDSKTQSLLIVNNATNVVIKVCEFQFCNDPFLGVYYHKNNKSWMESEFRVYSSANNCTFEYVSQPFLMDLEGKQGNFKNLREFVFKNIDGYFKIYSKHTPINLVRDLPQGFSALEPLVDLPIGINITRFQTLLALHRSYLTPGDSSSGWTAGAAAYYVGYLQPRTFLLKYNENGTITDAVDCALDPLSETKCTLKSFTVEKGIYQTSNFRVLPTESIVRFPNITNLCPFGEVFNATRFASVYAWNRKRISNCVADYSVLYNSASFSTFKCYGVSPTKLNDLCFTNVYADSFVIRGDEVRQIAPGQTGKIADYNYKLPDDFTGCVIAWNSNNLDSKVGGNYNYLYRLFRKSNLKPFERDISTEIYQAGSTPCNGVEGFNCYFPLQSYGFQPTNGVGYQPYRVVVLSFELLHAPATVCGPKKSTNLVKNKCVNFNFNGLTGTGVLTESNKKFLPFQQFGRDIADTTDAVRDPQTLEILDITPCSFGGVSVITPGTNTSNQVAVLYQGVNCTEVPVAIHADQLTPTWRVYSTGSNVFQTRAGCLIGAEHVNNSYECDIPIGAGICASYQTQTNSPRRARSVASQSIIAYTMSLGAENSVAYSNNSIAICTNFTISVTTEILPVSMTKTSVDCTMYICGDSTECSNLLLQYGSFCTQLNRALTGIAVEQDKNTQEVFAQVKQIYKTPPIKDFGGFNFSQILPDPSKPSKRSFIEDLLFNKVTLADAGFIKQYGDCLGDIAARDLICAQKFNGLTVLPPLLTDEMIAQYTSALLAGTITSGWTFGAGAALQIPFAMQMAYRFNGIGVTQNVLYENQKLIANQFNSAIGKIQDSLSSTASALGKLQDVVNQNAQALNTLVKQLSSNFGAISSVLNDILSRLDKVEAEVQIDRLITGRLQSLQTYVTQQLIRAAEIRASANLAATKMSECVLGQSKRVDFCGKGYHLMSFPQSAPHGVVFLHVTYVCAQEKNFTTAPAICHDGKAHFPREGVFVSNGTHWFVTQRNFYEPQIITTDNTFVSGNCDVVIGIVNNTVYDPLQPELDSFKEELDKYFKNHTSPDVDLGDISGINASVVNIQKEIDRLNEVAKNLNESLIDLQELGKYEQYIKGGSGYIPEAPRDGQAYVRKDGEWVLLSTFL

SEQ ID NO: 6165 - protein, 1240 aa, Artificial Sequence
  SARS-CoV-2/India/1-27/2020__EPI_ISL_413522 spike protein (1-1210)(P714C_P1068C) Foldon construct
MFVFLVLLPLVSSQCVNLTTRTQLPPAYTNSFTRGVYYPDKVFRSSVLHSTQDLFLPFFSNVTWFHAIHVSGTNGTKRFDNPVLPFNDGVYFASTEKSNIIRGWIFGTTLDSKTQSLLIVNNATNVVIKVCEFQFCNDPFLGVYHKNNKSWMESEFRVYSSANNCTFEYVSQPFLMDLEGKQGNFKNLREFVFKNIDGYFKIYSKHTPINLVRDLPQGFSALEPLVDLPIGINITRFQTLLALHRSYLTPGDSSSGWTAGAAAYYVGYLQPRTFLLKYNENGTITDAVDCALDPLSETKCTLKSFTVEKGIYQTSNFRVQPTESIVRFPNITNLCPFGEVFNATRFASVYAWNRKRISNCVADYSVLYNSASFSTFKCYGVSPTKLNDLCFTNVYADSFVIRGDEVIQIAPGQTGKIADYNYKLPDDFTGCVIAWNSNNLDSKVGGNYNYLYRLFRKSNLKPFERDISTEIYQAGSTPCNGVEGFNCYFPLQSYGFQPTNGVGYQPYRVVVLSFELLHAPATVCGPKKSTNLVKNKCVNFNFNGLTGTGVLTESNKKFLPFQQFGRDIADTTDAVRDPQTLEILDITPCSFGGVSVITPGTNTSNQVAVLYQDVNCTEVPVAIHADQLTPTWRVYSTGSNVFQTRAGCLIGAEHVNNSYECDIPIGAGICASYQTQTNSPRRARSVASQSIIAYTMSLGAENSVAYSNNSIAICTNFTISVTTEILPVSMTKTSVDCTMYICGDSTECSNLLLQYGSFCTQLNRALTGIAVEQDKNTQEVFAQVKQIYKTPPIKDFGGFNFSQILPDPSKPSKRSFIEDLLFNKVTLADAGFIKQYGDCLGDIAARDLICAQKFNGLTVLPPLLTDEMIAQYTSALLAGTITSGWTFGAGAALQIPFAMQMAYRFNGIGVTQNVLYENQKLIANQFNSAIGKIQDSLSSTASALGKLQDVVNQNAQALNTLVKQLSSNFGAISSVLNDILSRLDKVEAEVQIDRLITGRLQSLQTYVTQQLIRAAEIRASANLAATKMSECVLGQSKRVDFCGKGYHLMSFPQSAPHGVVFLHVTYVCAQEKNFTTAPAICHDGKAHFPREGVFVSNGTHWFVTQRNFYEPQIITTDNTFVSGNCDVVIGIVNNTVYDPLQPELDSFKEELDKYFKNHTSPDVDLGDISGINASVVNIQKEIDRLNEVAKNLNESLIDLQELGKYEQYIKGGSGYIPEAPRDGQAYVRKDGEWVLLSTFL

SEQ ID NO: 6166 - protein, 1235 aa, Artificial Sequence
  SARS-CoV-2/pangolin/Guangxi/P4L/2017__EPI_ISL_410538 spike protein (1-1205)(P709C_P1063C) Foldon construct
MFVFLFVLPLVSSQCVNLTTRTGIPPGYTNSSTRGVYYPDKVFRSSILHLTQDLFLPFFSNVTWFNTINYQGGFKKFDNPVLPFNDGVYFASTEKSNIIRGWIFGTTLDARTQSLLIVNNATNVVIKVCEFQFCTDPFLGVYYHNNNKTWVENEFRVYSSANNCTFEYISQPFLMDLEGKQGNFKNLREFVFKNVDGYFKIYSKHTPIDLVRDLPRGFAALEPLVDLPIGINITRFQTLLALHRSYLTPGNLESGWTTGAAAYYVGYLQQRTFLLSYNQNGTITDAVDCSLDPLSETKCTLKSLTVEKGIYQTSNFRVQPTISIVRFPNITNLCPFGEVFNASKFASVYAWNRKRISNCVADYSVLYNSTSFSTFKCYGVSPTKLNDLCFTNVYADSFVVKGDEVRQIAPGQTGVIADYNYKLPDDFTGCVIAWNSVKQDALTGGNYGYLYRLFRKSKLKPFERDISTEIYQAGSTPCNGQVGLNCYYPLERYGFHPTTGVNYQPFRVVVLSFELLNGPATVCGPKLSTTLVKDKCVNFNFNGLTGTGVLTTSKKQFLPFQQFGRDISDTTDAVRDPQTLEILDITPCSFGGVSVITPGTNTSNQVAVLYQDVNCTEVPMAIHAEQLTPAWRVYSAGANVFQTRAGCLVGAEHVNNSYECDIPVGAGICASYHSMSSLRSVNQRSIIAYTMSLGAENSVAYSNNSIAICTNFTISVTTEILPVSMTKTSVDCTMYICGDSIECSNLLLQYGSFCTQLNRALTGIAVEQDKNTQEVFAQVKQIYKTPPIKDFGGFNFSQILPDPSKPSKRSFIEDLLFNKVTLADAGFIKQYGDCLGDIAARDLICAQKFNGLTVLPPLLTDEMIAQYTSALLAGTITSGWTFGAGAALQIPFAMQMAYRFNGIGVTQNVLYENQKLIANQFNSAIGKIQDSLSSTASALGKLQDVVNQNAQALNTLVKQLSSNFGAISSVLNDILSRLDKVEAEVQIDRLITGRLQSLQTYVTQQLIRAAEIRASANLAATKMSECVLGQSKRVDFCGKGYHLMSFPQSAPHGVVFLHVTYVCAQEKNFTTAPAICHEGKAHFPREGVFVSNGTHWFITQRNFYEPQIITTDNTFVSGSCDVVIGIVNNTVYDPLQPELDSFKEELDKYFKNHTSPDVDLGDISGINASVVNIQKEIDRLNEVAKNLNESPIDLQELGKYEQYIKGGSGYIPEAPRDGQAYVRKDGEWVLLSTFL

SEQ ID NO: 6167 - protein, 1235 aa, Artificial Sequence
  SARS-CoV-2/pangolin/Guangxi/P5L/2017__EPI_ISL_410540 spike protein (1-1205)(P709C_P1063C) Foldon construct
MFVFLFVLPLVSSQCVNLTTRTGIPPGYTNSSTRGVYYPDKVFRSSILHLTQDLFLPFFSNVTWFNTINYQGGFKKFDNPVLPFNDGVYFASTEKSNIIRGWIFGTTLDARTQSLLIVNNATNVVIKVCEFQFCTDPFLGVYYHNNNKTWVENEFRVYSSANNCTFEYISQPFLMDLEGKQGNFKNLREFVFKNVDGYFKIYSKHTPIDLVRDLPRGFAALEPLVDLPIGINITRFQTLLALHRSYLTPGKLESGWTTGAAAYYVGYLQQRTFLLSYNQNGTITDAVDCSLDPLSETKCTLKSLTVEKGIYQTSNFRVQPTISIVRFPNITNLCPFGEVFNASKFASVYAWNRKRISNCVADYSVLYNSTSFSTFKCYGVSPTKLNDLCFTNVYADSFVVKGDEVRQIAPGQTGVIADYNYKLPDDFTGCVIAWNSVKQDALTGGNYGYLYRLFRKSKLKPFERDISTEIYQAGSTPCNGQVGLNCYYPLERYGFHPTTGVNYQPFRVVVLSFELLNGPATVCGPKLSTTLVKDKCVNFNFNGLTGTGVLTTSKKQFLPFQQFGRDISDTTDAVRDPQTLEILDITPCSFGGVSVITPGTNTSNQVAVLYQDVNCTEVPMAIHAEQLTPAWRVYSAGANVFQTRAGCLVGAEHVNNSYECDIPVGAGICASYHSMSSFRSVNQRSIIAYTMSLGAENSVAYSNNSIAICTNFTISVTTEILPVSMTKTSVDCTMYICGDSIECSNLLLQYGSFCTQLNRALTGIAVEQDKNTQEVFAQVKQIYKTPPIKDFGGFNFSQILPDPSKPSKRSFIEDLLFNKVTLADAGFIKQYGDCLGDIAARDLICAQKFNGLTVLPPLLTDEMIAQYTSALLAGTITSGWTFGAGAALQIPFAMQMAYRFNGIGVTQNVLYENQKLIANQFNSAIGKIQDSLSSTASALGKLQDVVNQNAQALNTLVKQLSSNFGAISSVLNDILSRLDKVEAEVQIDRLITGRLQSLQTYVTQQLIRAAEIRASANLAATKMSECVLGQSKRVDFCGKGYHLMSFPQSAPHGVVFLHVTYVCAQEKNFTTAPAICHEGKAHFPREGVFVSNGTHWFITQRNFYEPQIITTDNTFVSGSCDVVIGIVNNTVYDPLQPELDSFKEELDKYFKNHTSPDVDLGDISGINASVVNIQKEIDRLNEVAKNLNESLIDLQELGKYEQYIKGGSGYIPEAPRDGQAYVRKDGEWVLLSTFL

SEQ ID NO: 6168 - protein, 1235 aa, Artificial Sequence
  SARS-CoV-2/pangolin/Guangxi/P5E/2017__EPI_ISL_410541 spike protein (1-1205)(P709C_P1063C) Foldon construct
MFVFLFVLPLVSSQCVNLTTRTGIPPGYTNSSTRGVYYPDKVFRSSILHLTQDLFLPFFSNVTWFNTITYQGGSKKFDNPVLPFNDGVYFASTEKSNIIRGWIFGTTLDARTQSLLIVNNATNVVIKVCEFQFCTDPFLGVYYHNNNKTWVENEFRVYSSANNCTFEYISQPFLMDLEGKQGNFKNLREFVFKNVDGYFKIYSKHTPIDLVRDLPRGFAALEPLVDLPIGINITRFQTLLALHRSYLTPGKLESGWTTGAAAYYVGYLQQRTFLLSYNQNGTITDAVDCSLDPLSETKCTLKSLTVEKGIYQTSNFRVQPTISIVRFPNITNLCPFGEVFNASKFASVYAWNRKRISNCVADYSVLYNSTSFSTFKCYGVSPTKLNDLCFTNVYADSFVVKGDEVRQIAPGQTGVIADYNYKLPDDFTGCVIAWNSVKQDALTGDNYGYLYRLFRKSKLKPFERDISTEIYQAGSTPCNGQVGLNCYYPLERYGFHPTTGVNYQPFRVVVLSFELLNGPATVCGPKLSTTLVKDKCVNFNFNGLTGTGVLTTSKKQFLPFQQFGRDISDTTDAVRDPQTLEILDITPCSFGGVSVITPGTNTSNQVAVLYQDVNCTEVPMAIHAEQLTPAWRVYSAGANVFQTRAGCLVGAEHVNNSYECDIPVGAGICASYHSMSSFRSVNQRSIIAYTMSLGAENSVAYSNNSIAICTNFTISVTTEILPVSMTKTSVDCTMYICGDSIECSNLLLQYGSFCTQLNRALTGIAVEQDKNTQEVFAQVKQIYKTPPIKDFGGFNFSQILPDPSKPSKRSFIEDLLFNKVTLADAGFIKQYGDCLGDIAARDLICAQKFNGLTVLPPLLTDEMIAQYTSALLAGTITSGWTFGAGAALQIPFAMQMAYRFNGIGVTQNVLYENQKLIANQFNSAIGKIQDSLSSTASALGKLQDVVNQNAQALNTLVKQLSSNFGAISSVLNDILSRLDKVEAEVQIDRLITGRLQSLQTYVTQQLIRAAEIRASANLAATKMSECVLGQSKRVDFCGKGYHLMSFPQSAPHGVVFLHVTYVCAQEKNFTTAPAICHEGKAHFPREGVFVSNGTHWFITQRNFYEPQIITTDNTFVSGSCDVVIGIVNNTVYDPLQPELDSFKEELDKYFKNHTSPDVDLGDISGINASVVNIQKEIDRLNEVAKNLNESLIDLQELGKYEQYIKGGSGYIPEAPRDGQAYVRKDGEWVLLSTFL

SEQ ID NO: 6169 - protein, 1233 aa, Artificial Sequence
  SARS-CoV-2/pangolin/Guangxi/P1E/2017__EPI_ISL_410539 spike protein (1-1203)(P707C_P1061C) Foldon construct
MFVFLFVLPLVSSQCVNLTTRTGIQPGYTNSSTRGVYYPDKVFRSSILHLTQDLFLPFFSNVTWFNTINYQGGFKKFDNPVLPFNDGVYFASTEKSNIIRGWIFGTTLDARTQSLLIVNNATNVVIKVCEFQFCTDPFLGVYYHNNNKTWVENEFRVYSSANNCTFEYISQPFLMDLEGKQGNFKNLREFVFKNVDGYFKIYSKHTPIDLVRDLPRGFAALEPLVDLPIGINITRFQTLLALHRSYLTPGKLESGWTTGAAAYYVGYLQQRTFLLSYNQNGTITDAVDCSLDPLSETKCTLKSLTVEKGIYQTSNFRVQPTISIVRFPNITNLCPFGEVFNASKFASVYAWNRKRISNCVADYSVLYNSTSFSTFKCYGVSPTKLNDLCFTNVYADSFVVKGDEVRQIAPGQTGVIADYNYKLPDDFTGCVIAWNSVKQDALTGGNYLYRLFRKSKLKPFERDISTEIYQAGSTPCNGQVGLNCYYPLERYGFHPTTGVNYQPFRVVVLSFELLNGPATVCGPKLSTTLVKDKCVNFNFNGLTGTGVLTTSKKQFLPFQQFGRDISDTTDAVRDPQTLEILDITPCSFGGVSVITPGTNTSNQVAVLYQDVNCTEVPMAIHAEQLTPAWRVYSAGANVFQTRAGCLVGAEHVNNSYECDIPVGAGICASYHSMSSLRSVNQRSIIAYTMSLGAENSVAYSNNSIAICTNFTISVTTEILPVSMTKTSVDCTMYICGDSIECSNLLLQYGSFCTQLNRALTGIAVEQDKNTQEVFAQVKQIYKTPPIKDFGGFNFSQILPDPSKPSKRSFIEDLLFNKVTLADAGFIKQYGDCLGDIAARDLICAQKFNGLTVLPPLLTDEMIAQYTSALLAGTITSGWTFGAGAALQIPFAMQMAYRFNGIGVTQNVLYENQKLIANQFNSAIGKIQDSLSSTASALGKLQDVVNQNAQALNTLVKQLSSNFGAISSVLNDILSRLDKVEAEVQIDRLITGRLQSLQTYVTQQLIRAAEIRASANLAATKMSECVLGQSKRVDFCGKGYHLMSFPQSAPHGVVFLHVTYVCAQEKNFTTAPAICHEGKAHFPREGVFVSNGTHWFITQRNFYEPQIITTDNTFVSGSCDVVIGIVNNTVYDPLQPELDSFKEELDKYFKNHTSPDVDLGDISGINASVVNIQKEIDRLNEVAKNLNESLIDLQELGKYEQYIKGGSGYIPEAPRDGQAYVRKDGEWVLLSTFL

SEQ ID NO: 6170 - protein, 1241 aa, Artificial Sequence
  SARS-CoV-2/Wuhan/WIV05/2019__EPI_ISL_402128 spike protein (1-1211)(G889C_L1034C) Foldon construct
MFVFLVLLPLVSSQCVNLTTRTQLPPAYTNSFTRGVYYPDKVFRSSVLHSTQDLFLPFFSNVTWFHAIHVSGTNGTKRFDNPVLPFNDGVYFASTEKSNIIRGWIFGTTLDSKTQSLLIVNNATNVVIKVCEFQFCNDPFLGVYYHKNNKSWMESEFRVYSSANNCTFEYVSQPFLMDLEGKQGNFKNLREFVFKNIDGYFKIYSKHTPINLVRDLPQGFSALEPLVDLPIGINITRFQTLLALHRSYLTPGDSSSGWTAGAAAYYVGYLQPRTFLLKYNENGTITDAVDCALDPLSETKCTLKSFTVEKGIYQTSNFRVQPTESIVRFPNITNLCPFGEVFNATRFASVYAWNRKRISNCVADYSVLYNSASFSTFKCYGVSPTKLNDLCFTNVYADSFVIRGDEVRQIAPGQTGKIADYNYKLPDDFTGCVIAWNSNNLDSKVGGNYNYLYRLFRKSNLKPFERDISTEIYQAGSTPCNGVEGFNCYFPLQSYGFQPTNGVGYQPYRVVVLSFELLHAPATVCGPKKSTNLVKNKCVNFNFNGLTGTGVLTESNKKFLPFQQFGRDIADTTDAVRDPQTLEILDITPCSFGGVSVITPGTNTSNQVAVLYQDVNCTEVPVAIHADQLTPTWRVYSTGSNVFQTRAGCLIGAEHVNNSYECDIPIGAGICASYQTQTNSPRRARSVASQSIIAYTMSLGAENSVAYSNNSIAIPTNFTISVTTEILPVSMTKTSVDCTMYICGDSTECSNLLLQYGSFCTQLNRALTGIAVEQDKNTQEVFAQVKQIYKTPPIKDFGGFNFSQILPDPSKPSKRSFIEDLLFNKVTLADAGFIKQYGDCLGDIAARDLICAQKFNGLTVLPPLLTDEMIAQYTSALLAGTITSGWTFCAGAALQIPFAMQMAYRFNGIGVTQNVLYENQKLIANQFNSAIGKIQDSLSSTASALGKLQDVVNQNAQALNTLVKQLSSNFGAISSVLNDILSRLDKVEAEVQIDRLITGRLQSLQTYVTQQLIRAAEIRASANLAATKMSECVCGQSKRVDFCGKGYHLMSFPQSAPHGVVFLHVTYVPAQEKNFTTAPAICHDGKAHFPREGVFVSNGTHWFVTQRNFYEPQIITTDNTFVSGNCDVVIGIVNNTVYDPLQPELDSFKEELDKYFKNHTSPDVDLGDISGINASVVNIQKEIDRLNEVAKNLNESLIDLQELGKYEQYIKGGSGYIPEAPRDGQAYVRKDGEWVLLSTFL

SEQ ID NO: 6171 - protein, 1237 aa, Artificial Sequence
  SARS-CoV-2/bat/Yunnan/RaTG13/2013__EPI_ISL_402131 spike protein (1-1207)(G885C_L1030C) Foldon construct
MFVFLVLLPLVSSQCVNLTTRTQLPPAYTNSSTRGVYYPDKVFRSSVLHLTQDLFLPFFSNVTWFHAIHVSGTNGIKRFDNPVLPFNDGVYFASTEKSNIIRGWIFGTTLDSKTQSLLIVNNATNVVIKVCEFQFCNDPFLGVYYHKNNKSWMESEFRVYSSANNCTFEYVSQPFLMDLEGKQGNFKNLREFVFKNIDGYFKIYSKHTPINLVRDLPPGFSALEPLVDLPIGINITRFQTLLALHRSYLTPGDSSSGWTAGAAAYYVGYLQPRTFLLKYNENGTITDAVDCALDPLSETKCTLKSFTVEKGIYQTSNFRVQPTDSIVRFPNITNLCPFGEVFNATTFASVYAWNRKRISNCVADYSVLYNSTSFSTFKCYGVSPTKLNDLCFTNVYADSFVITGDEVRQIAPGQTGKIADYNYKLPDDFTGCVIAWNSKHIDAKEGGNFNYLYRLFRKANLKPFERDISTEIYQAGSKPCNGQTGLNCYYPLYRYGFYPTDGVGHQPYRVVVLSFELLNAPATVCGPKKSTNLVKNKCVNFNFNGLTGTGVLTESNKKFLPFQQFGRDIADTTDAVRDPQTLEILDITPCSFGGVSVITPGTNASNQVAVLYQDVNCTEVPVAIHADQLTPTWRVYSTGSNVFQTRAGCLIGAEHVNNSYECDIPIGAGICASYQTQTNSRSVASQSIIAYTMSLGAENSVAYSNNSIAIPTNFTISVTTEILPVSMTKTSVDCTMYICGDSTECSNLLLQYGSFCTQLNRALTGIAVEQDKNTQEVFAQVKQIYKTPPIKDFGGFNFSQILPDPSKPSKRSFIEDLLFNKVTLADAGFIKQYGDCLGDIAARDLICAQKFNGLTVLPPLLTDEMIAQYTSALLAGTITSGWTFCAGAALQIPFAMQMAYRFNGIGVTQNVLYENQKLIANQFNSAIGKIQDSLSSTASALGKLQDVVNQNAQALNTLVKQLSSNFGAISSVLNDILSRLDKVEAEVQIDRLITGRLQSLQTYVTQQLIRAAEIRASANLAATKMSECVCGQSKRVDFCGKGYHLMSFPQSAPHGVVFLHVTYVPAQEKNFTTAPAICHDGKAHFPREGVFVSNGTHWFVTQRNFYEPQIITTDNTFVSGSCDVVIGIVNNTVYDPLQPELDSFKEELDKYFKNHTSPDVDLGDISGINASVVNIQKEIDRLNEVAKNLNESLIDLQELGKYEQYIKGGSGYIPEAPRDGQAYVRKDGEWVLLSTFL

SEQ ID NO: 6172 - protein, 1241 aa, Artificial Sequence
  SARS-CoV-2/Wuhan/HBCDC-HB-01/2019__EPI_ISL_402132 spike protein (1-1211)(G889C_L1034C) Foldon construct
MFVFLVLLPLVSSQCVNLTTRTQLPPAYTNSITRGVYYPDKVFRSSVLHSTQDLFLPFFSNVTWFHAIHVSGTNGTKRFDNPVLPFNDGVYFASTEKSNIIRGWIFGTTLDSKTQSLLIVNNATNVVIKVCEFQFCNDPFLGVYYHKNNKSWMESEFRVYSSANNCTFEYVSQPFLMDLEGKQGNFKNLREFVFKNIDGYFKIYSKHTPINLVRDLPQGFSALEPLVDLPIGINITRFQTLLALHRSYLTPGDSSSGWTAGAAAYYVGYLQPRTFLLKYNENGTITDAVDCALDPLSETKCTLKSFTVEKGIYQTSNFRVQPTESIVRFPNITNLCPFGEVFNATRFASVYAWNRKRISNCVADYSVLYNSASFSTFKCYGVSPTKLNDLCFTNVYADSFVIRGDEVRQIAPGQTGKIADYNYKLPDDFTGCVIAWNSNNLDSKVGGNYNYLYRLFRKSNLKPFERDISTEIYQAGSTPCNGVEGFNCYFPLQSYGFQPTNGVGYQPYRVVVLSFELLHAPATVCGPKKSTNLVKNKCVNFNFNGLTGTGVLTESNKKFLPFQQFGRDIADTTDAVRDPQTLEILDITPCSFGGVSVITPGTNTSNQVAVLYQDVNCTEVPVAIHADQLTPTWRVYSTGSNVFQTRAGCLIGAEHVNNSYECDIPIGAGICASYQTQTNSPRRARSVASQSIIAYTMSLGAENSVAYSNNSIAIPTNFTISVTTEILPVSMTKTSVDCTMYICGDSTECSNLLLQYGSFCTQLNRALTGIAVEQDKNTQEVFAQVKQIYKTPPIKDFGGFNFSQILPDPSKPSKRSFIEDLLFNKVTLADAGFIKQYGDCLGDIAARDLICAQKFNGLTVLPPLLTDEMIAQYTSALLAGTITSGWTFCAGAALQIPFAMQMAYRFNGIGVTQNVLYENQKLIANQFNSAIGKIQDSLSSTASALGKLQDVVNQNAQALNTLVKQLSSNFGAISSVLNDILSRLDKVEAEVQIDRLITGRLQSLQTYVTQQLIRAAEIRASANLAATKMSECVCGQSKRVDFCGKGYHLMSFPQSAPHGVVFLHVTYVPAQEKNFTTAPAICHDGKAHFPREGVFVSNGTHWFVTQRNFYEPQIITTDNTFVSGNCDVVIGIVNNTVYDPLQPELDSFKEELDKYFKNHTSPDVDLGDISGINASVVNIQKEIDRLNEVAKNLNESLIDLQELGKYEQYIKGGSGYIPEAPRDGQAYVRKDGEWVLLSTFL

SEQ ID NO: 6173 - protein, 1241 aa, Artificial Sequence
  SARS-CoV-2/Guangdong/20SF028/2020__EPI_ISL_403936 spike protein (1-1211)(G889C_L1034C) Foldon construct
MFVFLVLLPLVSSQCVNLTTRTQLPPAYTNSFTRGVYYPDKVFRSSVLYSTQDLFLPFFSNVTWFHAIHVSGTNGTKRFDNPVLPFNDGVYFASTEKSNIIRGWIFGTTLDSKTQSLLIVNNATNVVIKVCEFQFCNDPFLGVYYHKNNKSWMESEFRVYSSANNCTFEYVSQPFLMDLEGKQGNFKNLREFVFKNIDGYFKIYSKHTPINLVRDLPQGFSALEPLVDLPIGINITRFQTLLALHRSYLTPGDSSSGWTAGAAAYYVGYLQPRTFLLKYNENGTITDAVDCALDPLSETKCTLKSFTVEKGIYQTSNFRVQPTESIVRFPNITNLCPFGEVFNATRFASVYAWNRKRISNCVADYSVLYNSASFSTFKCYGVSPTKLNDLCFTNVYADSFVIRGDEVRQIAPGQTGKIADYNYKLPDDFTGCVIAWNSNNLDSKVGGNYNYLYRLFRKSNLKPFERDISTEIYQAGSTPCNGVEGFNCYFPLQSYGFQPTNGVGYQPYRVVVLSFELLHAPATVCGPKKSTNLVKNKCVNFNFNGLTGTGVLTESNKKFLPFQQFGRDIADTTDAVRDPQTLEILDITPCSFGGVSVITPGTNTSNQVAVLYQDVNCTEVPVAIHADQLTPTWRVYSTGSNVFQTRAGCLIGAEHVNNSYECDIPIGAGICASYQTQTNSPRRARSVASQSIIAYTMSLGAENSVAYSNNSIAIPTNFTISVTTEILPVSMTKTSVDCTMYICGDSTECSNLLLQYGSFCTQLNRALTGIAVEQDKNTQEVFAQVKQIYKTPPIKDFGGFNFSQILPDPSKPSKRSFIEDLLFNKVTLADAGFIKQYGDCLGDIAARDLICAQKFNGLTVLPPLLTDEMIAQYTSALLAGTITSGWTFCAGAALQIPFAMQMAYRFNGIGVTQNVLYENQKLIANQFNSAIGKIQDSLSSTASALGKLQDVVNQNAQALNTLVKQLSSNFGAISSVLNDILSRLDKVEAEVQIDRLITGRLQSLQTYVTQQLIRAAEIRASANLAATKMSECVCGQSKRVDFCGKGYHLMSFPQSAPHGVVFLHVTYVPAQEKNFTTAPAICHDGKAHFPREGVFVSNGTHWFVTQRNFYEPQIITTDNTFVSGNCDVVIGIVNNTVYDPLQPELDSFKEELDKYFKNHTSPDVDLGDISGINASVVNIQKEIDRLNEVAKNLNESLIDLQELGKYEQYIKGGSGYIPEAPRDGQAYVRKDGEWVLLSTFL

SEQ ID NO: 6174 - protein, 1241 aa, Artificial Sequence
  SARS-CoV-2/Shenzhen/SZTH-001/2020__EPI_ISL_406592 spike protein (1-1211)(G889C_L1034C) Foldon construct
MFVFLVLLPLVSSQCVNLTTRTQLPPAYTNSFTRGVYYPDKVFRSSVLHSTQDLFLPFFSNVTWFHAIHVSGTNGTKRFDNPVLPFNDGVYFASTEKSNIIRGWIFGTTLDSKTQSLLIVNNATNVVIKVCEFQFCNDPFLGVYYHKNNKSWMESEFRVYSSANNCTFEYVSQPFLMDLEGKQGNFKNLREFVFKNIDGYFKIYSKHTPINLVRDLPQGFSALEPLVDLPIGINITRFQTLLALHRSYLTPGDSSSGWTAGAAAYYVGYLQPRTFLLKYNENGTITDAVDCALDPLSETKCTLKSFTVEKGIYQTSNFRVQPTESIVRFPNITNLCPFGEVFNATRFASVYAWNRKRISNCVADYSVLYNSASFSTFKCYGVSPTKLNDLCFTNVYADSFVIRGDEVRQIAPGQTGKIADYNYKLPDDFTGCVIAWNSNNLDSKVGGNYNYLYRLFRKSNLKPFERDISTEIYQAGSTPCNGVEGFNCYFPLQSYGFQPTNGVGYQPYRVVVLSFELLHAPATVCGPKKSTNLVKNKCVNFNFNGLTGTGVLTESNKKFLPFQQFGRDIADTTDAVRDPQTLEILDITPCSFGGVSVITPGTNTSNQVAVLYQDVNCTEVPVAIHADQLTPTWRVYSTGSNVFQTRAGCLIGAEHVNNSYECDIPIGAGICASYQTQTNSPRRARSVASQSIIAYTMSLGAENSVAYSNNSIAIPTNFTISVTTEILPVSMTKTSVDCTMYICGDSTECSNLLLQYGSFCTQLNRALTGIAVEQDKNTQEVFAQVKQIYKTPPIKDFGGFNFSQILPDPSKPSKRSFIEDLLFNKVTLADAGFIKQYGDCLGDIAARDLICAQKFNGLTVLPPLLTDEMIAQYTSALLAGTITSGWTFCAGAALQIPFAMQMAYRFNGIGVTQNVLYENQKLIANQFNSAIGKIQDSLSSTASALGKLQDVVNQNAQALNTLVKQLSSNFGAISSVLNDILSRLDKVEAEVQIDRLITGRLQSLQTYVTQQLIRAAEIRASANLAATKMSECVCGQSKRVDFCGKGYHLMSFPQSAPHGVVFLHVTYVPAQEKNFTTAPAICHDGKAHFPREGVFVSNGTHWFVTQRNFYEPQIITTDNTFVSGNCDVLIGIVNNTVYDPLQPELDSFKEELDKYFKNHTSPDVDLGDISGINASVVNIQKEIDRLNEVAKNLNESLIDLQELGKYEQYIKGGSGYIPEAPRDGQAYVRKDGEWVLLSTFL

SEQ ID NO: 6175 - protein, 1241 aa, Artificial Sequence
  SARS-CoV-2/Shenzhen/SZTH-004/2020__EPI_ISL_406595 spike protein (1-1211)(G889C_L1034C) Foldon construct
MFVFLVLLPLVSSQCVNLTTRTQLPPAYTNSFTRGVYYPDKVFRSSVLHSTQDLFLPFFSNVTWFHAIHVSGTNGTKRFDNPVLPFNDGVYFASTEKSNIIRGWIFGTTLDSKTQSLLIVNNATNVVIKVCEFQFCNDPFLGVYYHKNNKSWMESEFRVYSSANNCTFEYVSQPFLMDLEGKQGNFKNLREFVFKNIDGYFKIYSKHTPINLVRDLPQGFSALEPLVDLPIGINITRFQTLLALHRSYLTPGDSSSGWTAGAAAYYVGYLQPRTFLLKYNENGTITDAVDCALDPLSETKCTLKSFTVEKGIYQTSNFRVQPTESIVRFPNITNLCPFGEVFNATRFASVYAWDRKRISNCVAYYSVLYNSASFSTFKCYGVSPTKLNDLCFTNVYADSFVIRGDEVRQIAPGQTGKIADYNYKLPDDFTGCVIAWNSNNLDSKVGGNYNYLYRLFRKSNLKPFERDISTEIYQAGSTPCNGVEGFNCYFPLQSYGFQPTNGVGYQPYRVVVLSFELLHAPATVCGPKKSTNLVKNKCVNFNFNGLTGTGVLTESNKKFLPFQQFGRDIADTTDAVRDPQTLEILDITPCSFGGVSVITPGTNTSNQVAVLYQDVNCTEVPVAIHADQLTPTWRVYSTGSNVFQTRAGCLIGAEHVNNSYECDIPIGAGICASYQTQTNSPRRARSVASQSIIAYTMSLGAENSVAYSNNSIAIPTNFTISVTTEILPVSMTKTSVDCTMYICGDSTECSNLLLQYGSFCTQLNRALTGIAVEQDKNTQEVFAQVKQIYKTPPIKDFGGFNFSQILPDPSKPSKRSFIEDLLFNKVTLADAGFIKQYGDCLGDIAARDLICAQKFNGLTVLPPLLTDEMIAQYTSALLAGTITSGWTFCAGAALQIPFAMQMAYRFNGIGVTQNVLYENQKLIANQFNSAIGKIQDSLSSTASALGKLQDVVNQNAQALNTLVKQLSSNFGAISSVLNDILSRLDKVEAEVQIDRLITGRLQSLQTYVTQQLIRAAEIRASANLAATKMSECVCGQSKRVDFCGKGYHLMSFPQSAPHGVVFLHVTYVPAQEKNFTTAPAICHDGKAHFPREGVFVSNGTHWFVTQRNFYEPQIITTDNTFVSGNCDVVIGIVNNTVYDPLQPELDSFKEELDKYFKNHTSPDVDLGDISGINASVVNIQKEIDRLNEVAKNLNESLIDLQELGKYEQYIKGGSGYIPEAPRDGQAYVRKDGEWVLLSTFL

SEQ ID NO: 6176 - protein, 1241 aa, Artificial Sequence
  SARS-CoV-2/France/IDF0372/2020__EPI_ISL_406596 spike protein (1-1211)(G889C_L1034C) Foldon construct
MFVFLVLLPLVSSQCVNLTTRTQLPPAYTNSFTRGVYYPDKVFRSSVLHSTQDLFLPFFSNVTWFHAIHVSGTNGTKRFDNPVLPFNDGVYFASTEKSNIIRGWIFGTTLDSKTQSLLIVNNATNVVIKVCEFQFCNDPFLGVYYHKNNKSWMESEFRVYSSANNCTFEYVSQPFLMDLEGKQGNFKNLREFVFKNIDGYFKIYSKHTPINLVRDLPQGFSALEPLVDLPIGINITRFQTLLALHRSYLTPGDSSSGWTAGAAAYYVGYLQPRTFLLKYNENGTITDAVDCALDPLSETKCTLKSFTVEKGIYQTSNFRVQPTESIVRFPNITNLCPFGEVFNATRFASVYAWNRKRISNCVADYSFLYNSASFSTFKCYGVSPTKLNDLCFTNVYADSFVIRGDEVRQIAPGQTGKIADYNYKLPDDFTGCVIAWNSNNLDSKVGGNYNYLYRLFRKSNLKPFERDISTEIYQAGSTPCNGVEGFNCYFPLQSYGFQPTNGVGYQPYRVVVLSFELLHAPATVCGPKKSTNLVKNKCVNFNFNGLTGTGVLTESNKKFLPFQQFGRDIADTTDAVRDPQTLEILDITPCSFGGVSVITPGTNTSNQVAVLYQDVNCTEVPVAIHADQLTPTWRVYSTGSNVFQTRAGCLIGAEHVNNSYECDIPIGAGICASYQTQTNSPRRARSVASQSIIAYTMSLGAENSVAYSNNSIAIPTNFTISVTTEILPVSMTKTSVDCTMYICGDSTECSNLLLQYGSFCTQLNRALTGIAVEQDKNTQEVFAQVKQIYKTPPIKDFGGFNFSQILPDPSKPSKRSFIEDLLFNKVTLADAGFIKQYGDCLGDIAARDLICAQKFNGLTVLPPLLTDEMIAQYTSALLAGTITSGWTFCAGAALQIPFAMQMAYRFNGIGVTQNVLYENQKLIANQFNSAIGKIQDSLSSTASALGKLQDVVNQNAQALNTLVKQLSSNFGAISSVLNDILSRLDKVEAEVQIDRLITGRLQSLQTYVTQQLIRAAEIRASANLAATKMSECVCGQSKRVDFCGKGYHLMSFPQSAPHGVVFLHVTYVPAQEKNFTTAPAICHDGKAHFPREGVFVSNGTHWFVTQRNFYEPQIITTDNTFVSGNCDVVIGIVNNTVYDPLQPELDSFKEELDKYFKNHTSPDVDLGDISGINASVVNIQKEIDRLNEVAKNLNESLIDLQELGKYEQYIKGGSGYIPEAPRDGQAYVRKDGEWVLLSTFL

SEQ ID NO: 6177 - protein, 1241 aa, Artificial Sequence
  SARS-CoV-2/Australia/VIC01/2020__EPI_ISL_406844 spike protein (1-1211)(G889C_L1034C) Foldon construct
MFVFLVLLPLVSSQCVNLTTRTQLPPAYTNSFTRGVYYPDKVFRSSVLHSTQDLFLPFFSNVTWFHAIHVSGTNGTKRFDNPVLPFNDGVYFASTEKSNIIRGWIFGTTLDSKTQSLLIVNNATNVVIKVCEFQFCNDPFLGVYYHKNNKSWMESEFRVYSSANNCTFEYVSQPFLMDLEGKQGNFKNLREFVFKNIDGYFKIYSKHTPINLVRDLPQGFSALEPLVDLPIGINITRFQTLLALHRRYLTPGDSSSGWTAGAAAYYVGYLQPRTFLLKYNENGTITDAVDCALDPLSETKCTLKSFTVEKGIYQTSNFRVQPTESIVRFPNITNLCPFGEVFNATRFASVYAWNRKRISNCVADYSVLYNSASFSTFKCYGVSPTKLNDLCFTNVYADSFVIRGDEVRQIAPGQTGKIADYNYKLPDDFTGCVIAWNSNNLDSKVGGNYNYLYRLFRKSNLKPFERDISTEIYQAGSTPCNGVEGFNCYFPLQSYGFQPTNGVGYQPYRVVVLSFELLHAPATVCGPKKSTNLVKNKCVNFNFNGLTGTGVLTESNKKFLPFQQFGRDIADTTDAVRDPQTLEILDITPCSFGGVSVITPGTNTSNQVAVLYQDVNCTEVPVAIHADQLTPTWRVYSTGSNVFQTRAGCLIGAEHVNNSYECDIPIGAGICASYQTQTNSPRRARSVASQSIIAYTMSLGAENSVAYSNNSIAIPTNFTISVTTEILPVSMTKTSVDCTMYICGDSTECSNLLLQYGSFCTQLNRALTGIAVEQDKNTQEVFAQVKQIYKTPPIKDFGGFNFSQILPDPSKPSKRSFIEDLLFNKVTLADAGFIKQYGDCLGDIAARDLICAQKFNGLTVLPPLLTDEMIAQYTSALLAGTITSGWTFCAGAALQIPFAMQMAYRFNGIGVTQNVLYENQKLIANQFNSAIGKIQDSLSSTASALGKLQDVVNQNAQALNTLVKQLSSNFGAISSVLNDILSRLDKVEAEVQIDRLITGRLQSLQTYVTQQLIRAAEIRASANLAATKMSECVCGQSKRVDFCGKGYHLMSFPQSAPHGVVFLHVTYVPAQEKNFTTAPAICHDGKAHFPREGVFVSNGTHWFVTQRNFYEPQIITTDNTFVSGNCDVVIGIVNNTVYDPLQPELDSFKEELDKYFKNHTSPDVDLGDISGINASVVNIQKEIDRLNEVAKNLNESLIDLQELGKYEQYIKGGSGYIPEAPRDGQAYVRKDGEWVLLSTFL

SEQ ID NO: 6178 - protein, 1241 aa, Artificial Sequence
  SARS-CoV-2/Germany/BavPat1/2020__EPI_ISL_406862 spike protein (1-1211)(G889C_L1034C) Foldon construct
MFVFLVLLPLVSSQCVNLTTRTQLPPAYTNSFTRGVYYPDKVFRSSVLHSTQDLFLPFFSNVTWFHAIHVSGTNGTKRFDNPVLPFNDGVYFASTEKSNIIRGWIFGTTLDSKTQSLLIVNNATNVVIKVCEFQFCNDPFLGVYYHKNNKSWMESEFRVYSSANNCTFEYVSQPFLMDLEGKQGNFKNLREFVFKNIDGYFKIYSKHTPINLVRDLPQGFSALEPLVDLPIGINITRFQTLLALHRSYLTPGDSSSGWTAGAAAYYVGYLQPRTFLLKYNENGTITDAVDCALDPLSETKCTLKSFTVEKGIYQTSNFRVQPTESIVRFPNITNLCPFGEVFNATRFASVYAWNRKRISNCVADYSVLYNSASFSTFKCYGVSPTKLNDLCFTNVYADSFVIRGDEVRQIAPGQTGKIADYNYKLPDDFTGCVIAWNSNNLDSKVGGNYNYLYRLFRKSNLKPFERDISTEIYQAGSTPCNGVEGFNCYFPLQSYGFQPTNGVGYQPYRVVVLSFELLHAPATVCGPKKSTNLVKNKCVNFNFNGLTGTGVLTESNKKFLPFQQFGRDIADTTDAVRDPQTLEILDITPCSFGGVSVITPGTNTSNQVAVLYQGVNCTEVPVAIHADQLTPTWRVYSTGSNVFQTRAGCLIGAEHVNNSYECDIPIGAGICASYQTQTNSPRRARSVASQSIIAYTMSLGAENSVAYSNNSIAIPTNFTISVTTEILPVSMTKTSVDCTMYICGDSTECSNLLLQYGSFCTQLNRALTGIAVEQDKNTQEVFAQVKQIYKTPPIKDFGGFNFSQILPDPSKPSKRSFIEDLLFNKVTLADAGFIKQYGDCLGDIAARDLICAQKFNGLTVLPPLLTDEMIAQYTSALLAGTITSGWTFCAGAALQIPFAMQMAYRFNGIGVTQNVLYENQKLIANQFNSAIGKIQDSLSSTASALGKLQDVVNQNAQALNTLVKQLSSNFGAISSVLNDILSRLDKVEAEVQIDRLITGRLQSLQTYVTQQLIRAAEIRASANLAATKMSECVCGQSKRVDFCGKGYHLMSFPQSAPHGVVFLHVTYVPAQEKNFTTAPAICHDGKAHFPREGVFVSNGTHWFVTQRNFYEPQIITTDNTFVSGNCDVVIGIVNNTVYDPLQPELDSFKEELDKYFKNHTSPDVDLGDISGINASVVNIQKEIDRLNEVAKNLNESLIDLQELGKYEQYIKGGSGYIPEAPRDGQAYVRKDGEWVLLSTFL

SEQ ID NO: 6179 - protein, 1241 aa, Artificial Sequence
  SARS-CoV-2/Wuhan/HBCDC-HB-02/2020__EPI_ISL_412978 spike protein (1-1211)(G889C_L1034C) Foldon construct
MFVFLVLLPLVSSQCVNLTTRTQLPPAYTNSFTRGVYYPDKVFRSSVLHSTQDLFLPFFSNVTWFHAIHVSGTNGTKRFDNPVLPFNDGVYFASTEKSNIIRGWIFGTTLDSKTQSLLIVNNATNVVIKVCEFQFCNDPFLGVYYHKNNKSWMESEFRVYSSANNCTFEYVSQPFLMDLEGKQGNFKNLREFVFKNIDGYFKIYSKHTPINLVRDLPQGFSALEPLVDLPIGINITRFQTLLALHRSYLTPGDSSSGWTAGAAAYYVGYLQPRTFLLKYNENGTITDAVDCALDPLSETKCTLKSFTVEKGIYQTSNFRVQPTESIVRFPNITNLCPFGEVFNATRFASVYAWNRKRISNCVADYSVLYNSASFSTFKCYGVSPTKLNDLCFTNVYADSFVIRGDEVRQIAPGQTGKIADYNYKLPDDFTGCVIAWNSNNLDSKVGGNYNYLYRLFRKSNLKPFERDISTEIYQAGSTPCNGVEGFNCYFPLQSYGFQPTNGVGYQPYRVVVLSFELLHAPATVCGPKKSTNLVKNKCVNFNFNGLTGTGVLTESNKKFLPFQQFGRDIADTTDAVRDPQTLEILDITPCSFGGVSVITPGTNTSNQVAVLYQDVNCTEVPVAIHADQLTPTWRVYSTGSNVFQTRAGCLIGAEHVNNSYECDIPIGAGICASYQTQTNSPRRARSVASQSIIAYTMSLGAENSVAYSNNSIAIPTNFTISVTTEILPVSMTKTSVDCTMYICGDSTECSNFLLQYGSFCTQLNRALTGIAVEQDKNTQEVFAQVKQIYKTPPIKDFGGFNFSQILPDPSKPSKRSFIEDLLFNKVTLADAGFIKQYGDCLGDIAARDLICAQKFNGLTVLPPLLTDEMIAQYTSALLAGTITSGWTFCAGAALQIPFAMQMAYRFNGIGVTQNVLYENQKLIANQFNSAIGKIQDSLSSTASALGKLQDVVNQNAQALNTLVKQLSSNFGAISSVLNDILSRLDKVEAEVQIDRLITGRLQSLQTYVTQQLIRAAEIRASANLAATKMSECVCGQSKRVDFCGKGYHLMSFPQSAPHGVVFLHVTYVPAQEKNFTTAPAICHDGKAHFPREGVFVSNGTHWFVTQRNFYEPQIITTDNTFVSGNCDVVIGIVNNTVYDPLQPELDSFKEELDKYFKNHTSPDVDLGDISGINASVVNIQKEIDRLNEVAKNLNESLIDLQELGKYEQYIKGGSGYIPEAPRDGQAYVRKDGEWVLLSTFL

SEQ ID NO: 6180 - protein, 1241 aa, Artificial Sequence
  SARS-CoV-2/Australia/QLD02/2020__EPI_ISL_407896 spike protein (1-1211)(G889C_L1034C) Foldon construct
MFVFLVLLPLVSSQCVNLTTRTQLPPAYTNSFTRGVYYPDKVFRSSVLHSTQDLFLPFFSNVTWFHAIHVSGTNGTKRFDNPVLPFNDGVYFASTEKSNIIRGWIFGTTLDSKTQSLLIVNNATNVVIKVCEFQFCNDPFLGVYYHKNNKSWMESEFRVYSSANNCTFEYVSQPFLMDLEGKQGNFKNLREFVFKNIDGYFKIYSKHTPINLVRDLPQGFSALEPLVDLPIGINITRFQTLLALHRSYLTPGDSSSGWTAGAAAYYVGYLQPRTFLLKYNENGTITDAVDCALDPLSETKCTLKSFTVEKGIYQTSNFRVQPTESIVRFPNITNLCPFGEVFNATRFASVYAWNRKRISNCVADYSVLYNSASFSTFKCYGVSPTKLNDLCFTNVYADSFVIRGDEVRQIAPGQTGKIADYNYKLPDDFTGCVIAWNSNNLDSKVGGNYNYLYRLFRKSNLKPFERDISTEIYQAGSTPCNGVEGFNCYFPLQSYGFQPTNGVGYQPYRVVVLSFELLHAPATVCGPKKSTNLVKNKCVNFNFNGLTGTGVLTESNKKFLPFQQFGRDIADTTDAVRDPQTLEILDITPCSFGGVSVITPGTNTSNQVAVLYQDVNCTEVPVAIHADQLTPTWRVYSTGSNVFQTRAGCLIGAEHVNNSYECDIPIGAGICASYQTQTNSPRRARSVASQSIIAYTMSLGAENSVAYSNNSIAIPTNFTISVTTEILPVSMTKTSVDCTMYICGDSTECSNLLLQYGSFCTQLNRALTGIAVEQDKNTQEVFAQVKQIYKTPPIKDFGGFNFSQILPDPSKPSKRSFIEDLLFNKVTLADAGFIKQYGDCLGDIAARDLICAQKFNGLTVLPPLLTDEMIAQYTSALLAGTITSGWTFCAGAALQIPFAMQMAYRFNGIGVTQNVLYENQKLIANQFNSAIGKIQDSLSSTASALGKLQDVVNQNAQALNTLVKQLSSNFGAISSVLNDILSRLDKVEAEVQIDRLITGRLQSLQTYVTQQLIRAAEIRASANLAATKMSECVCGQSKRVDFCGKGYHLMSFPQSAPHGVVFLHVTYVPAQEKNFTTAPAICHDGKAHFPREGVFVSNGTHWFVTQRNFYEPQIITTDNTFVSGNCDVVIGIVNNTVYDPLQLELDSFKEELDKYFKNHTSPDVDLGDISGINASVVNIQKEIDRLNEVAKNLNESLIDLQELGKYEQYIKGGSGYIPEAPRDGQAYVRKDGEWVLLSTFL

SEQ ID NO: 6181 - protein, 1241 aa, Artificial Sequence
  SARS-CoV-2/India/1-31/2020__EPI_ISL_413523 spike protein (1-1211)(G889C_L1034C) Foldon construct
MFVFLVLLPLVSSQCVNLTTRTQLPPAYTNSFTRGVYYPDKVFRSSVLHSTQDLFLPFFSNVTWFHAIHVSGTNGTKRFDNPVLPFNDGVYFASTEKSNIIRGWIFGTTLDSKTQSLLIVNNATNVVIKVCEFQFCNDPFLGVYYHKNNKSWMESEFRVYSSANNCTFEYVSQPFLMDLEGKQGNFKNLREFVFKNIDGYFKIYSKHTPINLVRDLPQGFSALEPLVDLPIGINITRFQTLLALHRSYLTPGDSSSGWTAGAAAYYVGYLQPRTFLLKYNENGTITDAVDCALDPLSETKCTLKSFTVEKGIYQTSNFRVQPTESIVRFPNITNLCPFGEVFNATRFASVYAWNRKRISNCVADYSVLYNSASFSTFKCYGVSPTKLNDLCFTNVYADSFVIRGDEVRQIAPGQTGKIADYNYKLPDDFTGCVIAWNSNNLDSKVGGNYNYLYRLFRKSNLKPFERDISTEIYQAGSTPCNGVEGFNCYFPLQSYGFQPTNGVGYQPYRVVVLSFELLHAPATVCGPKKSTNLVKNKCVNFNFNGLTGTGVLTESNKKFLPFQQFGRDIADTTDAVRDPQTLEILDITPCSFGGVSVITPGTNTSNQVAVLYQDVNCTEVPVAIHADQLTPTWRVYSTGSNVFQTRAGCLIGAEHVNNSYECDIPIGAGICASYQTQTNSPRRARSVASQSIIAYTMSLGAENSVAYSNNSIAIPTNFTISVTTEILPVSMTKTSVDCTMYICGDSTECSNLLLQYGSFCTQLNRALTGIAVEQDKNTQEVFAQVKQIYKTPPIKDFGGFNFSQILPDPSKPSKRSFIEDLLFNKVTLADAGFIKQYGDCLGDIAARDLICAQKFNGLTVLPPLLTDEMIAQYTSALLAGTITSGWTFCAGAALQIPFAMQMAYRFNGIGVTQNVLYENQKLIANQFNSVIGKIQDSLSSTASALGKLQDVVNQNAQALNTLVKQLSSNFGAISSVLNDILSRLDKVEAEVQIDRLITGRLQSLQTYVTQQLIRAAEIRASANLAATKMSECVCGQSKRVDFCGKGYHLMSFPQSAPHGVVFLHVTYVPAQEKNFTTAPAICHDGKAHFPREGVFVSNGTHWFVTQRNFYEPQIITTDNTFVSGNCDVVIGIVNNTVYDPLQPELDSFKEELDKYFKNHTSPDVDLGDISGINASVVNIQKEIDRLNEVAKNLNESLIDLQELGKYEQYIKGGSGYIPEAPRDGQAYVRKDGEWVLLSTFL

SEQ ID NO: 6182 - protein, 1241 aa, Artificial Sequence
  SARS-CoV-2/Guangdong/GD2020087-P0008/2020__EPI_ISL_413863 spike protein (1-1211)(G889C_L1034C) Foldon construct
MFVFLVLLPLVSSQCVNLTTRTQLPPAYTNSFTRGVYYPDKVFRSSVLHSTQDLFLPFFSNVTWFHAIHVSGTNGTKRFDNPVLPFNDGVYFASTEKSNIIRGWIFGTTLDSKTQSLLIVNNATNVVIKVCEFQFCNDPFLGVYYHKNNKSWMESEFRVYSSANNCTFEYVSQPFLMDLEGKQGNFKNLREFVFKNIDGYFKIYSKHTPINLVRDLPQGFSALEPLVDLPIGINITRFQTLLALHRSYLTPGDSSSGWTAGAAAYYVGYLQPRTFLLKYNENGTITDAVDCALDPLSETKCTLKSFTVEKGIYQTSNFRVQPTESIVRFPNITNLCPFGEVFNATRFASVYAWNRKRISNCVADYSVLYNSASFSTFKCYGVSPTKLNDLCFTNVYADSFVIRGDEVREIAPGQTGKIADYNYKLPDDFTGCVIAWNSNNLDSKVGGNYNYLYRLFRKSNLKPFERDISTEIYQAGSTPCNGVEGFNCYFPLQSYGFQPTNGVGYQPYRVVVLSFELLHAPATVCGPKKSTNLVKNKCVNFNFNGLTGTGVLTESNKKFLPFQQFGRDIADTTDAVRDPQTLEILDITPCSFGGVSVITPGTNTSNQVAVLYQDVNCTEVPVAIHADQLTPTWRVYSTGSNVFQTRAGCLIGAEHVNNSYECDIPIGAGICASYQTQTNSPRRARSVASQSIIAYTMSLGAENSVAYSNNSIAIPTNFTISVTTEILPVSMTKTSVDCTMYICGDSTECSNLLLQYGSFCTQLNRALTGIAVEQDKNTQEVFAQVKQIYKTPPIKDFGGFNFSQILPDPSKPSKRSFIEDLLFNKVTLADAGFIKQYGDCLGDIAARDLICAQKFNGLTVLPPLLTDEMIAQYTSALLAGTITSGWTFCAGAALQIPFAMQMAYRFNGIGVTQNVLYENQKLIANQFNSAIGKIQDSLSSTASALGKLQDVVNQNAQALNTLVKQLSSNFGAISSVLNDILSRLDKVEAEVQIDRLITGRLQSLQTYVTQQLIRAAEIRASANLAATKMSECVCGQSKRVDFCGKGYHLMSFPQSAPHGVVFLHVTYVPAQEKNFTTAPAICHDGKAHFPREGVFVSNGTHWFVTQRNFYEPQIITTDNTFVSGNCDVVIGIVNNTVYDPLQPELDSFKEELDKYFKNHTSPDVDLGDISGINASVVNIQKEIDRLNEVAKNLNESLIDLQELGKYEQYIKGGSGYIPEAPRDGQAYVRKDGEWVLLSTFL

SEQ ID NO: 6183 - protein, 1241 aa, Artificial Sequence
  SARS-CoV-2/Sweden/01/2020__EPI_ISL_411951 spike protein (1-1211)(G889C_L1034C) Foldon construct
MFVFLVLLPLVSSQCVNLTTRTQLPPAYTNSFTRGVYYPDKVFRSSVLHSTQDLFLPFFSNVTWFHAIHVSGTNGTKRFDNPVLPFNDGVYFASTEKSNIIRGWIFGTTLDSKTQSLLIVNNATNVVIKVCEFQFCNDPFLGVYYHKNNKSWMESEFRVYSSANNCTFEYVSQPFLMDLEGKQGNFKNLREFVFKNIDGYFKIYSKHTPINLVRDLPQGFSALEPLVDLPIGINITRFQTLLALHRSYLTPGDSSSGWTAGAAAYYVGYLQPRTFLLKYNENGTITDAVDCALDPLSETKCTLKSFTVEKGIYQTSNFRVQPTESIVRFPNITNLCPFGEVFNATRFASVYAWNRKRISNCVADYSVLYNSASFSTFKCYGVSPTKLNDLCFTNVYADSFVIRGDEVRQIAPGQTGKIADYNYKLPDDFTGCVIAWNSNNLDSKVGGNYNYLYRLFRKSNLKPFERDISTEIYQAGSTPCNGVEGFNCYFPLQSYGFQPTNGVGYQPYRVVVLSFELLHAPATVCGPKKSTNLVKNKCVNFNFNGLTGTGVLTESNKKFLPFQQFGRDIADTTDAVRDPQTLEILDITPCSFGGVSVITPGTNTSNQVAVLYQDVNCTEVPVAIHADQLTPTWRVYSTGSNVFQTRAGCLIGAEHVNNSYECDIPIGAGICASYQTQTNSPRRARSVASQSIIAYTMSLGAENSVAYSNNSIAIPTNFTISVTTEILPVSMTKTSVDCTMYICGDSTECSNLLLQYGSFCTQLNRALTGIAVEQDKNTQEVFAQVKQIYKTPPIKDCGGFNFSQILPDPSKPSKRSFIEDLLFNKVTLADAGFIKQYGDCLGDIAARDLICAQKFNGLTVLPPLLTDEMIAQYTSALLAGTITSGWTFCAGAALQIPFAMQMAYRFNGIGVTQNVLYENQKLIANQFNSAIGKIQDSLSSTASALGKLQDVVNQNAQALNTLVKQLSSNFGAISSVLNDILSRLDKVEAEVQIDRLITGRLQSLQTYVTQQLIRAAEIRASANLAATKMSECVCGQSKRVDFCGKGYHLMSFPQSAPHGVVFLHVTYVPAQEKNFTTAPAICHDGKAHFPREGVFVSNGTHWFVTQRNFYEPQIITTDNTFVSGNCDVVIGIVNNTVYDPLQPELDSFKEELDKYFKNHTSPDVDLGDISGINASVVNIQKEIDRLNEVAKNLNESLIDLQELGKYEQYIKGGSGYIPEAPRDGQAYVRKDGEWVLLSTFL

SEQ ID NO: 6184 - protein, 1241 aa, Artificial Sequence
  SARS-CoV-2/Tianmen/HBCDC-HB-07/2020__EPI_ISL_412983 spike protein (1-1211)(G889C_L1034C) Foldon construct
MFVFLVLLPLVSSQCVNLTTRTQLPPAYTNSFTRGVYYPDKVFRSSVLHSTQDLFLPFFSNVTWFHAIHVSGTNGTKRFDNPVLPFNDGVYFASTEKSNIIRGWIFGTTLDSKTQSLLIVNNATNVVIKVCEFQFCNDPFLGVYYHKNNKSWMESEFRVYSSANNCTFEYVSQPFLMDLEGKQGNFKNLREFVFKNIDGYFKIYSKHTPINLVRDLPQGFSALEPLVDLPIGINITRFQTLLALHRSYLTPGDSSSGWTAGAAAYYVGYLQPRTFLLKYNENGTITDAVDCALDPLSETKCTLKSFTVEKGIYQTSNFRVQPTESIVRFPNITNLCPFGEVFNATRFASVYAWNRKRISNCVADYSVLYNSASFSTFKCYGVSPTKLNDLCFTNVYADSFVIRGDEVRQIAPGQTGKIADYNYKLPDDFTGCVIAWNSNNLDSKVGGNYNYLYRLFRKSNLKPFERDISTEIYQAGSTPCNGVEGFNCYFPLQSYGFQPTNGVGYQPYRVVVLSFELLHAPATVCGPKKSTNLVKNKCVNFNFNGLTGTGVLTESNKKFLPFQQFGRDIADTTDAVRDPQTLEILDITPCSFGGVSVITPGTNTSNQVAVLYQDLNCTEVPVAIHADQLTPTWRVYSTGSNVFQTRAGCLIGAEHVNNSYECDIPIGAGICASYQTQTNSPRRARSVASQSIIAYTMSLGAENSVAYSNNSIAIPTNFTISVTTEILPVSMTKTSVDCTMYICGDSTECSNLLLQYGSFCTQLNRALTGIAVEQDKNTQEVFAQVKQIYKTPPIKDFGGFNFSQILPDPSKPSKRSFIEDLLFNKVTLADAGFIKQYGDCLGDIAARDLICAQKFNGLTVLPPLLTDEMIAQYTSALLAGTITSGWTFCAGAALQIPFAMQMAYRFNGIGVTQNVLYENQKLIANQFNSAIGKIQDSLSSTASALGKLQDVVNQNAQALNTLVKQLSSNFGAISSVLNDILSRLDKVEAEVQIDRLITGRLQSLQTYVTQQLIRAAEIRASANLAATKMSECVCGQSKRVDFCGKGYHLMSFPQSAPHGVVFLHVTYVPAQEKNFTTAPAICHDGKAHFPREGVFVSNGTHWFVTQRNFYEPQIITTDNTFVSGNCDVVIGIVNNTVYDPLQPELDSFKEELDKYFKNHTSPDVDLGDISGINASVVNIQKEIDRLNEVAKNLNESLIDLQELGKYEQYIKGGSGYIPEAPRDGQAYVRKDGEWVLLSTFL

SEQ ID NO: 6185 - protein, 1241 aa, Artificial Sequence
  SARS-CoV-2/Hong Kong/case42_VM20002493/2020__EPI_ISL_414527 spike protein (1-1211)(G889C_L1034C) Foldon construct
MFVFLVLLPLVSSQCVNLTTRTQLPPAYTNSFTRGVYYPDKVFRSSVLHSTQDLFLPFFSNVTWFHAIHVSGTNGTKRFDNPVLPFNDGVYFASTEKSNIIRGWIFGTTLDSKTQSLLIVNNATNVVIKVCEFQFCNDPFLGVYYHKNNKSWMESEFRVYSSANNCTFEYVSQPFLMDLEGKQGNFKNLREFVFKNIDGYFKIYSKHTPINLVRDLPQGFSALEPLVDLPIGINITRFQTLLALHRSYLTPGDSSSGWTAGAAAYYVGYLQPRTFLLKYNENGTITDAVDCALDPLSETKCTLKSFTVEKGIYQTSNFRVQPTESIVRFPNITNLCPFGEVFNATRFASVYAWNRKRISNCVADYSVLYNSASFSTFKCYGVSPTKLNDLCFTNVYADSFVIRGDEVRQIAPGQTGKIADYNYKLPDDFTGCVIAWNSNNLDSKVGGNYNYLYRLFRKSNLKPFERDISTEIYQAGSTPCNGVEGFNCYFPLQSYGFQPTNGVGYQPYRVVVLSFELLHAPATVCGPKKSTNLVKNKCVNFNFNGLTGTGVLTESNKKFLPFQQFGRDIADTTDAVRDPQTLEILDITPCSFGGVSVITPGTNTSNQVAVLYQDVNCTEVPVAIHADQLTPTWRVYSTGSNVFQTRAGCLIGAEHVNNSYECDIPIGAGICASYQTQTNSPRRARSVASQSIIAYTMSLGAENSVAYSNNSIAIPTNFAISVTTEILPVSMTKTSVDCTMYICGDSTECSNLLLQYGSFCTQLNRALTGIAVEQDKNTQEVFAQVKQIYKTPPIKDFGGFNFSQILPDPSKPSKRSFIEDLLFNKVTLADAGFIKQYGDCLGDIAARDLICAQKFNGLTVLPPLLTDEMIAQYTSALLAGTITSGWTFCAGAALQIPFAMQMAYRFNGIGVTQNVLYENQKLIANQFNSAIGKIQDSLSSTASALGKLQDVVNQNAQALNTLVKQLSSNFGAISSVLNDILSRLDKVEAEVQIDRLITGRLQSLQTYVTQQLIRAAEIRASANLAATKMSECVCGQSKRVDFCGKGYHLMSFPQSAPHGVVFLHVTYVPAQEKNFTTAPAICHDGKAHFPREGVFVSNGTHWFVTQRNFYEPQIITTDNTFVSGNCDVVIGIVNNTVYDPLQPELDSFKEELDKYFKNHTSPDVDLGDISGINASVVNIQKEIDRLNEVAKNLNESLIDLQELGKYEQYIKGGSGYIPEAPRDGQAYVRKDGEWVLLSTFL

SEQ ID NO: 6186 - protein, 1241 aa, Artificial Sequence
  SARS-CoV-2/USA/CruiseA-23/2020__EPI_ISL_414482 spike protein (1-1211)(G889C_L1034C) Foldon construct
MFVFLVLLPLVSSQCVNLTTRTQLPPAYTNSFTRGVYYPDKVFRSSVLHSTQDLFLPFFSNVTWFHAIHVSGTNGTKRFDNPVLPFNDGVYFASTEKSNIIRGWIFGTTLDSKTQSLLIVNNATNVVIKVCEFQFCNDPFLGVYYHKNNKSWMESEFRVYSSANNCTFEYVSQPFLMDLEVKQGNFKNLREFVFKNIDGYFKIYSKHTPINLVRDLPQGFSALEPLVDLPIGINITRFQTLLALHRSYLTPGDSSSGWTAGAAAYYVGYLQPRTFLLKYNENGTITDAVDCALDPLSETKCTLKSFTVEKGIYQTSNFRVQPTESIVRFPNITNLCPFGEVFNATRFASVYAWNRKRISNCVADYSVLYNSASFSTFKCYGVSPTKLNDLCFTNVYADSFVIRGDEVRQIAPGQTGKIADYNYKLPDDFTGCVIAWNSNNLDSKVGGNYNYLYRLFRKSNLKPFERDISTEIYQAGSTPCNGVEGFNCYFPLQSYGFQPTNGVGYQPYRVVVLSFELLHAPATVCGPKKSTNLVKNKCVNFNFNGLTGTGVLTESNKKFLPFQQFGRDIADTTDAVRDPQTLEILDITPCSFGGVSVITPGTNTSNQVAVLYQDVNCTEVPVAIHADQLTPTWRVYSTGSNVFQTRAGCLIGAEHVNNSYECDIPIGAGICASYQTQTNSPRRARSVASQSIIAYTMSLGAENSVAYSNNSIAIPTNFTISVTTEILPVSMTKTSVDCTMYICGDSTECSNLLLQYGSFCTQLNRALTGIAVEQDKNTQEVFAQVKQIYKTPPIKDFGGFNFSQILPDPSKPSKRSFIEDLLFNKVTLADAGFIKQYGDCLGDIAARDLICAQKFNGLTVLPPLLTDEMIAQYTSALLAGTITSGWTFCAGAALQIPFAMQMAYRFNGIGVTQNVLYENQKLIANQFNSAIGKIQDSLSSTASALGKLQDVVNQNAQALNTLVKQLSSNFGAISSVLNDILSRLDKVEAEVQIDRLITGRLQSLQTYVTQQLIRAAEIRASANLAATKMSECVCGQSKRVDFCGKGYHLMSFPQSAPHGVVFLHVTYVPAQEKNFTTAPAICHDGKAHFPREGVFVSNGTHWFVTQRNFYEPQIITTDNTFVSGNCDVVIGIVNNTVYDPLQPELDSFKEELDKYFKNHTSPDVDLGDISGINASVVNIQKEIDRLNEVAKNLNESLIDLQELGKYEQYIKGGSGYIPEAPRDGQAYVRKDGEWVLLSTFL

SEQ ID NO: 6187 - protein, 1241 aa, Artificial Sequence
  SARS-CoV-2/Hong Kong/case85_VM20002868/2020__EPI_ISL_414519 spike protein (1-1211)(G889C_L1034C) Foldon construct
MFVFLVLVPLVSSQCVNLTTRTQLPPAYTNSFTRGVYYPDKVFRSSVLHSTQDLFLPFFSNVTWFHAIHVSGTNGTKRFDNPVLPFNDGVYFASTEKSNIIRGWIFGTTLDSKTQSLLIVNNATNVVIKVCEFQFCNDPFLGVYYHKNNKSWMESEFRVYSSANNCTFEYVSQPFLMDLEGKQGNFKNLREFVFKNIDGYFKIYSKHTPINLVRDLPQGFSALEPLVDLPIGINITRFQTLLALHRSYLTPGDSSSGWTAGAAAYYVGYLQPRTFLLKYNENGTITDAVDCALDPLSETKCTLKSFTVEKGIYQTSNFRVQPTESIVRFPNITNLCPFGEVFNATRFASVYAWNRKRISNCVADYSVLYNSASFSTFKCYGVSPTKLNDLCFTNVYADSFVIRGDEVRQIAPGQTGKIADYNYKLPDDFTGCVIAWNSNNLDSKVGGNYNYLYRLFRKSNLKPFERDISTEIYQAGSTPCNGVEGFNCYFPLQSYGFQPTNGVGYQPYRVVVLSFELLHAPATVCGPKKSTNLVKNKCVNFNFNGLTGTGVLTESNKKFLPFQQFGRDIADTTDAVRDPQTLEILDITPCSFGGVSVITPGTNTSNQVAVLYQDVNCTEVPVAIHADQLTPTWRVYSTGSNVFQTRAGCLIGAEHVNNSYECDIPIGAGICASYQTQTNSPRRARSVASQSIIAYTMSLGAENSVAYSNNSIAIPTNFTISVTTEILPVSMTKTSVDCTMYICGDSTECSNLLLQYGSFCTQLNRALTGIAVEQDKNTQEVFAQVKQIYKTPPIKDFGGFNFSQILPDPSKPSKRSFIEDLLFNKVTLADAGFIKQYGDCLGDIAARDLICAQKFNGLTVLPPLLTDEMIAQYTSALLAGTITSGWTFCAGAALQIPFAMQMAYRFNGIGVTQNVLYENQKLIANQFNSAIGKIQDSLSSTASALGKLQDVVNQNAQALNTLVKQLSSNFGAISSVLNDILSRLDKVEAEVQIDRLITGRLQSLQTYVTQQLIRAAEIRASANLAATKMSECVCGQSKRVDFCGKGYHLMSFPQSAPHGVVFLHVTYVPAQEKNFTTAPAICHDGKAHFPREGVFVSNGTHWFVTQRNFYEPQIITTDNTFVSGNCDVVIGIVNNTVYDPLQPELDSFKEELDKYFKNHTSPDVDLGDISGINASVVNIQKEIDRLNEVAKNLNESLIDLQELGKYEQYIKGGSGYIPEAPRDGQAYVRKDGEWVLLSTFL

SEQ ID NO: 6188 - protein, 1241 aa, Artificial Sequence; identical to SEQ ID NO: 6178
  SARS-CoV-2/England/200990660/2020__EPI_ISL_414523 spike protein (1-1211)(G889C_L1034C) Foldon construct

SEQ ID NO: 6189 - protein, 1241 aa, Artificial Sequence
  SARS-CoV-2/Australia/NSW09/2020__EPI_ISL_413595 spike protein (1-1211)(G889C_L1034C) Foldon construct
MFVFLVLLPLVSSQCVNLTTRTQLPPAYTNSFTRGVYYPDKVFRSSVLHSTQDLFLPFFSNVTWFHAIHVSGTNGTKRFDNPVLPFNDGVYFASTEKSNIIRGWIFGTTLDSKTQSLLIVNNATNVVIKVCEFQFCNDPFLGVYYHKNNKSWMESEFRVYSSANNCTFEYVSQPFLMDLEGKQGNFKNLREFVFKNIDGYFKIYSKHTPINLVRDLPQGFSALEPLVDLPIGINITRFQTLLALHRSYLTPGDSSSGWTAGAAAYYVGYLQPRTFLLKYNENGTITDAVDCALDPLSETKCTLKSFTVEKGIYQTSNFRVQPTESIVRFPNITNLCPFGEVFNATRFASVYAWNRKRISNCVADYSVLYNSASFSTFKCYGVSPTKLNDLCFTNVYADSFVIRGDEVRQIAPGQTGKIADYNYKLPDDFTGCVIAWNSNNLDSKVGGNYNYLYRLFRKSNLKPFERDISTEIYQAGSTPCNGVEGFNCYFPLQSYGFQPTNGVGYQPYRVVVLSFELLHAPATVCGPKKSTNLVKNKCVNFNFNGLTGTGVLTESNKKFLPFQQFGRDIADTTDAVRDPQTLEILDITPCSFGGVSVITPGTNTSNQVAVLYQDVNCTEVPVAIHADQLTPTWRVYSTGSNVFQTRAGCLIGAEHVNNSYECDIPIGAGICASYQTQTNSPRRARSVASQSIIAYTMSLGAENSVAYSNNSIAIPTNFTISVTTEILPVSMTKTSVDCTMYICGDSTECSNLLLQYGSFCTQLNRALTGIAVEQDKNTQEVFAQVKQIYKTPPIKDFGGFNFSQILPDPSKPSKRSFIEDLLFNKVTLADAGFIKQYGDCLGDIAARDLICAQKFNGLTVLPPLLTDEMIAQYTSALLAGTITSGWTFCAGAALQIPFAMQMAYRFNGIGVTQNVLYENQKLIANQFNSAIGKIQDSLSFTASALGKLQDVVNQNAQALNTLVKQLSSNFGAISSVLNDILSRLDKVEAEVQIDRLITGRLQSLQTYVTQQLIRAAEIRASANLAATKMSECVCGQSKRVDFCGKGYHLMSFPQSAPHGVVFLHVTYVPAQEKNFTTAPAICHDGKAHFPREGVFVSNGTHWFVTQRNFYEPQIITTDNTFVSGNCDVVIGIVNNTVYDPLQPELDSFKEELDKYFKNHTSPDVDLGDISGINASVVNIQKEIDRLNEVAKNLNESLIDLQELGKYEQYIKGGSGYIPEAPRDGQAYVRKDGEWVLLSTFL

SEQ ID NO: 6190 - protein, 1241 aa, Artificial Sequence; identical to SEQ ID NO: 6170
  SARS-CoV-2/Australia/NSW10/2020__EPI_ISL_413596 spike protein (1-1211)(G889C_L1034C) Foldon construct

SEQ ID NO: 6191 - protein, 1241 aa, Artificial Sequence
  SARS-CoV-2/Switzerland/1000477797/2020__EPI_ISL_413023 spike protein (1-1211)(G889C_L1034C) Foldon construct
MFVFLVLLPLVSSQCVNLTTRTQLPPAYTNSFTRGVYYPDKVFRSSVLHSTQDLFLPFFSNVTWFHAIHVSGTNGTKRFDNPVLPFNDGVYFASTEKSNIIRGWIFGTTLDSKTQSLLIVNNATNVVIKVCEFQFCNDPFLGVYYHKNNKSWMESEFRVYSSANNCTFEYVSQPFLMDLEGKQGNFKNLREFVFKNIDGYFNIYSKHTPINLVRDLPQGFSALEPLVDLPIGINITRFQTLLALHRSYLTPGDSSSGWTAGAAAYYVGYLQPRTFLLKYNENGTITDAVDCALDPLSETKCTLKSFTVEKGIYQTSNFRVQPTESIVRFPNITNLCPFGEVFNATRFASVYAWNRKRISNCVADYSVLYNSASFSTFKCYGVSPTKLNDLCFTNVYADSFVIRGDEVRQIAPGQTGKIADYNYKLPDDFTGCVIAWNSNNLDSKVGGNYNYLYRLFRKSNLKPFERDISTEIYQAGSTPCNGVEGFNCYFPLQSYGFQPTNGVGYQPYRVVVLSFELLHAPATVCGPKKSTNLVKNKCVNFNFNGLTGTGVLTESNKKFLPFQQFGRDIADTTDAVRDPQTLEILDITPCSFGGVSVITPGTNTSNQVAVLYQGVNCTEVPVAIHADQLTPTWRVYSTGSNVFQTRAGCLIGAEHVNNSYECDIPIGAGICASYQTQTNSPRRARSVASQSIIAYTMSLGAENSVAYSNNSIAIPTNFTISVTTEILPVSMTKTSVDCTMYICGDSTECSNLLLQYGSFCTQLNRALTGIAVEQDKNTQEVFAQVKQIYKTPPIKDFGGFNFSQILPDPSKPSKRSFIEDLLFNKVTLADAGFIKQYGDCLGDIAARDLICAQKFNGLTVLPPLLTDEMIAQYTSALLAGTITSGWTFCAGAALQIPFAMQMAYRFNGIGVTQNVLYENQKLIANQFNSAIGKIQDSLSSTASALGKLQDVVNQNAQALNTLVKQLSSNFGAISSVLNDILSRLDKVEAEVQIDRLITGRLQSLQTYVTQQLIRAAEIRASANLAATKMSECVCGQSKRVDFCGKGYHLMSFPQSAPHGVVFLHVTYVPAQEKNFTTAPAICHDGKAHFPREGVFVSNGTHWFVTQRNFYEPQIITTDNTFVSGNCDVVIGIVNNTVYDPLQPELDSFKEELDKYFKNHTSPDVDLGDISGINASVVNIQKEIDRLNEVAKNLNESLIDLQELGKYEQYIKGGSGYIPEAPRDGQAYVRKDGEWVLLSTFL

SEQ ID NO: 6192 - protein, 1241 aa, Artificial Sequence
  SARS-CoV-2/Belgium/BA-02291/2020__EPI_ISL_415159 spike protein (1-1211)(G889C_L1034C) Foldon construct
MFVFLVLLPLVSSQCVNLTTRTQLPPAYTNSFTRGVYYPDKVFRSSVLHSTQDLFLPFFSNVTWFHAIHVSGTNGTKRFDNPVLPFNDGVYFASTEKSNIIRGWIFGTTLDSKTQSLLIVNNATNVVIKVCEFQFCNDPFLGVYYHKNNKSWMESEFRVYSSANNCTFEYVSQPFLMDLEGKQGNFKNLREFVFKNIDGYFKIYSKHTPINLVRDLPQGFSALEPLVDLPIGINITRFQTLLALHRSYLTPGDSSSGWTAGAAAYYVGYLQPRTFLLKYNENGTITDAVDCALDPLSETKCTLKSFTVEKGIYQTSNFRVQPTESIVRFPNITNLCPFGEVFNATRFASVYAWNRKRISNCVADYSVLYNSASFSTFKCYGVSPTKLNDLCFTNVYADSFVIRGDEVRQIAPGQTGKIADYNYKLPDDFTGCVIAWNSNNLDSKVGGNYNYLYRLFRRSNLKPFERDISTEIYQAGSTPCNGVEGFNCYFPLQSYGFQPTNGVGYQPYRVVVLSFELLPAPATVCGPKKSTNLVKNKCVNFNFNGLTGTGVLTESNKKFLPFQQFGRDIADTTDAVRDPQTLEILDITPCSFGGVSVITPGTNTSNQVAVLYQGVNCTEVPVAIHADQLTPTWRVYSTGSNVFQTRAGCLIGAEHVNNSYECDIPIGAGICASYQTQTNSPRRARSVASQSIIAYTMSLGAENSVAYSNNSIAIPTNFTISVTTEILPVSMTKTSVDCTMYICGDSTECSNLLLQYGSFCTQLNRALTGIAVEQDKNTQEVFAQVKQIYKTPPIKDFGGFNFSQILPDPSKPSKRSFIEDLLFNKVTLADAGFIKQYGDCLGDIAARDLICAQKFNGLTVLPPLLTDEMIAQYTSALLAGTITSGWTFCAGAALQIPFAMQMAYRFNGIGVTQNVLYENQKLIANQFNSAIGKIQDSLSSAAPALGKLQDVVNQNAQALNTLVKQLSSNFGAISSVLNDILSRLDKVEAEVQIDRLITGRLQSLQTYVTQQLIRAAEIRASANLAATKMSECVCGQSKRVDFCGKGYHLMSFPQSAPHGVVFLHVTYVPAQEKNFTTAPAICHDGKAHFPREGVFVSNGTHWFVTQRNFYEPQIITTDNTFVSGNCDVVIGIVNNTVYDPLQPELDSFKEELDKYFKNHTSPDVDLGDISGINASVVNIQKEIDRLNEVAKNLNESLIDLQELGKYEQYIKGGSGYIPEAPRDGQAYVRKDGEWVLLSTFL

SEQ ID NO: 6193 - protein, 1241 aa, Artificial Sequence
  SARS-CoV-2/USA/WA8-UW5/2020__EPI_ISL_413486 spike protein (1-1211)(G889C_L1034C) Foldon construct
MFVFLVLLPLVSSQCVNLTTRTQLPPAYTNSFTRGVYYPDKVFRSSVLHSTQDLFLPFFSNVTWFHAIHVSGTNGTKRFDNPVLPFNDGVYFASTEKSNIIRGWIFGTTLDSKTQSLLIVNNATNVVIKVCEFQFCNDPFLGVYYHKNNKSWMESEFRVYSSANNCTFEYVSQPFLMDLEGKQGNFKNLREFVFKNIDGYFKIYSKHTPINLVRDLPQGFSALEPLVDLPIGINITRFQTLLALHRSYLTPGDSSSGWTAGAAAYYVGYLQPRTFLLKYNENGTITDAVDCALDPLSETKCTLKSFTVEKGIYQTSNFRVQPTESIVRFPNITNLCPFGEVFNATRFASVYAWNRKRISNCVADYSVLYNSASFSTFKCYGVSPTKLNDLCFTNVYADSFVIRGDEVRQIAPGQTGKIADYNYKLPDDFTGCVIAWNSNNLDSKVGGNYNYLYRLFRKSNLKPFERDISTEIYQAGSTPCNGVEGFNCYFPLQSYGFQPTNGVGYQPYRVVVLSFELLHAPATVCGPKKSTNLVKNKCVNFNFNGLTGTGVLTESNKKFLPFQQFGRDIADTTDAVRDPQTLEILDITPCSFGGVSVITPGTNTSNQVAVLYQDVNCTEVPVAIHADQLTPTWRVYSTGSNVFQTRAGCLIGAEYVNNSYECDIPIGAGICASYQTQTNSPRRARSVASQSIIAYTMSLGAENSVAYSNNSIAIPTNFTISVTTEILPVSMTKTSVDCTMYICGDSTECSNLLLQYGSFCTQLNRALTGIAVEQDKNTQEVFAQVKQIYKTPPIKDFGGFNFSQILPDPSKPSKRSFIEDLLFNKVTLADAGFIKQYGDCLGDIAARDLICAQKFNGLTVLPPLLTDEMIAQYTSALLAGTITSGWTFCAGAALQIPFAMQMAYRFNGIGVTQNVLYENQKLIANQFNSAIGKIQDSLSSTASALGKLQDVVNQNAQALNTLVKQLSSNFGAISSVLNDILSRLDKVEAEVQIDRLITGRLQSLQTYVTQQLIRAAEIRASANLAATKMSECVCGQSKRVDFCGKGYHLMSFPQSAPHGVVFLHVTYVPAQEKNFTTAPAICHDGKAHFPREGVFVSNGTHWFVTQRNFYEPQIITTDNTFVSGNCDVVIGIVNNTVYDPLQPELDSFKEELDKYFKNHTSPDVDLGDISGINASVVNIQKEIDRLNEVAKNLNESLIDLQELGKYEQYIKGGSGYIPEAPRDGQAYVRKDGEWVLLSTFL

SEQ ID NO: 6194 - protein, 1241 aa, Artificial Sequence
  SARS-CoV-2/England/20102000506/2020__EPI_ISL_415147 spike protein (1-1211)(G889C_L1034C) Foldon construct
MFVFLVLLPLVSSQCVNLTTRTQLPPAYTNSFTRGVYYPDKVFRSSVLHSTQDLFLPFFSNVTWFHAIHVSGTNGTKRFDNPVLPFNDGVYFASTEKSNIIRGWIFGTTLDSKTQSLLIVNNATNVVIKVCEFQFCNDPFLGVYYHKNNKSWMESEFRVYSSANNCTFEYVSQPFLMDLEGKQGNFKNLREFVFKNIDGYFKIYSKHTPINLVRDLPQGFSALEPLVDLPIGINITRFQTLLALHRSYLTPGDSSSGWTAGAAAYYVGYLQPRTFLLKYNENGTITDAVDCALDPLSETKCTLKSFTVEKGIYQTSNFRVQPTESIVRFPNITNLCPFGEVFNATRFASVYAWNRKRISNCVADYSVLYNSASFSTFKCYGVSPTKLNDLCFTNVYADSFVIRGDEVRQIAPGQTGKIADYNYKLPDDFTGCVIAWNSNNLDSKVGGNYNYLYRLFRKSNLKPFERDISTEIYQAGSTPCNGVEGFNCYFPLQSYGFQPTNGVGYQPYRVVVLSFELLHAPATVCGPKKSTNLVKNKCVNFNFNGLTGTGVLTESNKKFLPFQQFGRDIADTTDAVRDPQTLEILDITPCSFGGVSVITPGTNTSNQVAVLYQGVNCTEVPVAIHADQLTPTWRVYSTGSNVFQTRAGCLIGAEHVNNSYECDIPIGAGICASYQTQTNSPRRARSVASQSIIAYTMSLGAENSVAYSNNSIAIPTNFTISVTTEILPVSMTKTSVDCTMYICGDSTECSNLLLQYGSFCTQLNRALTGIAVEQDKNTQEVFAQVKQIYKTPPIKDFGGFNFSQILPDPSKPSKRSFIEDLLFNKVTLADAGFIKQYGYCLGDIAARDLICAQKFNGLTVLPPLLTDEMIAQYTSALLAGTITSGWTFCAGAALQIPFAMQMAYRFNGIGVTQNVLYENQKLIANQFNSAIGKIQDSLSSTASALGKLQDVVNQNAQALNTLVKQLSSNFGAISSVLNDILSRLDKVEAEVQIDRLITGRLQSLQTYVTQQLIRAAEIRASANLAATKMSECVCGQSKRVDFCGKGYHLMSFPQSAPHGVVFLHVTYVPAQEKNFTTAPAICHDGKAHFPREGVFVSNGTHWFVTQRNFYEPQIITTDNTFVSGNCDVVIGIVNNTVYDPLQPELDSFKEELDKYFKNHTSPDVDLGDISGINASVVNIQKEIDRLNEVAKNLNESLIDLQELGKYEQYIKGGSGYIPEAPRDGQAYVRKDGEWVLLSTFL

SEQ ID NO: 6195 - protein, 1241 aa, Artificial Sequence
  SARS-CoV-2/Belgium/VAG-03013/2020__EPI_ISL_415155 spike protein (1-1211)(G889C_L1034C) Foldon construct
MFVFLVLLPLVSSQCVNLTTRTQLPPAYTNSFTRGVYYPDKVFRSSVLHSTQDLFLPFFSNVTWFHAIHVSGTNGTKRFDNPVLPFNDGVYFASTEKSNIIRGWIFGTTLDSKTQSLLIVNNATNVVIKVCEFQFCNDPFLGVYYHKNNKSWMESEFRVYSSANNCTFEYVSQPFLMDLEGKQGNFKNLREFVFKNIDGYFKIYSKHTPINLVRDLPQGFSALEPLVDLPIGINITRFQTLLALHRSYLTPGDSSSGWTAGAAAYYVGYLQPRTFLLKYNENGTITDAVDCALDPLSETKCTLKSFTVEKGIYQTSNFRVQPTESIVRFPNITNLCPFGEVFNATRFASVYAWNRKRISNCVADYSVLYNSASFSTFKCYGVSPTKLNDLCFTNVYADSFVIRGDEVRQIAPGQTGKIADYNYKLPDDFTGCVIAWNSNNLDSKVGGNYNYLYRLFRKSNLKPFERDISTEIYQAGSTPCNGVEGFNCYFPLQSYGFQPTNGVGYQPYRVVVLSFELLHAPATVCGPKKSTNLVKNKCVNFNFNGLTGTGVLTESNKKFLPFQQFGRDIADTTDAVRDPQTLEILDITPCSFGGVSVITPGTNTSNQVAVLYQGVNCTEVPVAIHADQLTPTWRVYSTGSNVFQTRAGCLIGAEHVNNSYECDIPIGAGICASYQTQTNSPRRARSVASQSIIAYTMSLGAENSVAYSNNSIAIPTNFTISVTTEILPVSMTKTSVDCTMYICGDSTECSNLLLQYGSFCTQLNRALTGIAVEQDKNTQEVFAQVKQIYKTPPIKDFGGFNFSQILPDPSKPSKRSFIEDLLFNKVTLADAGFIKQYGDCLGDIAARDLICAQKFNGLTVLPPLLTDEMIAQYTSALLAGTITSGWTFCAGAALQIPFAMQMAYRFNGIGVTQNVLYENQKLIANQFNSAIGKIQDSLSSTATALGKLQDVVNQNAQALNTLVKQLSSNFGAISSVLNDILSRLDKVEAEVQIDRLITGRLQSLQTYVTQQLIRAAEIRASANLAATKMSECVCGQSKRVDFCGKGYHLMSFPQSAPHGVVFLHVTYVPAQEKNFTTAPAICHDGKAHFPREGVFVSNGTHWFVTQRNFYEPQIITTDNTFVSGNCDVVIGIVNNTVYDPLQPELDSFKEELDKYFKNHTSPDVDLGDISGINASVVNIQKEIDRLNEVAKNLNESLIDLQELGKYEQYIKGGSGYIPEAPRDGQAYVRKDGEWVLLSTFL

SEQ ID NO: 6196 - protein, 1241 aa, Artificial Sequence
  SARS-CoV-2/Belgium/BC-03016/2020__EPI_ISL_415157 spike protein (1-1211)(G889C_L1034C) Foldon construct
MFVFLVLLPLVSSQCVNLTTRTQLPPAYTNSFTRGVYYPDKVFRSSVLHSTQDLFLPFFSNVTWFHAIHVSGTNGTKRFDNPVLPFNDGVYFASTEKSNIIRGWIFGTTLDSKTQSLLIVNNATNVVIKVCEFQFCNDPFLGVYYHKNNKSWMESEFRVYSSANNCTFEYVSQPFLMDLEGKQGNFKNLREFVFKNIDGYFKIYSKHTPINLVRDLPQGFSALEPLVDLPIGINITRFQTLLALHRSYLTPGDSSSGWTAGAAAYYVGYLQPRTFLLKYNENGTITDAVDCALDPLSETKCTLKSFTVEKGIYQTSNFRVQPTESIVRFPNITNLCPFGEVFNATRFASVYAWNRKRISNCVADYSVLYNSASFSTFKCYGVSPTKLNDLCFTNVYADSFVIRGDEVRQIAPGQTGKIADYNYKLPDDFTGCVIAWNSNNLDSKVGGNYNYLYRLFRKSNLKPFERDISTEIYQAGSTPCNGVEGFNCYFPLQSYGFQPTNGVGYQPYRVVVLSFELLHAPATVCGPKKSTNLVKNKCVNFNFNGLTGTGVLTESNKKFLPFQQFGRDIADTTDAVRDPQTLEILDITPCSFGGVSVITPGTNTSNQVAVLYQGVNCTEVPVAIHADQLTPTWRVYSTGSNVFQTRAGCLIGAEHVNNSYECDIPIGAGICASYQTQTNSPRRARSVASQSIIAYTMSLGAENSVAYSNNSIAIPTNFTISVTTEILPVSMTKTSVDCTMYICGDSTECSNLLLQYGSFCTQLNRALTGIAVEQDKNTQEVFAQVKQIYKTPPIKDFGGFNFSQILPDPSKPSKRSFIEDLLFNKVTLADAGFIKQYGDCLGDIAARDLICAQKFNGLTVLPPLLTDEMIAQYTSALLAGTITSGWTFCAGAALQIPFAMQMAYRFNGIGVTQNVLYENQKLIANQFNSAIGKIQDSLSSTAPALGKLQDVVNQNAQALNTLVKQLSSNFGAISSVLNDILSRLDKVEAEVQIDRLITGRLQSLQTYVTQQLIRAAEIRASANLAATKMSECVCGQSKRVDFCGKGYHLMSFPQSAPHGVVFLHVTYVPAQEKNFTTAPAICHDGKAHFPREGVFVSNGTHWFVTQRNFYEPQIITTDNTFVSGNCDVVIGIVNNTVYDPLQPELDSFKEELDKYFKNHTSPDVDLGDISGINASVVNIQKEIDRLNEVAKNLNESLIDLQELGKYEQYIKGGSGYIPEAPRDGQAYVRKDGEWVLLSTFL

SEQ ID NO: 6197 - protein, 1241 aa, Artificial Sequence
  SARS-CoV-2/Germany/BavPat3/2020__EPI_ISL_414521 spike protein (1-1211)(G889C_L1034C) Foldon construct
MFVFLVLLPLVSSQCVNLTTRTQLPPAYTNSFTRGVYYPDKVFRSSVLHSTQDLFLPFFSNVTWFHAIHVSGTNGTKRFDNPVLPFNDGVYFASTEKSNIIRGWIFGTTLDSKTQSLLIVNNATNVVIKVCEFQFCNDPFLGVYYHKNNKSWMESEFRVYSSANNCTFEYVSQPFLMDLEGKQGNFKNLREFVFKNIDGYFKIYSKHTPINLVRDLPQGFSALEPLVDLPIGINITRFQTLLALHRSYLTPGDSSSGWTAGAAAYYVGYLQPRTFLLKYNENGTITDAVDCALDPLSETKCTLKSFTVEKGIYQTSNFRVQPTESIVRFPNITNLCPFGEVFNATRFASVYAWNRKRISNCVADYSVLYNSASFSTFKCYGVSPTKLNDLCFTNVYADSFVIRGDEVRQIAPGQTGKIADYNYKLPDDFTGCVIAWNSNNLDSKVGGNYNYLYRLFRKSNLKPFERDISTEIYQAGSTPCNGVEGFNCYFPLQSYGFQPTNGVGYQPYRVVVLSFELLHAPATVCGPKKSTNLVKNKCVNFNFNGLTGTGVLTESNKKFLPFQQFGRDIADTTDAVRDPQTLEILDITPCSFGGVSVITPGTNTSNQVAVLYQDVNCTEVPVAIHADQLTPTWRVYSTGSNVFQTRAGCLIGAEHVNNSYECDIPIGAGICASYQTQTNSPRRARSVASQSIIAYTMSLGAENSVAYSNNSIAIPTNFTISVTTEILPVSMTKTSVDCTMYICGDSTECSNLLLQYGSFCTQLNRALTGIAVEQDKNTQQVFAQVKQIYKTPPIKDFGGFNFSQILPDPSKPSKRSFIEDLLFNKVTLADAGFIKQYGDCLGDIAARDLICAQKFNGLTVLPPLLTDEMIAQYTSALLAGTITSGWTFCAGAALQIPFAMQMAYRFNGIGVTQNVLYENQKLIANQFNSAIGKIQDSLSSTASALGKLQDVVNQNAQALNTLVKQLSSNFGAISSVLNDILSRLDKVEAEVQIDRLITGRLQSLQTYVTQQLIRAAEIRASANLAATKMSECVCGQSKRVDFCGKGYHLMSFPQSAPHGVVFLHVTYVPAQEKNFTTAPAICHDGKAHFPREGVFVSNGTHWFVTQRNFYEPQIITTDNTFVSGNCDVVIGIVNNTVYDPLQPELDSFKEELDKYFKNHTSPDVDLGDISGINASVVNIQKEIDRLNEVAKNLNESLIDLQELGKYEQYIKGGSGYIPEAPRDGQAYVRKDGEWVLLSTFL

SEQ ID NO: 6198 - protein, 1241 aa, Artificial Sequence
  SARS-CoV-2/France/HF1805/2020__EPI_ISL_414628 spike protein (1-1211)(G889C_L1034C) Foldon construct
MFVFLVLLPLVSSQCVNLTTRTQLPPAYTNSFTRGVYYPDKVFRSSVLHSTQDLFLPFFSNVTWFHAIHVSGTNGTKRFDNPVLPFNDGVYFASTEKSNIIRGWIFGTTLDSKTQSLLIVNNATNVVIKVCEFQFCNDPFLGVYYHKNNKSWMESEFRVYSSANNCTFEYVSQPFLMDLEGKQGNFKNLREFVFKNIDGYFKIYSKHTPINLVRDLPQGFSALEPLVDLPIGINITRFQTLLALHRSYLTPGDSSSGWTAGAAAYYVGYLQPRTFLLKYNENGTITDAVDCALDPLSETKCTLKSFTVEKGIYQTSNFRVQPTESIVRFPNITNLCPFGEVFNATRFASVYAWNRKRISNCVADYSVLYNSASFSTFKCYGVSPTKLNDLCFTNVYADSFVIRGDEVRQIAPGQTGKIADYNYKLPDDFTGCVIAWNSNNLDSKVGGNYNYLYRLFRKSNLKPFERDISTEIYQAGSTPCNGVEGFNCYFPLQSYGFQPTNGVGYQPYRVVVLSFELLHAPATVCGPKKSTNLVKNKCVNFNFNGLTGTGVLTESNKKFLPFQQFGRDIADTTDAVRDPQTLEILDITPCSFGGVSVITPGTNTSNQVAVLYQGVNCTEVPVAIHADQLTPTWRVYSTGSNVFQTRAGCLIGAEHVNNSYECDIPIGAGICASYQTQTNSPRRARSVASQSIIAYTMSLGAENSVAYSNNSIAIPTNFTISVTTEILPVSMTKTSVDCTMYICGDSTECSNLLLQYGSFCTQLNRALTGIAVEQDKNTQEVFAQVKQIYKTPPIKDFGGFNFSQILPDPSKPSKRSFIEDLLFNKVTLADAGFIKQYGDCLGDIAARDLICAQKFNGLTVLPPLLTDEMIAQYTSALLAGTITSGWTFCAGAALQIPFAMQMAYRFNGIGVTQNVLYENQKLIANQFNSAIGKIQDSLSSTASALGKLQDVVNQNAQALNTLVKQLSSNFGAISSVLNDILSRLDKVEAEVQIDRLITGRLQSLQTYVTQQLIRAAEIRASANLAATKMSECVCGQSKRVDFCGKGYHLMSFPQSAPHGVVFLHVTYVPAQEKNFTTAPAICHDGKAHFPREGVFVSNGTHWFVTQRNFYEPQIITTDNTFVSGNCDVVIGVVNNTVYDPLQPELDSFKEELDKYFKNHTSPDVDLGDISGINASVVNIQKEIDRLNEVAKNLNESLIDLQELGKYEQYIKGGSGYIPEAPRDGQAYVRKDGEWVLLSTFL

SEQ ID NO: 6199 - protein, 1241 aa, Artificial Sequence
  SARS-CoV-2/Netherlands/ZuidHolland_9/2020__EPI_ISL_414445 spike protein (1-1211)(G889C_L1034C) Foldon construct
MFVFLVLLPLVSSQCVNLTTRTQLPPAYTNSFTRGVYYPDKVFRSSVLHSTQDLFLPFFSNVTWFHAIHVSGTNGTKRFDNPVLPFNDGVYFASTEKSNIIRGWIFGTTLDSKTQSLLIVNNATNVVIKVCEFQFCNDPFLGVYYHKNNKSWMESEFRVYSSANNCTFEYVSQPFLMDLEGKQGNFKNLREFVFKNIDGYFKIYSKHTPINLVRDLPQGFSALEPLVDLPIGINITRFQTLLALHRSYLTPGDSSSGWTAGAAAYYVGYLQPRTFLLKYNENGTITDAVDCALDPLSETKCTLKSFTVEKGIYQTSNFRVQPTESIVRFPNITNLCPFGEVFNATRFASVYAWNRKRISNCVADYSVLYNSASFSTFKCYGVSPTKLNDLCFTNVYADSFVIRGDEVRQIAPGQTGKIADYNYKLPDDFTGCVIAWNSNNLDSKVGGNYNYLYRLFRKSNLKPFERDISTEIYQAGSTPCNGVEGFNCYFPLQSYGFQPTNGVGYQPYRVVVLSFELLHAPATVCGPKKSTNLVKNKCVNFNFNGLTGTGVLTESNKKFLPFQQFGRDIADTTDAVRDPQTLEILDITPCSFGGVSVITPGTNTSNQVAVLYQGVNCTEVPVAIHADQLTPTWRVYSTGSNVFQTRAGCLIGAEHVNNSYECDIPIGAGICASYQTQTNSPRRARSVASQSIIAYTMSLGAENSVAYSNNSIAIPTNFTISVTTEILPVSMTKTSVDCTMYICGDSTECSNLLLQYGSFCTQLNRALTGIAVEQDKNTQEVFAQVKQIYKTPPIKDFGGFNFSQILPDPSKPSKRSFIEDLLFNKVTLADAGFIKQYGDCLGDIAARDLICVQKFNGLTVLPPLLTDEMIAQYTSALLAGTITSGWTFCAGAALQIPFAMQMAYRFNGIGVTQNVLYENQKLIANQFNSAIGKIQDSLSSTASALGKLQDVVNQNAQALNTLVKQLSSNFGAISSVLNDILSRLDKVEAEVQIDRLITGRLQSLQTYVTQQLIRAAEIRASANLAATKMSECVCGQSKRVDFCGKGYHLMSFPQSAPHGVVFLHVTYVPAQEKNFTTAPAICHDGKAHFPREGVFVSNGTHWFVTQRNFYEPQIITTDNTFVSGNCDVVIGIVNNTVYDPLQPELDSFKEELDKYFKNHTSPDVDLGDISGINASVVNIQKEIDRLNEVAKNLNESLIDLQELGKYEQYIKGGSGYIPEAPRDGQAYVRKDGEWVLLSTFL

SEQ ID NO: 6200 - protein, 1241 aa, Artificial Sequence
  SARS-CoV-2/Finland/FIN03032020A/2020__EPI_ISL_413602 spike protein (1-1211)(G889C_L1034C) Foldon construct
MFVFLVLLPLVSSQCVNLTTRTQLPPAYTNSFTRGVYYPDKVFRSSVLHSTQDLFLPFFSNVTWFHAIHVSGTNGTKRFDNPVLPFNDGVYFASTEKSNIIRGWIFGTTLDSKTQSLLIVNNATNVVIKVCEFQFCNDPFLGVYYHKNNKSWMESEFRVYSSANNCTFEYVSQPFLMDLEGKQGNFKNLREFVFKNIDGYFKIYSKHTPINLVRDLPQGFSALEPLVDLPIGINITRFQTLLALHRSYLTPGDSSSGWTAGAAAYYVGYLQPRTFLLKYNENGTITDAVDCALDPLSETKCTLKSFTVEKGIYQTSNFRVQPTESIVRFPNITNLCPFGEVFNATRFASVYAWNRKRISNCVADYSVLYNSASFSTFKCYGVSPTKLNDLCFTNVYADSFVIRGDEVRQIAPGQTGKIADYNYKLPDDFTGCVISWNSNNLDSKVGGNYNYLYRLFRKSNLKPFERDISTEIYQAGSTPCNGVEGFNCYFPLQSYGFQPTNGVGYQPYRVVVLSFELLHAPATVCGPKKSTNLVKNKCVNFNFNGLTGTGVLTESNKKFLPFQQFGRDIADTTDAVRDPQTLEILDITPCSFGGVSVITPGTNTSNQVAVLYQGVNCTEVPVAIHADQLTPTWRVYSTGSNVFQTRAGCLIGAEHVNNSYECDIPIGAGICASYQTQTNSPRRARSVASQSIIAYTMSLGAENSVAYSNNSIAIPTNFTISVTTEILPVSMTKTSVDCTMYICGDSTECSNLLLQYGSFCTQLNRALTGIAVEQDKNTQEVFAQVKQIYKTPPIKDFGGFNFSQILPDPSKPSKRSFIEDLLFNKVTLADAGFIKQYGDCLGDIAARDLICAQKFNGLTVLPPLLTDEMIAQYTSALLAGTITSGWTFCAGAALQIPFAMQMAYRFNGIGVTQNVLYENQKLIANQFNSAIGKIQDSLSSTASALGKLQDVVNQNAQALNTLVKQLSSNFGAISSVLNDILSRLDKVEAEVQIDRLITGRLQSLQTYVTQQLIRAAEIRASANLAATKMSECVCGQSKRVDFCGKGYHLMSFPQSAPHGVVFLHVTYVPAQEKNFTTAPAICHDGKAHFPREGVFVSNGTHWFVTQRNFYEPQIITTDNTFVSGNCDVVIGIVNNTVYDPLQPELDSFKEELDKYFKNHTSPDVDLGDISGINASVVNIQKEIDRLNEVAKNLNESLIDLQELGKYEQYIKGGSGYIPEAPRDGQAYVRKDGEWVLLSTFL

SEQ ID NO: 6201 - protein, 1241 aa, Artificial Sequence
  SARS-CoV-2/France/GE1977/2020__EPI_ISL_414632 spike protein (1-1211)(G889C_L1034C) Foldon construct
MFVFLVLLPLVSSQCVNLTTRTQLPPAYTNSFTRGVYYPDKVFRSSVLHSTQDLFLPFFSNVTWFHAIHVSGTNGTKRFDNPVLPFNDGVYFASTEKSNIIRGWIFGTTLDSKTQSLLIVNNATNVVIKVCEFQFCNDPFLGVYYHKNNKSWMESEFRVYSSANNCTFEYVSQPFLMDLEGKQGNFKNLREFVFKNIDGYFKIYSKHTPINLVRDLPQGFSALEPLVDLPIGINITRFQTLLALHRSYLTPGDSSSGWTAGAAAYYVGYLQPRTFLLKYNENGTITDAVDCALDPLSETKCTLKSFTVEKGIYQTSNFRVQPTESIVRFPNITNLCPFGEVFNATRFASVYAWNRKRISNCVADYSVLYNSASFSTFKCYGVSPTKLNDLCFTNVYADSFVIRGDEVRQIAPGQTGKIADYNYKLPDDFTGCVIAWNSNNLDSKVGGNYNYLYRLFRKSNLKPFERDISTEIYQAGSTPCNGVEGFNCYFPLQSYGFQPTNGVGYQPYRVVVLSFELLHAPATVCGPKKSTNLVKNKCVNFNFNGLTGTGVLTESNKKFLPFQQFGRDIADTTDAVRDPQTLEILDITPCSFGGVSVITPGTNTSNQVAVLYQGVNCTEVPVAIHADQLTPTWRVYSTGSNVFQTRAGCLIGAEHVNNSYECDIPIGAGICASYQTQTNSPRRARSVASQSIIAYTMSLGAENSVAYSNNSIAIPTNFTISVTTEILPVSMTKTSVDCTMYICGDSTECSNLLLQYGSFCTQLNRALTGIAVEQDKNTQEVFAQVKQIYKTPPIKDFGGFNFSQILPDPSKPSKRSFIEDLLFNKVTLADAGFIKQYGDCLGDIAARDLICAQKFNGLTVLPPLLTDEMIAQYTSALLAGTITSGWTFCAGAALQIPFAMQMAYRFNGIGVTQNVLYENQKLIANQFNSAIGKIQDSLFSTASALGKLQDVVNQNAQALNTLVKQLSSNFGAISSVLNDILSRLDKVEAEVQIDRLITGRLQSLQTYVTQQLIRAAEIRASANLAATKMSECVCGQSKRVDFCGKGYHLMSFPQSAPHGVVFLHVTYVPAQEKNFTTAPAICHDGKAHFPREGVFVSNGTHWFVTQRNFYEPQIITTDNTFVSGNCDVVIGIVNNTVYDPLQPELDSFKEELDKYFKNHTSPDVDLGDISGINASVVNIQKEIDRLNEVAKNLNESLIDLQELGKYEQYIKGGSGYIPEAPRDGQAYVRKDGEWVLLSTFL

SEQ ID NO: 6202 - protein, 1241 aa, Artificial Sequence
  SARS-CoV-2/Finland/FIN-313/2020__EPI_ISL_414641 spike protein (1-1211)(G889C_L1034C) Foldon construct
MFVFLVLLPLVSSQCVNLTTRTQLPPAYTNSFTRGVYYPDKVFRSSVLHSTQDLFLPFFSNVTWFHAIHVSGTNGTKRFDNPVLPFNDGVYFASTEKSNIIRGWIFGTTLDSKTQSLLIVNNATNVVIKVCEFQFCNDPFLGVYYHKNNKSWMESEFRVYSSANNCTFEYVSQPFLMDLEGKQGNFKNLREFVFKNIDGYFKIYSKHTPINLVRDLPQGFSALEPLVDLPIGINITRFKTLLALHRSYLTPGDSSSGWTAGAAAYYVGYLQPRTFLLKYNENGTITDAVDCALDPLSETKCTLKSFTVEKGIYQTSNFRVQPTESIVRFPNITNLCPFGEVFNATRFASVYAWNRKRISNCVADYSVLYNSASFSTFKCYGVSPTKLNDLCFTNVYADSFVIRGDEVRQIAPGQTGKIADYNYKLPDDFTGCVIAWNSNNLDSKVGGNYNYLYRLFRKSNLKPFERDISTEIYQAGSTPCNGVEGFNCYFPLQSYGFQPTNGVGYQPYRVVVLSFELLHAPATVCGPKKSTNLVKNKCVNFNFNGLTGTGVLTESNKKFLPFQQFGRDIADTTDAVRDPQTLEILDITPCSFGGVSVITPGTNTSNQVAVLYQGVNCTEVPVAIHADQLTPTWRVYSTGSNVFQTRAGCLIGAEHVNNSYECDIPIGAGICASYQTQTNSPRRARSVASQSIIAYTMSLGAENSVAYSNNSIAIPTNFTISVTTEILPVSMTKTSVDCTMYICGDSTECSNLLLQYGSFCTQLNRALTGIAVEQDKNTQEVFAQVKQIYKTPPIKDFGGFNFSQILPDPSKPSKRSFIEDLLFNKVTLADAGFIKQYGDCLGDIAARDLICAQKFNGLTVLPPLLTDEMIAQYTSALLAGTITSGWTFCAGAALQIPFAMQMAYRFNGIGVTQNVLYENQKLIANQFNSAIGKIQDSLSSTASALGKLQDVVNQNAQALNTLVKQLSSNFGAISSVLNDILSRLDKVEAEVQIDRLITGRLQSLQTYVTQQLIRAAEIRASANLAATKMSECVCGQSKRVDFCGKGYHLMSFPQSAPHGVVFLHVTYVPAQEKNFTTAPAICHDGKAHFPREGVFVSNGTHWFVTQRNFYEPQIITTDNTFVSGNCDVVIGIVNNTVYDPLQPELDSFKEELDKYFKNHTSPDVDLGDISGINASVVNIQKEIDRLNEVAKNLNESLIDLQELGKYEQYIKGGSGYIPEAPRDGQAYVRKDGEWVLLSTFL

SEQ ID NO: 6203 - protein, 1241 aa, Artificial Sequence
  SARS-CoV-2/Netherlands/ZuidHolland_2/2020__EPI_ISL_414556 spike protein (1-1211)(G889C_L1034C) Foldon construct
MFVFLVLLPLVSSQCVNLTTRTQLPPAYTNSFTRGVYYPDKVFRSSVLHSTQDLFLPFFSNVTWFHAIHVSGTNGTKRFDNPVLPFNDGVYFASTEKSNIIRGWIFGTTLDSKTQSLLIVNNATNVVIKVCEFQFCNDPFLGVYYHKNNKSWMESEFRVYSSANNCTFEYVSQPFLMDLEGKQGNFKNLREFVFKNIDGYFKIYSKHTPINLVRDLPQGFSALEPLVDLPIGINITRFQTLLALHRSYLTPGDSSSGWTAGAAAYYVGYLQPRTFLLKYNENGTITDAVDCALDPLSETKCTLKSFTVEKGIYQTSNFRVQPTESIVRFPNITNLCPFGEVFNATRFASVYAWNRKRISNCVADYSVLYNSASFSTFKCYGVSPTKLNDLCFTNVYADSFVIRGDEVRQIAPGQTGKIADYNYKLPDDFTGCVIAWNSNNLDSKVGGNYNYLYRLFRKSNLKPFERDISTEIYQAGSTPCNGVEGFNCYFPLQSYGFQPTNGVGYQPYRVVVLSFELLHAPATVCGPKKSTNLVKNKCVNFNFNGLTGTGVLTESNKKFLPFQQFGRDIADTTDAVRDPQTLEILDITPCSFGGVSVITPGTNTSNQVAVLYQGVNCTEVPVAIHADQLTPTWRVYSTGSNVFQTRAGCLIGAEHVNNSYECDIPIGAGICASYQTQTNSPRRARSVASQSIIAYTMSLGAENSVAYSNNSIAIPTNFTISVTTEILPVSMTKTSVDCTMYICGDSTECSNLLLQYGSFCTQLNRALTGIALEQDKNTQEVFAQVKQIYKTPPIKDFGGFNFSQILPDPSKPSKRSFIEDLLFNKVTLADAGFIKQYGDCLGDIAARDLICAQKFNGLTVLPPLLTDEMIAQYTSALLAGTITSGWTFCAGAALQIPFAMQMAYRFNGIGVTQNVLYENQKLIANQFNSAIGKIQDSLSSTASALGKLQDVVNQNAQALNTLVKQLSSNFGAISSVLNDILSRLDKVEAEVQIDRLITGRLQSLQTYVTQQLIRAAEIRASANLAATKMSECVCGQSKRVDFCGKGYHLMSFPQSAPHGVVFLHVTYVPAQEKNFTTAPAICHDGKAHFPREGVFVSNGTHWFVTQRNFYEPQIITTDNTFVSGNCDVVIGIVNNTVYDPLQPELDSFKEELDKYFKNHTSPDVDLGDISGINASVVNIQKEIDRLNEVAKNLNESLIDLQELGKYEQYIKGGSGYIPEAPRDGQAYVRKDGEWVLLSTFL

SEQ ID NO: 6204 - protein, 1241 aa, Artificial Sequence
  SARS-CoV-2/USA/WA-UW31/2020__EPI_ISL_414618 spike protein (1-1211)(G889C_L1034C) Foldon construct
MFVFLVLLPLVSSQCVNLTTRTQLPPAYTNSFTRGVYYPDKVFRSSVLHSTQDLFLPFFSNVTWFHAIHVSGTNGTKRFDNPVLPFNDGVYFASTEKSNIIRGWIFGTTLDSKTQSLLIVNNATNVVIKVCEFQFCNDPFLGVYYHKNNKSWMESEFRVYSSANNCTFEYVSQPFLMDLEGKQGNFKNLREFVFKNIDGYFKIYSKHTPINLVRDLPQGFSALEPLVDLPIGINITRFQTLLALHRSYLTPGDSSSGWTAGAAAYYVGYLQPRTFLLKYNENGTITDAVDCALDPLSETKCTLKSFTVEKGIYQTSNFRVQPTESIVRFPNITNLCPFGEVFNATRFASVYAWNRKRISNCVADYSVLYNSASFSTFKCYGVSPTKLNDLCFTNVYADSFVIRGDEVRQIAPGQTGKIADYNYKLPDDFTGCVIAWNSNNLDSKVGGNYNYLYRLFRKSNLKPFERDISTEIYQAGSTPCNGAEGFNCYFPLQSYGFQPTNGVGYQPYRVVVLSFELLHAPATVCGPKKSTNLVKNKCVNFNFNGLTGTGVLTESNKKFLPFQQFGRDIADTTDAVRDPQTLEILDITPCSFGGVSVITPGTNTSNQVAVLYQDVNCTEVPVAIHADQLTPTWRVYSTGSNVFQTRAGCLIGAEHVNNSYECDIPIGAGICASYQTQTNSPRRARSVASQSIIAYTMSLGAENSVAYSNNSIAIPTNFTISVTTEILPVSMTKTSVDCTMYICGDSTECSNLLLQYGSFCTQLNRALTGIAVEQDKNTQEVFAQVKQIYKTPPIKDFGGFNFSQILPDPSKPSKRSFIEDLLFNKVTLADAGFIKQYGDCLGDIAARDLICAQKFNGLTVLPPLLTDEMIAQYTSALLAGTITSGWTFCAGAALQIPFAMQMAYRFNGIGVTQNVLYENQKLIANQFNSAIGKIQDSLSSTASALGKLQDVVNQNAQALNTLVKQLSSNFGAISSVLNDILSRLDKVEAEVQIDRLITGRLQSLQTYVTQQLIRAAEIRASANLAATKMSECVCGQSKRVDFCGKGYHLMSFPQSAPHGVVFLHVTYVPAQEKNFTTAPAICHDGKAHFPREGVFVSNGTHWFVTQRNFYEPQIITTDNTFVSGNCDVVIGIVNNTVYDPLQPELDSFKEELDKYFKNHTSPDVDLGDISGINASVVNIQKEIDRLNEVAKNLNESLIDLQELGKYEQYIKGGSGYIPEAPRDGQAYVRKDGEWVLLSTFL

SEQ ID NO: 6205 - protein, 1241 aa, Artificial Sequence
  SARS-CoV-2/South Korea/SNU01/2020__EPI_ISL_411929 spike protein (1-1211)(G889C_L1034C) Foldon construct
MFVFLVLLPLVSSQCVNLTTRTQLPPAYTNSFTRGVYYPDKVFRSSVLHSTQDLFLPFFSNVTWFHAIHVSGTNGTKRFDNPVLPFNDGVYFASTEKSNIIRGWIFGTTLDSKTQSLLIVNNATNVVIKVCEFQFCNDPFLGVYYHKNNKSWMESEFRVYSSANNCTFEYVSQPFLMDLEGKQGNFKNLREFVFKNIDGYFKIYSKHTPINLVRDLPQGFWALEPLVDLPIGINITRFQTLLALHRSYLTPGDSSSGWTAGAAAYYVGYLQPRTFLLKYNENGTITDAVDCALDPLSETKCTLKSFTVEKGIYQTSNFRVQPTESIVRFPNITNLCPFGEVFNATRFASVYAWNRKRISNCVADYSVLYNSASFSTFKCYGVSPTKLNDLCFTNVYADSFVIRGDEVRQIAPGQTGKIADYNYKLPDDFTGCVIAWNSNNLDSKVGGNYNYLYRLFRKSNLKPFERDISTEIYQAGSTPCNGVEGFNCYFPLQSYGFQPTNGVGYQPYRVVVLSFELLHAPATVCGPKKSTNLVKNKCVNFNFNGLTGTGVLTESNKKFLPFQQFGRDIADTTDAVRDPQTLEILDITPCSFGGVSVITPGTNTSNQVAVLYQDVNCTEVPVAIHADQLTPTWRVYSTGSNVFQTRAGCLIGAEHVNNSYECDIPIGAGICASYQTQTNSPRRARSVASQSIIAYTMSLGAENSVAYSNNSIAIPTNFTISVTTEILPVSMTKTSVDCTMYICGDSTECSNLLLQYGSFCTQLNRALTGIAVEQDKNTQEVFAQVKQIYKTPPIKDFGGFNFSQILPDPSKPSKRSFIEDLLFNKVTLADAGFIKQYGDCLGDIAARDLICAQKFNGLTVLPPLLTDEMIAQYTSALLAGTITSGWTFCAGAALQIPFAMQMAYRFNGIGVTQNVLYENQKLIANQFNSAIGKIQDSLSSTASALGKLQDVVNQNAQALNTLVKQLSSNFGAISSVLNDILSRLDKVEAEVQIDRLITGRLQSLQTYVTQQLIRAAEIRASANLAATKMSECVCGQSKRVDFCGKGYHLMSFPQSAPHGVVFLHVTYVPAQEKNFTTAPAICHDGKAHFPREGVFVSNGTHWFVTQRNFYEPQIITTDNTFVSGNCDVVIGIVNNTVYDPLQPELDSFKEELDKYFKNHTSPDVDLGDISGINASVVNIQKEIDRLNEVAKNLNESLIDLQELGKYEQYIKGGSGYIPEAPRDGQAYVRKDGEWVLLSTFL

SEQ ID NO: 6206 - protein, 1241 aa, Artificial Sequence
  SARS-CoV-2/China/WF0004/2020__EPI_ISL_413694 spike protein (1-1211)(G889C_L1034C) Foldon construct
MFVFLVLLPLVSSQCVNLTTRTQLPPAYTNSFTRGVYYPDKVFRSSVLHSTQDLFLPFFSNVTWFHAIHVSGTNGTKRFDNPVLPFNDGVYFASTEKSNIIRGWIFGTTLDSKTQSLLIVNNATNVVIKVCEFQFCNDPFLGVYYHKNNKSWTESEFRVYSSANNCTFEYVSQPFLMDLEGKQGNFKNLREFVFKNIDGYFKIYSKHTPINLVRDLPQGFSALEPLVDLPIGINITRFQTLLALHRSYLTPGDSSSGWTAGAAAYYVGYLQPRTFLLKYNENGTITDAVDCALDPLSETKCTLKSFTVEKGIYQTSNFRVQPTESIVRFPNITNLCPFGEVFNATRFASVYAWNRKRISNCVADYSVLYNSASFSTFKCYGVSPTKLNDLCFTNVYADSFVIRGDEVRQIAPGQTGKIADYNYKLPDDFTGCVIAWNSNNLDSKVGGNYNYLYRLFRKSNLKPFERDISTEIYQAGSTPCNGVEGFNCYFPLQSYGFQPTNGVGYQPYRVVVLSFELLHAPATVCGPKKSTNLVKNKCVNFNFNGLTGTGVLTESNKKFLPFQQFGRDIADTTDAVRDPQTLEILDITPCSFGGVSVITPGTNTSNQVAVLYQDVNCTEVPVAIHADQLTPTWRVYSTGSNVFQTRAGCLIGAEHVNNSYECDIPIGAGICASYQTQTNSPRRARSVASQSIIAYTMSLGAENSVAYSNNSIAIPTNFTISVTTEILPVSMTKTSVDCTMYICGDSTECSNLLLQYGSFCTQLNRALTGIAVEQDKNTQEVFAQVKQIYKTPPIKDFGGFNFSQILPDPSKPSKRSFIEDLLFNKVTLADAGFIKQYGDCLGDIAARDLICAQKFNGLTVLPPLLTDEMIAQYTSALLAGTITSGWTFCAGAALQIPFAMQMAYRFNGIGVTQNVLYENQKLIANQFNSAIGKIQDSLSSTASALGKLQDVVNQNAQALNTLVKQLSSNFGAISSVLNDILSRLDKVEAEVQIDRLITGRLQSLQTYVTQQLIRAAEIRASANLAATKMSECVCGQSKRFDFCGKGYHLMSFPQSAPHGVVFLHVTYVPAQEKNFTTAPAICHDGKAHFPREGVFVSNGTHWFVTQRNFYEPQIITTDNTFVSGNCDVVIGIVNNTVYDPLQPELDSFKEELDKYFKNHTSPDVDLGDISGINASVVNIQKEIDRLNEVAKNLNESLIDLQELGKYEQYIKGGSGYIPEAPRDGQAYVRKDGEWVLLSTFL

SEQ ID NO: 6207 - protein, 1241 aa, Artificial Sequence
  SARS-CoV-2/China/WF0028/2020__EPI_ISL_413791 spike protein (1-1211)(G889C_L1034C) Foldon construct
MFVFLVLLPLVSSQCVNLTTRTQLPPAYTNSFTRGVYYPDKVFRSSVLHSTQDLFLPFFSNVTWFHAIHVSGTNGTKRFDNPVLPFNDGVYFASTEKSNIIRGWIFGTTLDSKTQSLLIVNNATNVVIKVCEFQFCNDPFLGVYYHKNNKSWMESEFRVYSSANNCTFEYVSQPFLMDLEGKQGNFKNLREFVFKNIDGYFKIYSKHTPINLVRDLPQGFSALEPLVDLPIGINITRFQTLLALHRSYLTPGDSSSGWTAGAAAYYVGYLQPRTFLLKYNENGTITDAVDCALDPLSETKCTLKSFTVEKGIYQTSNFRVQPTESIVRFPNITNLCPFGEVFNATRFASVYAWNRKRISNCVADYSVLYNSASFSTFKCYGVSPTKLNDLCFTNVYADSFVIRGDEVRQIAPGQTGKIADYNYKLPDDFTGCVIAWNSNNLDSKVGGNYNYLYRLFRKSNLKPFERDISTEIYQAGSTPCNGVEGFNCYFPLQSYGFQPTNGVGYQPYRVVVLSFELLHAPATVCGPKKSTNLVKNKCVNFNFNGLTGTGVLTESNKKFLPFQQFGRDIADTTDAVRDPQTLEILDITPCSFGGVSVITPGTNTSNQVAVLYQDVNCTEVPVAIHADQLTPTWRVYSTGSNVFQTRAGCLIGAEHVNNSYECDIPIGAGICASYQTQTNSPRRARSVASQSIIAYTMSLGAENSVAYSNNSIAIPTNFTISVTTEILPVSMTKTSVDCTMYICGDSTECSNLLLQYGSFCTQLNRALTGIAVEQDKNTQEVFAQVKQIYKTPPIKDFGGFNFSQILPDPSKPSKRSFIEDLLFNKVTLADAGFIKQYGDCLGDIAARDLICAQKFNGLTVLPPLLTDEMIAQYTSALLAGTITSGWTFCAGAALQIPFAMQMAYRFNGIGVTQNVLYENQKLIANQFNSAIGKIQDSLSSTASALGKLQDVVNQNAQALNTLVKQLSSNFGAISSVLNDILSRLDKVEAEVQIDRLITGRLQSLQTYVTQQLIRAAEIRASANLAATKMSECVCGQSKRVDFCGKGYHLMSFPQSAPHGVVFLHVTYVPAQEKNFTTAPAICHDGKAHFPREGVFVSNGTHWFVTQRNFYEPQIITTDNTFVSGNCDVVIGIVNNTVYDPLQPELESFKEELDKYFKNHTSPDVDLGDISGINASVVNIQKEIDRLNEVAKNLNESLIDLQELGKYEQYIKGGSGYIPEAPRDGQAYVRKDGEWVLLSTFL

SEQ ID NO: 6208 - protein, 1241 aa, Artificial Sequence
  SARS-CoV-2/2019-nCoV/USA-CruiseA-18/2020__MT159716.1 spike protein (1-1211)(G889C_L1034C) Foldon construct
MFVFLVLLPLVSSQCVNLTTRTQLPPAYTNSFTRGVYYPDKVFRSSVLHSTQDLFLPFFSNVTWFHAIHVSGTNGTKRFDNPVLPFNDGVYFASTEKSNIIRGWIFGTTLDSKTQSLLIVNNATNVVIKVCEFQFCNDPFLGVYYHKNNKSWMESELRVYSSANNCTFEYVSQPFLMDLEGKQGNFKNLREFVFKNIDGYFKIYSKHTPINLVRDLPQGFSALEPLVDLPIGINITRFQTLLALHRSYLTPGDSSSGWTAGAAAYYVGYLQPRTFLLKYNENGTITDAVDCALDPLSETKCTLKSFTVEKGIYQTSNFRVQPTESIVRFPNITNLCPFGEVFNATRFASVYAWNRKRISNCVADYSVLYNSASFSTFKCYGVSPTKLNDLCFTNVYADSFVIRGDEVRQIAPGQTGKIADYNYKLPDDFTGCVIAWNSNNLDSKVGGNYNYLYRLFRKSNLKPFERDISTEIYQAGSTPCNGVEGFNCYFPLQSYGFQPTNGVGYQPYRVVVLSFELLHAPATVCGPKKSTNLVKNKCVNFNFNGLTGTGVLTESNKKFLPFQQFGRDIADTTDAVRDPQTLEILDITPCSFGGVSVITPGTNTSNQVAVLYQDVNCTEVPVAIHADQLTPTWRVYSTGSNVFQTRAGCLIGAEHVNNSYECDIPIGAGICASYQTQTNSPRRARSVASQSIIAYTMSLGAENSVAYSNNSIAIPTNFTISVTTEILPVSMTKTSVDCTMYICGDSTECSNLLLQYGSFCTQLNRALTGIAVEQDKNTQEVFAQVKQIYKTPPIKDFGGFNFSQILPDPSKPSKRSFIEDLLFNKVTLADAGFIKQYGDCLGDIAARDLICAQKFNGLTVLPPLLTDEMIAQYTSALLAGTITSGWTFCAGAALQIPFAMQMAYRFNGIGVTQNVLYENQKLIANQFNSAIGKIQDSLSSTASALGKLQDVVNQNAQALNTLVKQLSSNFGAISSVLNDILSRLDKVEAEVQIDRLITGRLQSLQTYVTQQLIRAAEIRASANLAATKMSECVCGQSKRVDFCGKGYHLMSFPQSAPHGVVFLHVTYVPAQEKNFTTAPAICHDGKAHFPREGVFVSNGTHWFVTQRNFYEPQIITTDNTFVSGNCDVVIGIVNNTVYDPLQPELDSFKEELDKYFKNHTSPDVDLGDISGINASVVNIQKEIDRLNEVAKNLNESLIDLQELGKYEQYIKGGSGYIPEAPRDGQAYVRKDGEWVLLSTFL

SEQ ID NO: 6209 - protein, 1241 aa, Artificial Sequence
  SARS-CoV-2/SARS-CoV-2/Yunnan-01/human/2020/CHN__MT049951.1 spike protein (1-1211)(G889C_L1034C) Foldon construct
MFVFLVLLPLVSSQCVNLTTRTQLPPANTNSFTRGVYYPDKVFRSSVLHSTQDLFLPFFSNVTWFHAIHVSGTNGTKRFDNPVLPFNDGVYFASTEKSNIIRGWIFGTTLDSKTQSLLIVNNATNVVIKVCEFQFCNDPFLGVYYHKNNKSWMESEFRVYSSANNCTFEYVSQPFLMDLEGKQGNFKNLREFVFKNIDGYFKIYSKHTPINLVRDLPQGFSALEPLVDLPIGINITRFQTLLALHRSYLTPGDSSSGWTAGAAAYYVGYLQPRTFLLKYNENGTITDAVDCALDPLSETKCTLKSFTVEKGIYQTSNFRVQPTESIVRFPNITNLCPFGEVFNATRFASVYAWNRKRISNCVADYSVLYNSASFSTFKCYGVSPTKLNDLCFTNVYADSFVIRGDEVRQIAPGQTGKIADYNYKLPDDFTGCVIAWNSNNLDSKVGGNYNYLYRLFRKSNLKPFERDISTEIYQAGSTPCNGVEGFNCYFPLQSYGFQPTNGVGYQPYRVVVLSFELLHAPATVCGPKKSTNLVKNKCVNFNFNGLTGTGVLTESNKKFLPFQQFGRDIADTTDAVRDPQTLEILDITPCSFGGVSVITPGTNTSNQVAVLYQDVNCTEVPVAIHADQLTPTWRVYSTGSNVFQTRAGCLIGAEHVNNSYECDIPIGAGICASYQTQTNSPRRARSVASQSIIAYTMSLGAENSVAYSNNSIAIPTNFTISVTTEILPVSMTKTSVDCTMYICGDSTECSNLLLQYGSFCTQLNRALTGIAVEQDKNTQEVFAQVKQIYKTPPIKDFGGFNFSQILPDPSKPSKRSFIEDLLFNKVTLADAGFIKQYGDCLGDIAARDLICAQKFNGLTVLPPLLTDEMIAQYTSALLAGTITSGWTFCAGAALQIPFAMQMAYRFNGIGVTQNVLYENQKLIANQFNSAIGKIQDSLSSTASALGKLQDVVNQNAQALNTLVKQLSSNFGAISSVLNDILSRLDKVEAEVQIDRLITGRLQSLQTYVTQQLIRAAEIRASANLAATKMSECVCGQSKRVDFCGKGYHLMSFPQSAPHGVVFLHVTYVPAQEKNFTTAPAICHDGKAHFPREGVFVSNGTHWFVTQRNFYEPQIITTDNTFVSGNCDVVIGIVNNTVYDPLQPELDSFKEELDKYFKNHTSPDVDLGDISGINASVVNIQKEIDRLNEVAKNLNESLIDLQELGKYEQYIKGGSGYIPEAPRDGQAYVRKDGEWVLLSTFL

SEQ ID NO: 6210 - protein, 1241 aa, Artificial Sequence
  SARS-CoV-2/USA/WA-UW292/2020__EPI_ISL_418077 spike protein (1-1211)(G889C_L1034C) Foldon construct
MFVFLVLLPLVSSQCVNLTTRTQLPPAYTNSFTRGVYYPDKVFRSSVLHSTQDLFLPFFSNVTWFHAIHVSGTNGTKRFDNPVLPFNDGVYFASTEKSNIIRGWIFGTTLDSKTQSLLIVNNATNVVIKVCEFQFCNDPFLGVYYHKNNKSWMESEFRVYSSANNCTFEYVSQPFLMDLEGKQGNFKNLREFVFKNIDGYFKIYSKHTPINLVRDLPQGFSALEPLVDLPIGINITRFQTLLALHRSYLTPGDSSSGWTAGAAAYYVGYLQPRTFLLKYNENGTITDAVDCALDPLSETKCTLKSFTVEKGIYQTSNFRVQPTESIVRFPNITNLCPFGEVFNATRFASVYAWNRKRISNCVADYSVLYNSASFSTFKCYGVSPTKLNDLCFTNVYADSFVIRGDEVRQIAPGQTGKIADYNYKLPDDFTGCVIAWNSNNLDSKVGGNYNYLYRLFRKSNLKPFERDISTEIYQASSTPCNGVEGFNCYFPLQSYGFQPTNGVGYQPYRVVVLSFELLHAPATVCGPKKSTNLVKNKCVNFNFNGLTGTGVLTESNKKFLPFQQFGRDIADTTDAVRDPQTLEILDITPCSFGGVSVITPGTNTSNQVAVLYQDVNCTEVPVAIHADQLTPTWRVYSTGSNVFQTRAGCLIGAEHVNNSYECDIPIGAGICASYQTQTNSPRRARSVASQSIIAYTMSLGAENSVAYSNNSIAIPTNFTISVTTEILPVSMTKTSVDCTMYICGDSTECSNLLLQYGSFCTQLNRALTGIAVEQDKNTQEVFAQVKQIYKTPPIKDFGGFNFSQILPDPSKPSKRSFIEDLLFNKVTLADAGFIKQYGDCLGDIAARDLICAQKFNGLTVLPPLLTDEMIAQYTSALLAGTITSGWTFCAGAALQIPFAMQMAYRFNGIGVTQNVLYENQKLIANQFNSAIGKIQDSLSSTASALGKLQDVVNQNAQALNTLVKQLSSNFGAISSVLNDILSRLDKVEAEVQIDRLITGRLQSLQTYVTQQLIRAAEIRASANLAATKMSECVCGQSKRVDFCGKGYHLMSFPQSAPHGVVFLHVTYVPAQEKNFTTAPAICHDGKAHFPREGVFVSNGTHWFVTQRNFYEPQIITTDNTFVSGNCDVVIGIVNNTVYDPLQPELDSFKEELDKYFKNHTSPDVDLGDISGINASVVNIQKEIDRLNEVAKNLNESLIDLQELGKYEQYIKGGSGYIPEAPRDGQAYVRKDGEWVLLSTFL

SEQ ID NO: 6211 - protein, 1241 aa, Artificial Sequence
  SARS-CoV-2/Iceland/192/2020__EPI_ISL_417819 spike protein (1-1211)(G889C_L1034C) Foldon construct
MFVFFVLLPLVSSQCVNLTTRTQLPPAYTNSFTRGVYYPDKVFRSSVLHSTQDLFLPFFSNVTWFHAIHVSGTNGTKRFDNPVLPFNDGVYFASTEKSNIIRGWIFGTTLDSKTQSLLIVNNATNVVIKVCEFQFCNDPFLGVYYHKNNKSWMESEFRVYSSANNCTFEYVSQPFLMDLEGKQGNFKNLREFVFKNIDGYFKIYSKHTPINLVRDLPQGFSALEPLVDLPIGINITRFQTLLALHRSYLTPGDSSSGWTAGAAAYYVGYLQPRTFLLKYNENGTITDAVDCALDPLSETKCTLKSFTVEKGIYQTSNFRVQPTESIVRFPNITNLCPFGEVFNATRFASVYAWNRKRISNCVADYSVLYNSASFSTFKCYGVSPTKLNDLCFTNVYADSFVIRGDEVRQIAPGQTGKIADYNYKLPDDFTGCVIAWNSNNLDSKVGGNYNYLYRLFRKSNLKPFERDISTEIYQAGSTPCNGVEGFNCYFPLQSYGFQPTNGVGYQPYRVVVLSFELLHAPATVCGPKKSTNLVKNKCVNFNFNGLTGTGVLTESNKKFLPFQQFGRDIADTTDAVRDPQTLEILDITPCSFGGVSVITPGTNTSNQVAVLYQGVNCTEVPVAIHADQLTPTWRVYSTGSNVFQTRAGCLIGAEHVNNSYECDIPIGAGICASYQTQTNSPRRARSVASQSIIAYTMSLGAENSVAYSNNSIAIPTNFTISVTTEILPVSMTKTSVDCTMYICGDSTECSNLLLQYGSFCTQLNRALTGIAVEQDKNTQEVFAQVKQIYKTPPIKDFGGFNFSQILPDPSKPSKRSFIEDLLFNKVTLADAGFIKQYGDCLGDIAARDLICAQKFNGLTVLPPLLTDEMIAQYTSALLAGTITSGWTFCAGAALQIPFAMQMAYRFNGIGVTQNVLYENQKLIANQFNSAIGKIQDSLSSTASALGKLQDVVNQNAQALNTLVKQLSSNFGAISSVLNDILSRLDKVEAEVQIDRLITGRLQSLQTYVTQQLIRAAEIRASANLAATKMSECVCGQSKRVDFCGKGYHLMSFPQSAPHGVVFLHVTYVPAQEKNFTTAPAICHDGKAHFPREGVFVSNGTHWFVTQRNFYEPQIITTDNTFVSGNCDVVIGIVNNTVYDPLQPELDSFKEELDKYFKNHTSPDVDLGDISGINASVVNIQKEIDRLNEVAKNLNESLIDLQELGKYEQYIKGGSGYIPEAPRDGQAYVRKDGEWVLLSTFL

SEQ ID NO: 6212 - protein, 1241 aa, Artificial Sequence
  SARS-CoV-2/Belgium/ULG-6939/2020__EPI_ISL_417020 spike protein (1-1211)(G889C_L1034C) Foldon construct
MFVFLVLLPLVSSQCVNLTTRTQLPPAYTNSFTRGVYYPDKVFRSSVLHSTQDLFLPFFSNVTWFHAIHVSGTNGTKRFDNPVLPFNDGVYFASTEKSNIIRGWIFGTTLDSKTQSLLIVNNATNVVIKVCEFQFCNDPFLGVYYHKNNKSWMESEFRVYSSANNCTFEYVSQPFLMDLEGKQGNFKNLREFVFKNIDGYFKIYSKHTPINLVRDLPQGFSALEPLVDLPIGINITRFQTLLALHRSYLTPGDSSSGWTAGAAAYYVGYLQPRTFLLKYNENGTITDAVDCALDPLSETKCTLKSFTVEKGIYQTSNFRVQPTESIVRFPNITNLCPFGEVFNATRFASVYAWNRKRISNCVADYSVLYNSASFSTFKCYGVSPTKLNDLCFTNVYADSFVIRGDEVRQIAPGQTGKIADYNYKLPDDFTGCVIAWNSNNLDSKVGGNYNYLYRLFRKSNLKPFERDISTEIYQAGSTPCNGVEGFNCYFPLQSYGFQPTNGVGYQPYRVVVLSFELLHAPATVCGPKKSTNLVKNKCVNFNFNGLTGTGVLTESNKKFLPFQQFGRDIADTTDAVRDPQTLEILDITPCSFGGVSVITPGTNTSNQVAVLYQGVNCTEVPVAIHADQLTPTWRVYSTGSNVFQTRAGCLIGAEHVNNSYECDIPIGAGICASYQTQTNSPRRARSVASQSIIAYTMSLGAENSVVYSNNSIAIPTNFTISVTTEILPVSMTKTSVDCTMYICGDSTECSNLLLQYGSFCTQLNRALTGIAVEQDKNTQEVFAQVKQIYKTPPIKDFGGFNFSQILPDPSKPSKRSFIEDLLFNKVTLADAGFIKQYGDCLGDIAARDLICAQKFNGLTVLPPLLTDEMIAQYTSALLAGTITSGWTFCAGAALQIPFAMQMAYRFNGIGVTQNVLYENQKLIANQFNSAIGKIQDSLSSTASALGKLQDVVNQNAQALNTLVKQLSSNFGAISSVLNDILSRLDKVEAEVQIDRLITGRLQSLQTYVTQQLIRAAEIRASANLAATKMSECVCGQSKRVDFCGKGYHLMSFPQSAPHGVVFLHVTYVPAQEKNFTTAPAICHDGKAHFPREGVFVSNGTHWFVTQRNFYEPQIITTDNTFVSGNCDVVIGIVNNTVYDPLQPELDSFKEELDKYFKNHTSPDVDLGDISGINASVVNIQKEIDRLNEVAKNLNESLIDLQELGKYEQYIKGGSGYIPEAPRDGQAYVRKDGEWVLLSTFL

SEQ ID NO: 6213 - protein, 1241 aa, Artificial Sequence
  SARS-CoV-2/France/HF2496/2020__EPI_ISL_418231 spike protein (1-1211)(G889C_L1034C) Foldon construct
MFVFLVLLPLVSSQCVNLTTRTQLPPAYTNSFTRGVYYPDKVFRSSVLHSTQDLFLPFFSNVTWFHAIHVSGTNGTKRFDNPVLPFNDGVYFASTEKSNIIRGWIFGTTLDSKTQSLLIVNNATNVVIKVCEFQFCNDPFLGVYYHKNNKSWMESEFRVYSSANNCTFEYVSQPFLMDLEGKQGNFKNLREFVFKNIDGYFKIYSKHTPINLVRDLPQGFSALEPLVDLPIGINITRFQTLLALHRSYLTPGDSSSGWTAGAAAYYVGYLQPRTFLLKYNENGTITDAVDCALDPLSETKCTLKSFTVEKGIYQTSNFRVQPTESIVRFPNITNLCPFGEVFNATRFASVYAWNRKRISNCVADYSVLYNSASFSTFKCYGVSPTKLNDLCFTNVYADSFVIRGDEVRQIAPGQTGKIADYNYKLPDDFTGCVIAWNSNNLDSKVGGNYNYLYRLFRKSNLKPFERDISTEIYQAGSTPCNGVEGFNCYFPLQSYGFQPTNGVGYQPYRVVVLSFELLHAPATVCGPKKSTNLVKNKCVNFNFNGLTGTGVLTESNKKFLPFQQFGRDIADTTDAVRDPQTLEILDITPCSFGGVSVITPGTNTSNQVAVLYQGVNCTEVPVAIHADQLTPTWRVYSTGSNVFQTRAGCLIGAEHVNNSYECDIPIGAGICASYQTQTNSPRRARSVASQSIIAYTMSLGAENSVAYSNNSIAIPTNFTISVTTEILPVSMTKTSVDCTMYICGDSTECSNLLLQYGSFCTQLNRALTGIAVEQDKNTQEVFAQVKQIYKTPPIKDFGGFNFSQILPDPSKPSKRSFIEDLLFNKVTLADAGFIKQYGDCLGDIVARDLICAQKFNGLTVLPPLLTDEMIAQYTSALLAGTITSGWTFCAGAALQIPFAMQMAYRFNGIGVTQNVLYENQKLIANQFNSAIGKIQDSLSSTASALGKLQDVVNQNAQALNTLVKQLSSNFGAISSVLNDILSRLDKVEAEVQIDRLITGRLQSLQTYVTQQLIRAAEIRASANLAATKMSECVCGQSKRVDFCGKGYHLMSFPQSAPHGVVFLHVTYVPAQEKNFTTAPAICHDGKAHFPREGVFVSNGTHWFVTQRNFYEPQIITTDNTFVSGNCDVVIGIVNNTVYDPLQPELDSFKEELDKYFKNHTSPDVDLGDISGINASVVNIQKEIDRLNEVAKNLNESLIDLQELGKYEQYIKGGSGYIPEAPRDGQAYVRKDGEWVLLSTFL

SEQ ID NO: 6214 - protein, 1241 aa, Artificial Sequence
  SARS-CoV-2/USA/WA-UW291/2020__EPI_ISL_418076 spike protein (1-1211)(G889C_L1034C) Foldon construct
MFVFLVLLPLVSSQCVNLTTRTQLPPAYTNSFTRGVYYPDKVFRSSVLHSTQDLFLPFFSNVTWFHAIHVSGTNGTKRFDNPVLPFNDGVYFASTEKSNIIRGWIFGTTLDSKTQSLLIVNNATNVVIKVCEFQFCNDPFLGVYYHKNNKSWMESEFRVYSSANNCTFEYVSQPFLMDLEGKQGNFKNLREFVFKNIDGYFKIYSKHTPINLVRDLPQGFSALEPLVDLPIGINITRFQTLLALHRSYLTPGDSSSGWTAGAAAYYVGYLQPRTFLLKYNENGTITDAVDCALDPLSETKCTLKSFTVEKGIYQTSNFRVQPTESIVRFPNITNLCPFGEVFNATRFASVYAWNRKRISNCVADYSVLYNSASFSTFKCYGVSPTKLNDLCFTNVYADSFVIRGDEVRQIAPGQTGKIADYNYKLPDDFTGCVIAWNSNNLDSKVGGNYNYLYRLFRKSNLKPFERDISTEIYQAGSTPCNGVEGFNCYFPLQSYGFQPTNGVGYQPYRVVVLSFELLHAPATVCGPKKSTNLVKNKCVNFNFNGLTGTGVLTESNKKFLPFQQFGRDIADTTDAVRDPQTLEILDITPCSFGGVSVITPGTNTSNQVAVLYQGVNCTEVPVAIHADQLTPTWRVYSTGSNVFQTRAGCLIGAEHVNNSYECDIPIGAGICASYQTQTNSPRRARSVASQSIIAYTMSLGAENSVAYSNNSIAIPTNFTISVTTEILPVSMTKTSVDCTMYICGDSTECSNLLLQYGSFCTQLNRALTGIAVEQDKNTQEVFAQVKQIYKTPPIKDFGGFNFSQILPDPSKPSKRSFIEDLLFNKVTLADAGFIKQYGDCLGDIAARDLICAQKFNGLTVLPPLLTDEMIAQYTSALLAGTITSGWTFCAGAALQIPFAMQMAYRFNGIGVTQNVLYENQKLIANQFNSAIGKIQYSLSSTASALGKLQDVVNQNAQALNTLVKQLSSNFGAISSVLNDILSRLDKVEAEVQIDRLITGRLQSLQTYVTQQLIRAAEIRASANLAATKMSECVCGQSKRVDFCGKGYHLMSFPQSAPHGVVFLHVTYVPAQEKNFTTAPAICHDGKAHFPREGVFVSNGTHWFVTQRNFYEPQIITTDNTFVSGNCDVVIGIVNNTVYDPLQPELDSFKEELDKYFKNHTSPDVDLGDISGINASVVNIQKEIDRLNEVAKNLNESLIDLQELGKYEQYIKGGSGYIPEAPRDGQAYVRKDGEWVLLSTFL

SEQ ID NO: 6215 - protein, 1241 aa, Artificial Sequence; identical to SEQ ID NO: 6178
  SARS-CoV-2/Portugal/PT0034/2020__EPI_ISL_418019 spike protein (1-1211)(G889C_L1034C) Foldon construct

SEQ ID NO: 6216 - protein, 1241 aa, Artificial Sequence
  SARS-CoV-2/Iceland/202/2020__EPI_ISL_417750 spike protein (1-1211)(G889C_L1034C) Foldon construct
MFVFLVLLPLVSSQCVNLTTRTQLPPAYTNSFTRGVYYPDKVFRSSVLHSTQDLFLPFFSNVTWFHAIHVSGTNGTKRFDNPVLPFNDGVYFASTEKSNIIRGWIFGTTLDSKTQSLLIVNNATNVVIKVCEFQFCNDPFLGVYYHKNNKSWMESEFRVYSSANNCTFEYVSQPFLMDLEGKQGNFKNLREFVFKNIDGYFKIYSKHTPINLVRDLPQGFSALEPLVDLPIGINITRFQTLLALHRSYLTPGDSSSGWTAGAAAYYVGYLQPRTFLLKYNENGTITDAVDCALDPLSETKCTLKSFTVEKGIYQTSNFRVQPTESIVRFPNITNLCPFGEVFNATRFASVYAWNRKRISNCVADYSVLYNSASFSTFKCYGVSPTKLNDLCFTNVYADSFVIRGDEVRQIAPGQTGKIADYNYKLPDDFTGCVIAWNSNNLDSKVGGNYNYLYRLFRKSNLKPFERDISTEIYQAGSTPCNGVEGFNCYFPLQSYGFQPTNGVGYQPYRVVVLSFELLHAPATVCGPKKSTNLVKNKCVNFNFNGLTGTGVLTESNKKFLPFQQFGRDIADTTDAVRDPQTLEILDITPCSFGGVSVITPGTNTSNQVAVLYQDVNCTEVPVAIHADQLTPTWRVYSTGSNVFQTRAGCLIGAEHVNNSYECDIPIGAGICASYQTQTNSPRRARSVASQSIIAYTMSLGAENSVAYSNNSIAIPTNFTISVTTEILPVSMTKTSVDCTMYICGDSTECSNLLLQYGSFCTQLNRALTGIAVEQDKNTQEVFAQVKQIYKTPPIKDFGGFNFSQILPDPSKPSKRSFIEDLLFNKVTLADAGFIKQYGDCLGDIAARDLICAQKFNGLTVLPPLLTDEMIAQYTSALLAGTITSGWTFCAGAALQIPFAMQMAYRFNGIGVTQNVLYENQKLIANQFNSAIGKIQDSLSSTASALGKLQDVVNQNAQALNTLVKQLSSNFGAISSVLNDILSRLDKVEAEVQIDRLITGRLQSLQTYVTQQLIRAAEIRASANLAATKMSECVCGQSKRVDFCGKGYHLMSFPQSAPHGVVFLHVTYVPAQEKNFTTAPAICHDGKAHFPREGVFVSNGTHWFVTQRNFYEPQIITTDNTFVSGNCDVVIGIVNNTVYDPLQPELDSFKEELDKYFKNHTSPDVDLGDIPGINASVVNIQKEIDRLNEVAKNLNESLIDLQELGKYEQYIKGGSGYIPEAPRDGQAYVRKDGEWVLLSTFL

SEQ ID NO: 6217 - protein, 1241 aa, Artificial Sequence
  SARS-CoV-2/USA/WA-UW261/2020__EPI_ISL_418046 spike protein (1-1211)(G889C_L1034C) Foldon construct
MFVFLVLLPLVSSQCVNLTTRTQLPPAYTNSFTRGVYYPDKVFRSSVLHSTQDLFLPFFSNVTWFHAIHVSGTNGTKRFDNPVLPFNDGVYFASTEKSNIIRGWIFGTTLDSKTQSLLIVNNATNVVIKVCEFQFCNDPFLGVYYHKNNKSWMESEFRVYSSANNCTFEYVSQPFLMDLEGKQGNFKNLREFVFKNIDGYFKIYSKHTPINLVRDLPQGFSALEPLVDLPIGINITRFQTLLALHRSYLTPGDSSSGWTAGAAAYYVGYLQPRTFLLKYNENGTITDAVDCALDPLSETKCTLKSFTVEKGIYQTSNFRVQPTESIVRFPNITNLCPFGEVFNATRFTSVYAWNRKRISNCVADYSVLYNSASFSTFKCYGVSPTKLNDLCFTNVYADSFVIRGDEVRQIAPGQTGKIADYNYKLPDDFTGCVIAWNSNNLDSKVGGNYNYLYRLFRKSNLKPFERDISTEIYQAGSTPCNGVEGFNCYFPLQSYGFQPTNGVGYQPYRVVVLSFELLHAPATVCGPKKSTNLVKNKCVNFNFNGLTGTGVLTESNKKFLPFQQFGRDIADTTDAVRDPQTLEILDITPCSFGGVSVITPGTNTSNQVAVLYQDVNCTEVPVAIHADQLTPTWRVYSTGSNVFQTRAGCLIGAEHVNNSYECDIPIGAGICASYQTQTNSPRRARSVASQSIIAYTMSLGAENSVAYSNNSIAIPTNFTISVTTEILPVSMTKTSVDCTMYICGDSTECSNLLLQYGSFCTQLNRALTGIAVEQDKNTQEVFAQVKQIYKTPPIKDFGGFNFSQILPDPSKPSKRSFIEDLLFNKVTLADAGFIKQYGDCLGDIAARDLICAQKFNGLTVLPPLLTDEMIAQYTSALLAGTITSGWTFCAGAALQIPFAMQMAYRFNGIGVTQNVLYENQKLIANQFNSAIGKIQDSLSSTASALGKLQDVVNQNAQALNTLVKQLSSNFGAISSVLNDILSRLDKVEAEVQIDRLITGRLQSLQTYVTQQLIRAAEIRASANLAATKMSECVCGQSKRVDFCGKGYHLMSFPQSAPHGVVFLHVTYVPAQEKNFTTAPAICHDGKAHFPREGVFVSNGTHWFVTQRNFYEPQIITTDNTFVSGNCDVVIGIVNNTVYDPLQPELDSFKEELDKYFKNHTSPDVDLGDISGINASVVNIQKEIDRLNEVAKNLNESLIDLQELGKYEQYIKGGSGYIPEAPRDGQAYVRKDGEWVLLSTFL

SEQ ID NO: 6218 - protein, 1241 aa, Artificial Sequence
  SARS-CoV-2/Portugal/PT0035/2020__EPI_ISL_418020 spike protein (1-1211)(G889C_L1034C) Foldon construct
MFVFLVLLPLVSSQCVNLTTRTQLPPAYTNSFTRGVYYPDKVFRSSVLHSTQDLFLPFFSNVTWFHAIHVSGTNGTKRFDNPVLPFNDGVYFASTEKSNIIRGWIFGTTLDSKTQSLLIVNNATNVVIKVCEFQFCNDPFLGVYYHKNNKSWMESEFRVYSSANNCTFEYVSQPFLMDLEGKQGNFKNLREFVFKNIDGYFKIYSKHTPINLVRDLPQGFSALEPLVDLPIGINITRFQTLLALHRSYLTPGDSSSGWTAGAAAYYVGYLQPRTFLLKYNENGTITDAVDCALDPLSETKCTLKSFTVEKGIYQTSNFRVQPTESIVRFPNITNLCPFGEVFNATRFASVYAWNRKRISNCVADYSVLYNSASFSTFKCYGVSPTKLNDLCFTNVYADSFVIRGDEVRQIAPGQTGKIADYNYKLPDDFTGCVIAWNSNNLDSKVGGNYNYLYRLFRKSNLKPFERDISTEIYQAGSTPCNGVEGFNCYFPLQSYGFQPTNGVGYQPYRVVVLSFELLHAPATVCGPKKSTNLVKNKCVNFNFNGLTGTGVLTESNKKFLPFQQFGRDIADTTDAVRDPQTLEILDITPCSFGGVSVITPGTNTSNQVAVLYQDVNCTEVPVAIHADQLTPTWRVYSTGSNVFQTRAGCLIGAEHVNNSYECDIPIGAGICASYQTQTNSPRRARSVASQSIIAYTMSLGAENSVAYSNNSIAIPTNFTISVTTEILPVSMTKTSVDCTMYICGDSTECSNLLLQYGSFCTQLNRALTGIAVEQDKNTQEVFAQVKQIYKTPPIKDFGGFNFSQILPDPSKPSKRSFIEDLLFNKVTLADAGFIKQYGDCLGDISARDLICAQKFNGLTVLPPLLTDEMIAQYTSALLAGTITSGWTFCAGAALQIPFAMQMAYRFNGIGVTQNVLYENQKLIANQFNSAIGKIQDSLSSTASALGKLQDVVNQNAQALNTLVKQLSSNFGAISSVLNDILSRLDKVEAEVQIDRLITGRLQSLQTYVTQQLIRAAEIRASANLAATKMSECVCGQSKRVDFCGKGYHLMSFPQSAPHGVVFLHVTYVPAQEKNFTTAPAICHDGKAHFPREGVFVSNGTHWFVTQRNFYEPQIITTDNTFVSGNCDVVIGIVNNTVYDPLQPELDSFKEELDKYFKNHTSPDVDLGDISGINASVVNIQKEIDRLNEVAKNLNESLIDLQELGKYEQYIKGGSGYIPEAPRDGQAYVRKDGEWVLLSTFL

SEQ ID NO: 6219 - protein, 1241 aa, Artificial Sequence
  SARS-CoV-2/USA/NY-NYUMC7/2020__EPI_ISL_418192 spike protein (1-1211)(G889C_L1034C) Foldon construct
MFVFLVLLPLVSSQCVNLTTRTQLPPAYTNSFTRGVYYPDKVFRSSVLHSTQDLFLPFFSNVTWFHAIHVSGTNGTKRFDNPVLPFNDGVYFASTEKSNIIRGWIFGTTLDSKTQSLLIVNNATNVVIKVCEFQFCNDPFLGVYHHKNNKSWMESEFRVYSSANNCTFEYVSQPFLMDLEGKQGNFKNLREFVFKNIDGYFKIYSKHTPINLVRDLPQGFSALEPLVDLPIGINITRFQTLLALHRSYLTPGDSSSGWTAGAAAYYVGYLQPRTFLLKYNENGTITDAVDCALDPLSETKCTLKSFTVEKGIYQTSNFRVQPTESIVRFPNITNLCPFGEVFNATRFASVYAWNRKRISNCVADYSVLYNSASFSTFKCYGVSPTKLNDLCFTNVYADSFVIRGDEVRQIAPGQTGKIADYNYKLPDDFTGCVIAWNSNNLDSKVGGNYNYLYRLFRKSNLKPFERDISTEIYQAGSTPCNGVEGFNCYFPLQSYGFQPTNGVGYQPYRVVVLSFELLHAPATVCGPKKSTNLVKNKCVNFNFNGLTGTGVLTESNKKFLPFQQFGRDIADTTDAVRDPQTLEILDITPCSFGGVSVITPGTNTSNQVAVLYQGVNCTEVPVAIHADQLTPTWRVYSTGSNVFQTRAGCLIGAEHVNNSYECDIPIGAGICASYQTQTNSPRRARSVASQSIIAYTMSLGAENSVAYSNNSIAIPTNFTISVTTEILPVSMTKTSVDCTMYICGDSTECSNLLLQYGSFCTQLNRALTGIAVEQDKNTQEVFAQVKQIYKTPPIKDFGGFNFSQILPDPSKPSKRSFIEDLLFNKVTLADAGFIKQYGDCLGDIAARDLICAQKFNGLTVLPPLLTDEMIAQYTSALLAGTITSGWTFCAGAALQIPFAMQMAYRFNGIGVTQNVLYENQKLIANQFNSAIGKIQDSLSSTASALGKLQDVVNQNAQALNTLVKQLSSNFGAISSVLNDILSRLDKVEAEVQIDRLITGRLQSLQTYVTQQLIRAAEIRASANLAATKMSECVCGQSKRVDFCGKGYHLMSFPQSAPHGVVFLHVTYVPAQEKNFTTAPAICHDGKAHFPREGVFVSNGTHWFVTQRNFYEPQIITTDNTFVSGNCDVVIGIVNNTVYDPLQPELDSFKEELDKYFKNHTSPDVDLGDISGINASVVNIQKEIDRLNEVAKNLNESLIDLQELGKYEQYIKGGSGYIPEAPRDGQAYVRKDGEWVLLSTFL

SEQ ID NO: 6220 - protein, 1241 aa, Artificial Sequence
  SARS-CoV-2/Iceland/189/2020__EPI_ISL_417709 spike protein (1-1211)(G889C_L1034C) Foldon construct
MFVFLVLLPLVSSQCVNLTTRTQLPPAYTNSFTRGVYYPDKVFRSSVLHSTQDLFLPFFSNVTWFHAIHVSGTNGTKRFDNPVLPFNDGVYFASTEKSNIIRGWIFGTTLDSKTQSLLIVNNATNVVIKVCEFQFCNDPFLGVYYHKNNKSWMESEFRVYSSANNCTFEYVSQPFLMDLEGKQGNFKNLREFVFKNIDGYFKIYSKHTPINLVRDLPQGFSALEPLVDLPIGINITRFQTLLALHRSYLTPGDSSSGWTAGAAAYYVGYLQPRTFLLKYNENGTITDAVDCALDPLSETKCTLKSFTVEKGIYQTSNFRVQPTESIVRFPNITNLCPFGEVFNATRFASVYAWNRKRISNCVADYSVLYNSASFSTFKCYGVSPTKLNDLCFTNVYADSFVIRGDEVRQIAPGQTGKIADYNYKLPDDFTGCVIAWNSNNLDSKVGGNYNYLYRLFRKSNLKPFERDISTEIYQAGSTPCNGVEGFNCYFPLQSYGFQPTNGVGYQPYRVVVLSFELLHAPATVCGPKKSTNLVKNKCVNFNFNGLTGTGVLTESNKKFLPFQQFGRDIADTTDAVRDPQTLEILDITPCSFGGVSVITPGTNTSNQVAVLYQGVNCTEVPVAIHADQLTPTWRVYSTGSNVFQTRAGCLIGAEHVNNSYECDIPIGAGICASYQTQTNSPRRARSVASQSIIAYTMSLGAENSVAYSNNSIAIPTNFTISVTTEILPVSMTKTSVDCTMYICGDSTECSNLLLQYGSFCTQLNRALTGIAVEQDKNTQEVFAQVKQIYKTPPIKDFGGFNFSQILPDPSKPSKRSFIEDLLFNKVTLADAGFTKQYGDCLGDIAARDLICAQKFNGLTVLPPLLTDEMIAQYTSALLAGTITSGWTFCAGAALQIPFAMQMAYRFNGIGVTQNVLYENQKLIANQFNSAIGKIQDSLSSTASALGKLQDVVNQNAQALNTLVKQLSSNFGAISSVLNDILSRLDKVEAEVQIDRLITGRLQSLQTYVTQQLIRAAEIRASANLAATKMSECVCGQSKRVDFCGKGYHLMSFPQSAPHGVVFLHVTYVPAQEKNFTTAPAICHDGKAHFPREGVFVSNGTHWFVTQRNFYEPQIITTDNTFVSGNCDVVIGIVNNTVYDPLQPELDSFKEELDKYFKNHTSPDVDLGDISGINASVVNIQKEIDRLNEVAKNLNESLIDLQELGKYEQYIKGGSGYIPEAPRDGQAYVRKDGEWVLLSTFL

SEQ ID NO: 6221 - protein, 1241 aa, Artificial Sequence
  SARS-CoV-2/Australia/NSW56/2020__EPI_ISL_417408 spike protein (1-1211)(G889C_L1034C) Foldon construct
MFVFLVLLPLVSSQCVNLTTRTQLPPAYTNSFTRGVYYPDKVFRSSVLHSTQDLFLPFFSNVTWFHAIHVSGTNGTKRFDNPVLPFNDGVYFASTEKSNIIRGWIFGTTLDSKTQSLLIVNNATNVVIKVCEFQFCNDPFLGVYYHKNNKSWMESEFRVYSSANNCTFEYVSQPFLMDLEGKQGNFKNLREFVFKNIDGYFKIYSKHTPINLVRDLPQGFSALEPLVDLPIGINITRFQTLLALHRSYLTPGDSSSGWTAGAAAYYVGYLQPRTFLLKYNENGTITDAVDCALDPLSETKCTLKSFTVEKGIYQTSNFRVQPTESIVRFPNITNLCPFGEVFNATRFASVYAWNRKRISNCVADYSVLYNSASFSTFKCYGVSPTKLNDLCFTNVYADSFVIRGDEVRQIAPGQTGKIADYNYKLPDDFTGCVIAWNSNNLDSKVGGNYNYLYRLFRKSNLKPFERDISTEIYQAGSTPCNGVEGFNCYFPLQSYGFQPTNGVGYQPYRVVVLSFELLHAPATVCGPKKSTNLVKNKCVNFNFNGLTGTGVLTESNKKFLPFQQFGRDIADTTDAVRDPQTLEILDITPCSFGGVSVITPGTNTSNQVAVLYQDVNCTEVPVAIHADQLTPTWRVYSTGSNVFQTRAGCLIGAEHVNNSYECDIPIGAGICASYQTQTNSPRRARSVASQSIIAYTMSLGAENSVAYSNNSIAIPTNFTISVTTEILPVSMTKTSVDCTMYICGDSTECSNLLLQYGSFCTQLNRALTGIAVEQDKNTQEVFAQVKQIYKTPPIKDFGGFNFSQILPDSSKPSKRSFIEDLLFNKVTLADAGFIKQYGDCLGDIAARDLICAQKFNGLTVLPPLLTDEMIAQYTSALLAGTITSGWTFCAGAALQIPFAMQMAYRFNGIGVTQNVLYENQKLIANQFNSAIGKIQDSLSSTASALGKLQDVVNQNAQALNTLVKQLSSNFGAISSVLNDILSRLDKVEAEVQIDRLITGRLQSLQTYVTQQLIRAAEIRASANLAATKMSECVCGQSKRVDFCGKGYHLMSFPQSAPHGVVFLHVTYVPAQEKNFTTAPAICHDGKAHFPREGVFVSNGTHWFVTQRNFYEPQIITTDNTFVSGNCDVVIGIVNNTVYDPLQPELDSFKEELDKYFKNHTSPDVDLGDISGINASVVNIQKEIDRLNEVAKNLNESLIDLQELGKYEQYIKGGSGYIPEAPRDGQAYVRKDGEWVLLSTFL

SEQ ID NO: 6222 - protein, 1241 aa, Artificial Sequence
  SARS-CoV-2/Iceland/280/2020__EPI_ISL_417608 spike protein (1-1211)(G889C_L1034C) Foldon construct
MFVFLVLLPLVSSQCVNLTTRTQLPPAYTNSFTRGVYYPDKVFRSSVLHSTQDLFLPFFSNVTWFHAIHVSGTNGTKRFDNPVLPFNDGVYFASTEKSNIIRGWIFGTTLDSKTQSLLIVNNATNVVIKVCEFQFCNDPFLGVYYHKNNKSWMESEFRVYSSANNCTFEYVSQPFLMDLEGKQGNFKNLREFVFKNIDGYFKIYSKHTPINLVRDLPQGFSALEPLVDLPIGINITRFQTLLALHRSYLTPGDSSSGWTAGAAAYYVGYLQPRTFLLKYNENGTITDAVDCALDPLSETKCTLKSFTVEKGIYQTSNFRVQPTESIVRFPNITNLCPFGEVFNATRFASVYAWNRKRISNCVADYSVLYNSASFSTFKCYGVSPTKLNDLCFTNVYADSFVIRGDEVRQIAPGQTGKIADYNYKLPDDFTGCVIAWNSNNLDSKVGGNYNYLYRLFRKSNLKPFERDISTEIYQAGSTPCNGVEGFNCYFPLQSYGFQPTNGVGYQPYRVVVLSFELLHAPATVCGPKKSTNLVKNKCVNFNFNGLTGTGVLTESNKKFLPFQQFGRDIADTTDAVRDPQTLEILDITPCSFGGVSVITPGTNTSNQVAVLYQGVNCTEVPVAIHADQLTPTWRVYSTGSNVFQTRAGCLIGAEHVNNSYECDIPIGAGICASYHTQTNSPRRARSVASQSIIAYTMSLGAENSVAYSNNSIAIPTNFTISVTTEILPVSMTKTSVDCTMYICGDSTECSNLLLQYGSFCTQLNRALTGIAVEQDKNTQEVFAQVKQIYKTPPIKDFGGFNFSQILPDPSKPSKRSFIEDLLFNKVTLADAGFIKQYGDCLGDIAARDLICAQKFNGLTVLPPLLTDEMIAQYTSALLAGTITSGWTFCAGAALQIPFAMQMAYRFNGIGVTQNVLYENQKLIANQFNSAIGKIQDSLSSTASALGKLQDVVNQNAQALNTLVKQLSSNFGAISSVLNDILSRLDKVEAEVQIDRLITGRLQSLQTYVTQQLIRAAEIRASANLAATKMSECVCGQSKRVDFCGKGYHLMSFPQSAPHGVVFLHVTYVPAQEKNFTTAPAICHDGKAHFPREGVFVSNGTHWFVTQRNFYEPQIITTDNTFVSGNCDVVIGIVNNTVYDPLQPELDSFKEELDKYFKNHTSPDVDLGDISGINASVVNIQKEIDRLNEVAKNLNESLIDLQELGKYEQYIKGGSGYIPEAPRDGQAYVRKDGEWVLLSTFL

SEQ ID NO: 6223 - protein, 1241 aa, Artificial Sequence; identical to SEQ ID NO: 6178
  SARS-CoV-2/Iceland/247/2020__EPI_ISL_417575 spike protein (1-1211)(G889C_L1034C) Foldon construct

SEQ ID NO: 6224 - protein, 1241 aa, Artificial Sequence
  SARS-CoV-2/Iceland/238/2020__EPI_ISL_417566 spike protein (1-1211)(G889C_L1034C) Foldon construct
MFVFLVLLPLVSSQCVNLTTRTQLPPAYTNSFTRGVYYPDKVFRSSVLHSTQDLFLPFFSNVTWFHAIHVSGTNGTKRFDNPVLPFNDGVYFASTEKSNIIRGWIFGTTLDSKTQSLLIVNNATNVVIKVCEFQFCNDPFLGVYYHKNNKSWMESEFRVYSSANNCTFEYVSQPFLMDLEGKQGNFKNLREFVFKNIDGYFKIYSKHTPINLVRDLPQGFSALEPLVDLPIGINITRFQTLLALHRSYLTPGDSSSGWTAGAAAYYVGYLQPRTFLLKYNENGTITDAVDCALDPLSETKCTLKSFTVEKGIYQTSNFRVQPTESIVRFPNITNLCPFGEVFNATRFASVYAWNRKRISNCVADYSVLYNSASFSTFKCYGVSPTKLNDLCFTNVYADSFVIRGDEVRQIAPGQTGKIADYNYKLPDDFTGCVIAWNSNNLDSKVGGNYNYLYRLFRKSNLKPFERDISTEIYQAGSTPCNGVEGFNCYFPLQSYGFQPTNGVGYQPYRVVVLSFELLHAPATVCGPKKSTNLVKNKCVNFNFNGLTGTGVLTESNKKFLPFQQFGRDIADTTDAVRDPQTLEILDITPCSFGGVSVITPGTNTSNQVAVLYQGVNCTEVPVAIHADQLTPTWRVYSTGSNVFQTRAGCLIGAEHVNNSYECDIPIGAGICASYQTQTNSPRRARSVASQSIIAYTMSLGAENSVAYSNNSIAIPTNFTISVTTEILPVSMTKTSVDCTMYICGDSTECSNLLLQYGSFCTQLNRALTGIAVEQDKNTQEVFAQVKQIYKTPPIKDFGGFNFSQILPDPSKPSKRSFIEDLLFNKVTLADVGFIKQYGDCLGDIAARDLICAQKFNGLTVLPPLLTDEMIAQYTSALLAGTITSGWTFCAGAALQIPFAMQMAYRFNGIGVTQNVLYENQKLIANQFNSAIGKIQDSLSSTASALGKLQDVVNQNAQALNTLVKQLSSNFGAISSVLNDILSRLDKVEAEVQIDRLITGRLQSLQTYVTQQLIRAAEIRASANLAATKMSECVCGQSKRVDFCGKGYHLMSFPQSAPHGVVFLHVTYVPAQEKNFTTAPAICHDGKAHFPREGVFVSNGTHWFVTQRNFYEPQIITTDNTFVSGNCDVVIGIVNNTVYDPLQPELDSFKEELDKYFKNHTSPDVDLGDISGINASVVNIQKEIDRLNEVAKNLNESLIDLQELGKYEQYIKGGSGYIPEAPRDGQAYVRKDGEWVLLSTFL

SEQ ID NO: 6225 - protein, 1241 aa, Artificial Sequence
  SARS-CoV-2/Greece/16/2020__EPI_ISL_418265 spike protein (1-1211)(G889C_L1034C) Foldon construct
MFVFLVLLPLVSSQCVNLTTRTQLPPAYTNSFTRGVYYPDKVFRSSVLHSTQDLFLPFFSNVTWFHAIHVSGTNGTKRFDNPVLPFNDGVYFASTEKSNIIRGWIFGTTLDSKTQSLLIVNNATNVVIKVCEFQFCNDPFLGVYYHKNNKSWMESEFRVYSSANNCTFEYVSQPFLMDLEGKQGNFKNLREFVFKNVDGYFKIYSKHTPINLVRDLPQGFSALEPLVDLPIGINITRFQTLLALHRSYLTPGDSSSGWTAGAAAYYVGYLQPRTFLLKYNENGTITDAVDCALDPLSETKCTLKSFTVEKGIYQTSNFRVQPTESIVRFPNITNLCPFGEVFNATRFASVYAWNRKRISNCVADYSVLYNSASFSTFKCYGVSPTKLNDLCFTNVYADSFVIRGDEVRQIAPGQTGKIADYNYKLPDDFTGCVIAWNSNNLDSKVGGNYNYLYRLFRKSNLKPFERDISTEIYQAGSTPCNGVEGFNCYFPLQSYGFQPTNGVGYQPYRVVVLSFELLHAPATVCGPKKSTNLVKNKCVNFNFNGLTGTGVLTESNKKFLPFQQFGRDIADTTDAVRDPQTLEILDITPCSFGGVSVITPGTNTSNQVAVLYQDVNCTEVPVAIHADQLTPTWRVYSTGSNVFQTRAGCLIGAEHVNNSYECDIPIGAGICASYQTQTNSPRRARSVASQSIIAYTMSLGAENSVAYSNNSIAIPTNFTISVTTEILPVSMTKTSVDCTMYICGDSTECSNLLLQYGSFCTQLNRALTGIAVEQDKNTQEVFAQVKQIYKTPPIKDFGGFNFSQILPDPSKPSKRSFIEDLLFNKVTLADAGFIKQYGDCLGDIAARDLICAQKFNGLTVLPPLLTDEMIAQYTSALLAGTITSGWTFCAGAALQIPFAMQMAYRFNGIGVTQNVLYENQKLIANQFNSAIGKIQDSLSSTASALGKLQDVVNQNAQALNTLVKQLSSNFGAISSVLNDILSRLDKVEAEVQIDRLITGRLQSLQTYVTQQLIRAAEIRASANLAATKMSECVCGQSKRVDFCGKGYHLMSFPQSAPHGVVFLHVTYVPAQEKNFTTAPAICHDGKAHFPREGVFVSNGTHWFVTQRNFYEPQIITTDNTFVSGNCDVVIGIVNNTVYDPLQPELDSFKEELDKYFKNHTSPDVDLGDISGINASVVNIQKEIDRLNEVAKNLNESLIDLQELGKYEQYIKGGSGYIPEAPRDGQAYVRKDGEWVLLSTFL

SEQ ID NO: 6226 - protein, 1241 aa, Artificial Sequence
  SARS-CoV-2/Iceland/319/2020__EPI_ISL_417648 spike protein (1-1211)(G889C_L1034C) Foldon construct
MFVFLVLLPLVSSQCVNLTTRTQLPPAYTNSFTRGVYYPDKVFRSSVLHSTQDLFLPFFSNVTWFHAIHVSGTNGTKRFDNPVLPFNDGVYFASTEKSNIIRGWIFGTTLDSKTQSLLIVNNATNVVIKVCEFQFCNDPFLGVYYHKNNKSWMESEFRVYSSANNCTFEYVSQPFLIDLEGKQGNFKNLREFVFKNIDGYFKIYSKHTPINLVRDLPQGFSALEPLVDLPIGINITRFQTLLALHRSYLTPGDSSSGWTAGAAAYYVGYLQPRTFLLKYNENGTITDAVDCALDPLSETKCTLKSFTVEKGIYQTSNFRVQPTESIVRFPNITNLCPFGEVFNATRFASVYAWNRKRISNCVADYSVLYNSASFSTFKCYGVSPTKLNDLCFTNVYADSFVIRGDEVRQIAPGQTGKIADYNYKLPDDFTGCVIAWNSNNLDSKVGGNYNYLYRLFRKSNLKPFERDISTEIYQAGSTPCNGVEGFNCYFPLQSYGFQPTNGVGYQPYRVVVLSFELLHAPATVCGPKKSTNLVKNKCVNFNFNGLTGTGVLTESNKKFLPFQQFGRDIADTTDAVRDPQTLEILDITPCSFGGVSVITPGTNTSNQVAVLYQGVNCTEVPVAIHADQLTPTWRVYSTGSNVFQTRAGCLIGAEHVNNSYECDIPIGAGICASYQTQTNSPRRARSVASQSIIAYTMSLGAENSVAYSNNSIAIPTNFTISVTTEILPVSMTKTSVDCTMYICGDSTECSNLLLQYGSFCTQLNRALTGIAVEQDKNTQEVFAQVKQIYKTPPIKDFGGFNFSQILPDPSKPSKRSFIEDLLFNKVTLADAGFIKQYGDCLGDIAARDLICAQKFNGLTVLPPLLTDEMIAQYTSALLAGTITSGWTFCAGAALQIPFAMQMAYRFNGIGVTQNVLYENQKLIANQFNSAIGKIQDSLSSTASALGKLQDVVNQNAQALNTLVKQLSSNFGAISSVLNDILSRLDKVEAEVQIDRLITGRLQSLQTYVTQQLIRAAEIRASANLAATKMSECVCGQSKRVDFCGKGYHLMSFPQSAPHGVVFLHVTYVPAQEKNFTTAPAICHDGKAHFPREGVFVSNGTHWFVTQRNFYEPQIITTDNTFVSGNCDVVIGIVNNTVYDPLQPELDSFKEELDKYFKNHTSPDVDLGDISGINASVVNIQKEIDRLNEVAKNLNESLIDLQELGKYEQYIKGGSGYIPEAPRDGQAYVRKDGEWVLLSTFL

SEQ ID NO: 6227 - protein, 1241 aa, Artificial Sequence
  SARS-CoV-2/Congo/94/2020__EPI_ISL_417947 spike protein (1-1211)(G889C_L1034C) Foldon construct
MFVFLVLLPLVSSQCVNLTTRTQLPPAYTNSFTRGVYYPDKVFRSSVLHSTQDLFLPFFSNVTWFHAIHVSGTNGTKRFDNPVLPFNDGVYFASTEKSNIIRGWIFGTTLDSKTQSLLIVNNATNVVIKVCEFQFCNDPFLGVYYHKNNKSWMESEFRVYSSANNCTFEYVSQPFLMDLEGKQGNFKNLREFVFKNIDGYFKIYSKHTPINLVRDLPQGFSALEPLVDLPIGINITRFQTLLALHRSYLTPGDSSSGWTAGAAAYYVGYLQPRTFLLKYNENGTITDAVDCALDPLSETKCTLKSFTVEKGIYQTSNFRVQPTESIVRFPNITNLCPFGEVFNATRFASVYAWNRKRISNCVADYSVLYNSASFSTFKCYGVSPTKLNDLCFTNVYADSFVIRGDEVRQIAPGQTGKIADYNYKLPDDFTGCVIAWNSNNLDSKVGGNYNYLYRLFRKSNLKPFERDISTEIYQAGSTPCNGVEGFNCYFPLQSYGFQPTNGVGYQPYRVVVLSFELLHAPATVCGPKKSTNLVKNKCVNFNFNGLTGTGVLTESNKKFLPFQQFGRDIADTTDAVRDPQTLEILDITPCSFGGVSVITPGTNTSNQVAVLYQGVNCTEVPVAIHADQLTPTWRVYSTGSNVFQTRAGCLIGAEHVNNSYECDIPIGAGICASYQTQTNSPRRARSVASQSIIAYTMSLGAENSVAYSNNSIAIPTNFTISVTTEILPVSMTKTSVDCTMYICGDSTECSNLLLQYGSFCTQLNRALTGIAVEQDKNTQEVFAQVKQIYKTPPIKDFGGFNFSQILPDPSKPSKRSFIEDILFNKVTLADAGFIKQYGDCLGDIAARDLICAQKFNGLTVLPPLLTDEMIAQYTSALLAGTITSGWTFCAGAALQIPFAMQMAYRFNGIGVTQNVLYENQKLIANQFNSAIGKIQDSLSSTASALGKLQDVVNQNAQALNTLVKQLSSNFGAISSVLNDILSRLDKVEAEVQIDRLITGRLQSLQTYVTQQLIRAAEIRASANLAATKMSECVCGQSKRVDFCGKGYHLMSFPQSAPHGVVFLHVTYVPAQEKNFTTAPAICHDGKAHFPREGVFVSNGTHWFVTQRNFYEPQIITTDNTFVSGNCDVVIGIVNNTVYDPLQPELDSFKEELDKYFKNHTSPDVDLGDISGINASVVNIQKEIDRLNEVAKNLNESLIDLQELGKYEQYIKGGSGYIPEAPRDGQAYVRKDGEWVLLSTFL

SEQ ID NO: 6228 - protein, 1241 aa, Artificial Sequence
  SARS-CoV-2/Congo/158/2020__EPI_ISL_417950 spike protein (1-1211)(G889C_L1034C) Foldon construct
MFVFLVLLPLVSSQCVNLTTRTQLPPAYTNSFTRGVYYPDKVFRSSVLHSTQDLFLPFFSNVTWFHAIHVSGTNGTKRFDNPVLPFNDGVYFASTEKSNIIRGWIFGTTLDSKTQSLLIVNNATNVVIKVCEFQFCNDPFLGVYYHKNNKSWMESEFRVYSSANNCTFEYVSQPFLMDLEGKQGNFKNLREFVFKNIDGYFKIYSKHTPINLVRDLPQGFSALEPLVDLPIGINITRFQTLLALHRSYLTPGDSSSGWTAGAAAYYVGYLQPRTFLLKYNENGTITDAVDCALDPLSETKCTLKSFTVEKGIYQTSNFRVQPTESIVRFPNITNLCPFGEVFNATRFASVYAWNRKRISNCVADYSVLYNSASFSTFKCYGVSPTKLNDLCFTNVYADSFVIRGDEVRQIAPGQTGKIADYNYKLPDDFTGCVIAWNSNNLDSKVGGNYNYLYRLFRKSNLKPFERDISTEIYQAGSTPCNGVEGFNCYFPLQSYGFQPTNGVGYQPYRVVVLSFELLHAPATVCGPKKSTNLVKNKCVNFNFNGLTGTGVLTESNKKFLPFQQFGRDIADTTDAVRDPQTLEILDITPCSFGGVSVITPGTNTSNQVAVLYQDVNCTEVPVAIHADQLTPTWRVYSTGSNVFQTRAGCLIGAEHVNNSYECDIPIGAGICASYQTQTNSPRRARSVASQSIIAYTMSLGAENSVAYSNNSIAIPTNFTISVTTEILPVSMTKTSVDCTMYICGDSTECSNLLLQYGSFCTQLNRALTGIAVEQDKNTQEVFAQVKQIYKTPPIKDFGGFNFSQILPDPSKPSKRSFIEDLLFNKVTLADAGFIKQYGDCLGDIAARDLICAQKFNGLTVLPPLLTDEMIAQYTSALLAGTITSGWTFCAGAALQIPFAMQMAYRFNGIGVTQNVLYENQKLIANQFNSAIGKIQDSLSSTASALGKLQDVVNQNAQALNTLVKQLSSNFGAISSVLNDILSRLDKVEAEVQIDRLITGRLQSLQTYVTQQLIRAAEIRASANLAATKMSECVCGQSKRVDFCGKGYHLMSFPQSAPHGVVFLHVTYVPAQEKNFTTAPAICHDGKAHFPREGVFVSNGTHWFVTQRNFYEPQIITTDNTFLSGNCDVVIGIVNNTVYDPLQPELDSFKEELDKYFKNHTSPDVDLGDISGINASVVNIQKEIDRLNEVAKNLNESLIDLQELGKYEQYIKGGSGYIPEAPRDGQAYVRKDGEWVLLSTFL

SEQ ID NO: 6229 - protein, 1241 aa, Artificial Sequence
  SARS-CoV-2/USA/UT-00034/2020__EPI_ISL_417977 spike protein (1-1211)(G889C_L1034C) Foldon construct
MFVFLVLLPLVSSQCVNLTTRTQLPPAYTNSFTRGVYYPDKVFRSSVLHSTQDLFLPFFSNVTWFHAIHVSGTNGTKRFDNPVLPFNDGVYFASTEKSNIIRGWIFGTTLDSKTQSLLIVNNATNVVIKVCEFQFCNDPFLGVYYYKNNKSWMESEFRVYSSANNCTFEYVSQPFLMDLEGKQGNFKNLREFVFKNIDGYFKIYSKHTPINLVRDLPQGFSALEPLVDLPIGINITRFQTLLALHRSYLTPGDSSSGWTAGAAAYYVGYLQPRTFLLKYNENGTITDAVDCALDPLSETKCTLKSFTVEKGIYQTSNFRVQPTESIVRFPNITNLCPFGEVFNATRFASVYAWNRKRISNCVADYSVLYNSASFSTFKCYGVSPTKLNDLCFTNVYADSFVIRGDEVRQIAPGQTGKIADYNYKLPDDFTGCVIAWNSNNLDSKVGGNYNYLYRLFRKSNLKPFERDISTEIYQAGSTPCNGVEGFNCYFPLQSYGFQPTNGVGYQPYRVVVLSFELLHAPATVCGPKKSTNLVKNKCVNFNFNGLTGTGVLTESNKKFLPFQQFGRDIADTTDAVRDPQTLEILDITPCSFGGVSVITPGTNTSNQVAVLYQGVNCTEVPVAIHADQLTPTWRVYSTGSNVFQTRAGCLIGAEHVNNSYECDIPIGAGICASYQTQTNSPRRARSVASQSIIAYTMSLGAENSVAYSNNSIAIPTNFTISVTTEILPVSMTKTSVDCTMYICGDSTECSNLLLQYGSFCTQLNRALTGIAVEQDKNTQEVFAQVKQIYKTPPIKDFGGFNFSQILPDPSKPSKRSFIEDLLFNKVTLADAGFIKQYGDCLGDIAARDLICAQKFNGLTVLPPLLTDEMIAQYTSALLAGTITSGWTFCAGAALQIPFAMQMAYRFNGIGVTQNVLYENQKLIANQFNSAIGKIQDSLSSTASALGKLQDVVNQNAQALNTLVKQLSSNFGAISSVLNDILSRLDKVEAEVQIDRLITGRLQSLQTYVTQQLIRAAEIRASANLAATKMSECVCGQSKRVDFCGKGYHLMSFPQSAPHGVVFLHVTYVPAQEKNFTTAPAICHDGKAHFPREGVFVSNGTHWFVTQRNFYEPQIITTDNTFVSGNCDVVIGIVNNTVYDPLQPELDSFKEELDKYFKNHTSPDVDLGDISGINASVVNIQKEIDRLNEVAKNLNESLIDLQELGKYEQYIKGGSGYIPEAPRDGQAYVRKDGEWVLLSTFL

SEQ ID NO: 6230 - protein, 1241 aa, Artificial Sequence
  SARS-CoV-2/USA/UT-00033/2020__EPI_ISL_417976 spike protein (1-1211)(G889C_L1034C) Foldon construct
MFVFLVLLPLVSSQCVNLTTRTQLPPAYTNSFTRGVYYPDKVFRSSVLHSTQDLFLPFFSNVTWFHAIHVSGTNGTKRFDNPVLPFNDGVYFASTEKSNIIRGWIFGTTLDSKTQSLLIVNNATNVVIKVCEFQFCNDPFLGVYYHKNNKSWMESEFRVYSSANNCTFEYVSQPFLMDLEGKQGNFKNLREFVFKNIDGYFKIYSKHTPINLVRDLPQGFSALEPLVDLPIGINITRFQTLLALHRSYLTPGDSSSGLTAGAAAYYVGYLQPRTFLLKYNENGTITDAVDCALDPLSETKCTLKSFTVEKGIYQTSNFRVQPTESIVRFPNITNLCPFGEVFNATRFASVYAWNRKRISNCVADYSVLYNSASFSTFKCYGVSPTKLNDLCFTNVYADSFVIRGDEVRQIAPGQTGKIADYNYKLPDDFTGCVIAWNSNNLDSKVGGNYNYLYRLFRKSNLKPFERDISTEIYQAGSTPCNGVEGFNCYFPLQSYGFQPTNGVGYQPYRVVVLSFELLHAPATVCGPKKSTNLVKNKCVNFNFNGLTGTGVLTESNKKFLPFQQFGRDIADTTDAVRDPQTLEILDITPCSFGGVSVITPGTNTSNQVAVLYQGVNCTEVPVAIHADQLTPTWRVYSTGSNVFQTRAGCLIGAEHVNNSYECDIPIGAGICASYQTQTNSPRRARSVASQSIIAYTMSLGAENSVAYSNNSIAIPTNFTISVTTEILPVSMTKTSVDCTMYICGDSTECSNLLLQYGSFCTQLNRALTGIAVEQDKNTQEVFAQVKQIYKTPPIKDFGGFNFSQILPDPSKPSKRSFIEDLLFNKVTLADAGFIKQYGDCLGDIAARDLICAQKFNGLTVLPPLLTDEMIAQYTSALLAGTITSGWTFCAGAALQIPFAMQMAYRFNGIGVTQNVLYENQKLIANQFNSAIGKIQDSLSSTASALGKLQDVVNQNAQALNTLVKQLSSNFGAISSVLNDILSRLDKVEAEVQIDRLITGRLQSLQTYVTQQLIRAAEIRASANLAATKMSECVCGQSKRVDFCGKGYHLMSFPQSAPHGVVFLHVTYVPAQEKNFTTAPAICHDGKAHFPREGVFVSNGTHWFVTQRNFYEPQIITTDNTFVSGNCDVVIGIVNNTVYDPLQPELDSFKEELDKYFKNHTSPDVDLGDISGINASVVNIQKEIDRLNEVAKNLNESLIDLQELGKYEQYIKGGSGYIPEAPRDGQAYVRKDGEWVLLSTFL

SEQ ID NO: 6231 - protein, 1241 aa, Artificial Sequence
  SARS-CoV-2/USA/WI-13/2020__EPI_ISL_417516 spike protein (1-1211)(G889C_L1034C) Foldon construct
MFVFLVLLPLVSSQCVNLTTRTQLPPAYTNSFTRGVYYPDKVFRSSVLHSTQDLFLPFFSNVTWFHAIHVSGTNGTKRFDNPVLPFNDGVYFASTEKSNIIRGWIFGTTLDSKTQSLLIVNNATNVVIKVCEFQFCNDPFLGVYYHKNNKSWMESEFRVYSSANNCTFEYVSQPFLMDLEGKQGNFKNLREFVFKNIDGYFKIYSKHTPINLVRDLPQGFSALEPLVDLPIGINITRFQTLLALHRSYLTPGDSSSGWTAGAAAYYVGYLQPRTFLLKYNENGTITDAVDCALDPLSETKCTLKSFTVEKGIYQTSNFRVLPTESIVRFPNITNLCPFGEVFNATRFASVYAWNRKRISNCVADYSVLYNSASFSTFKCYGVSPTKLNDLCFTNVYADSFVIRGDEVRQIAPGQTGKIADYNYKLPDDFTGCVIAWNSNNLDSKVGGNYNYLYRLFRKSNLKPFERDISTEIYQAGSTPCNGVEGFNCYFPLQSYGFQPTNGVGYQPYRVVVLSFELLHAPATVCGPKKSTNLVKNKCVNFNFNGLTGTGVLTESNKKFLPFQQFGRDIADTTDAVRDPQTLEILDITPCSFGGVSVITPGTNTSNQVAVLYQGVNCTEVPVAIHADQLTPTWRVYSTGSNVFQTRAGCLIGAEHVNNSYECDIPIGAGICASYQTQTNSPRRARSVASQSIIAYTMSLGAENSVAYSNNSIAIPTNFTISVTTEILPVSMTKTSVDCTMYICGDSTECSNLLLQYGSFCTQLNRALTGIAVEQDKNTQEVFAQVKQIYKTPPIKDFGGFNFSQILPDPSKPSKRSFIEDLLFNKVTLADAGFIKQYGDCLGDIAARDLICAQKFNGLTVLPPLLTDEMIAQYTSALLAGTITSGWTFCAGAALQIPFAMQMAYRFNGIGVTQNVLYENQKLIANQFNSAIGKIQDSLSSTASALGKLQDVVNQNAQALNTLVKQLSSNFGAISSVLNDILSRLDKVEAEVQIDRLITGRLQSLQTYVTQQLIRAAEIRASANLAATKMSECVCGQSKRVDFCGKGYHLMSFPQSAPHGVVFLHVTYVPAQEKNFTTAPAICHDGKAHFPREGVFVSNGTHWFVTQRNFYEPQIITTDNTFVSGNCDVVIGIVNNTVYDPLQPELDSFKEELDKYFKNHTSPDVDLGDISGINASVVNIQKEIDRLNEVAKNLNESLIDLQELGKYEQYIKGGSGYIPEAPRDGQAYVRKDGEWVLLSTFL

SEQ ID NO: 6232 - protein, 1240 aa, Artificial Sequence
  SARS-CoV-2/India/1-27/2020__EPI_ISL_413522 spike protein (1-1210)(G888C_L1033C) Foldon construct
MFVFLVLLPLVSSQCVNLTTRTQLPPAYTNSFTRGVYYPDKVFRSSVLHSTQDLFLPFFSNVTWFHAIHVSGTNGTKRFDNPVLPFNDGVYFASTEKSNIIRGWIFGTTLDSKTQSLLIVNNATNVVIKVCEFQFCNDPFLGVYHKNNKSWMESEFRVYSSANNCTFEYVSQPFLMDLEGKQGNFKNLREFVFKNIDGYFKIYSKHTPINLVRDLPQGFSALEPLVDLPIGINITRFQTLLALHRSYLTPGDSSSGWTAGAAAYYVGYLQPRTFLLKYNENGTITDAVDCALDPLSETKCTLKSFTVEKGIYQTSNFRVQPTESIVRFPNITNLCPFGEVFNATRFASVYAWNRKRISNCVADYSVLYNSASFSTFKCYGVSPTKLNDLCFTNVYADSFVIRGDEVIQIAPGQTGKIADYNYKLPDDFTGCVIAWNSNNLDSKVGGNYNYLYRLFRKSNLKPFERDISTEIYQAGSTPCNGVEGFNCYFPLQSYGFQPTNGVGYQPYRVVVLSFELLHAPATVCGPKKSTNLVKNKCVNFNFNGLTGTGVLTESNKKFLPFQQFGRDIADTTDAVRDPQTLEILDITPCSFGGVSVITPGTNTSNQVAVLYQDVNCTEVPVAIHADQLTPTWRVYSTGSNVFQTRAGCLIGAEHVNNSYECDIPIGAGICASYQTQTNSPRRARSVASQSIIAYTMSLGAENSVAYSNNSIAIPTNFTISVTTEILPVSMTKTSVDCTMYICGDSTECSNLLLQYGSFCTQLNRALTGIAVEQDKNTQEVFAQVKQIYKTPPIKDFGGFNFSQILPDPSKPSKRSFIEDLLFNKVTLADAGFIKQYGDCLGDIAARDLICAQKFNGLTVLPPLLTDEMIAQYTSALLAGTITSGWTFCAGAALQIPFAMQMAYRFNGIGVTQNVLYENQKLIANQFNSAIGKIQDSLSSTASALGKLQDVVNQNAQALNTLVKQLSSNFGAISSVLNDILSRLDKVEAEVQIDRLITGRLQSLQTYVTQQLIRAAEIRASANLAATKMSECVCGQSKRVDFCGKGYHLMSFPQSAPHGVVFLHVTYVPAQEKNFTTAPAICHDGKAHFPREGVFVSNGTHWFVTQRNFYEPQIITTDNTFVSGNCDVVIGIVNNTVYDPLQPELDSFKEELDKYFKNHTSPDVDLGDISGINASVVNIQKEIDRLNEVAKNLNESLIDLQELGKYEQYIKGGSGYIPEAPRDGQAYVRKDGEWVLLSTFL

SEQ ID NO: 6233 - protein, 1235 aa, Artificial Sequence
  SARS-CoV-2/pangolin/Guangxi/P4L/2017__EPI_ISL_410538 spike protein (1-1205)(G883C_L1028C) Foldon construct
MFVFLFVLPLVSSQCVNLTTRTGIPPGYTNSSTRGVYYPDKVFRSSILHLTQDLFLPFFSNVTWFNTINYQGGFKKFDNPVLPFNDGVYFASTEKSNIIRGWIFGTTLDARTQSLLIVNNATNVVIKVCEFQFCTDPFLGVYYHNNNKTWVENEFRVYSSANNCTFEYISQPFLMDLEGKQGNFKNLREFVFKNVDGYFKIYSKHTPIDLVRDLPRGFAALEPLVDLPIGINITRFQTLLALHRSYLTPGNLESGWTTGAAAYYVGYLQQRTFLLSYNQNGTITDAVDCSLDPLSETKCTLKSLTVEKGIYQTSNFRVQPTISIVRFPNITNLCPFGEVFNASKFASVYAWNRKRISNCVADYSVLYNSTSFSTFKCYGVSPTKLNDLCFTNVYADSFVVKGDEVRQIAPGQTGVIADYNYKLPDDFTGCVIAWNSVKQDALTGGNYGYLYRLFRKSKLKPFERDISTEIYQAGSTPCNGQVGLNCYYPLERYGFHPTTGVNYQPFRVVVLSFELLNGPATVCGPKLSTTLVKDKCVNFNFNGLTGTGVLTTSKKQFLPFQQFGRDISDTTDAVRDPQTLEILDITPCSFGGVSVITPGTNTSNQVAVLYQDVNCTEVPMAIHAEQLTPAWRVYSAGANVFQTRAGCLVGAEHVNNSYECDIPVGAGICASYHSMSSLRSVNQRSIIAYTMSLGAENSVAYSNNSIAIPTNFTISVTTEILPVSMTKTSVDCTMYICGDSIECSNLLLQYGSFCTQLNRALTGIAVEQDKNTQEVFAQVKQIYKTPPIKDFGGFNFSQILPDPSKPSKRSFIEDLLFNKVTLADAGFIKQYGDCLGDIAARDLICAQKFNGLTVLPPLLTDEMIAQYTSALLAGTITSGWTFCAGAALQIPFAMQMAYRFNGIGVTQNVLYENQKLIANQFNSAIGKIQDSLSSTASALGKLQDVVNQNAQALNTLVKQLSSNFGAISSVLNDILSRLDKVEAEVQIDRLITGRLQSLQTYVTQQLIRAAEIRASANLAATKMSECVCGQSKRVDFCGKGYHLMSFPQSAPHGVVFLHVTYVPAQEKNFTTAPAICHEGKAHFPREGVFVSNGTHWFITQRNFYEPQIITTDNTFVSGSCDVVIGIVNNTVYDPLQPELDSFKEELDKYFKNHTSPDVDLGDISGINASVVNIQKEIDRLNEVAKNLNESPIDLQELGKYEQYIKGGSGYIPEAPRDGQAYVRKDGEWVLLSTFL

SEQ ID NO: 6234 - protein, 1235 aa, Artificial Sequence
  SARS-CoV-2/pangolin/Guangxi/P5L/2017__EPI_ISL_410540 spike protein (1-1205)(G883C_L1028C) Foldon construct
MFVFLFVLPLVSSQCVNLTTRTGIPPGYTNSSTRGVYYPDKVFRSSILHLTQDLFLPFFSNVTWFNTINYQGGFKKFDNPVLPFNDGVYFASTEKSNIIRGWIFGTTLDARTQSLLIVNNATNVVIKVCEFQFCTDPFLGVYYHNNNKTWVENEFRVYSSANNCTFEYISQPFLMDLEGKQGNFKNLREFVFKNVDGYFKIYSKHTPIDLVRDLPRGFAALEPLVDLPIGINITRFQTLLALHRSYLTPGKLESGWTTGAAAYYVGYLQQRTFLLSYNQNGTITDAVDCSLDPLSETKCTLKSLTVEKGIYQTSNFRVQPTISIVRFPNITNLCPFGEVFNASKFASVYAWNRKRISNCVADYSVLYNSTSFSTFKCYGVSPTKLNDLCFTNVYADSFVVKGDEVRQIAPGQTGVIADYNYKLPDDFTGCVIAWNSVKQDALTGGNYGYLYRLFRKSKLKPFERDISTEIYQAGSTPCNGQVGLNCYYPLERYGFHPTTGVNYQPFRVVVLSFELLNGPATVCGPKLSTTLVKDKCVNFNFNGLTGTGVLTTSKKQFLPFQQFGRDISDTTDAVRDPQTLEILDITPCSFGGVSVITPGTNTSNQVAVLYQDVNCTEVPMAIHAEQLTPAWRVYSAGANVFQTRAGCLVGAEHVNNSYECDIPVGAGICASYHSMSSFRSVNQRSIIAYTMSLGAENSVAYSNNSIAIPTNFTISVTTEILPVSMTKTSVDCTMYICGDSIECSNLLLQYGSFCTQLNRALTGIAVEQDKNTQEVFAQVKQIYKTPPIKDFGGFNFSQILPDPSKPSKRSFIEDLLFNKVTLADAGFIKQYGDCLGDIAARDLICAQKFNGLTVLPPLLTDEMIAQYTSALLAGTITSGWTFCAGAALQIPFAMQMAYRFNGIGVTQNVLYENQKLIANQFNSAIGKIQDSLSSTASALGKLQDVVNQNAQALNTLVKQLSSNFGAISSVLNDILSRLDKVEAEVQIDRLITGRLQSLQTYVTQQLIRAAEIRASANLAATKMSECVCGQSKRVDFCGKGYHLMSFPQSAPHGVVFLHVTYVPAQEKNFTTAPAICHEGKAHFPREGVFVSNGTHWFITQRNFYEPQIITTDNTFVSGSCDVVIGIVNNTVYDPLQPELDSFKEELDKYFKNHTSPDVDLGDISGINASVVNIQKEIDRLNEVAKNLNESLIDLQELGKYEQYIKGGSGYIPEAPRDGQAYVRKDGEWVLLSTFL

SEQ ID NO: 6235 - protein, 1235 aa, Artificial Sequence
  SARS-CoV-2/pangolin/Guangxi/P5E/2017__EPI_ISL_410541 spike protein (1-1205)(G883C_L1028C) Foldon construct
MFVFLFVLPLVSSQCVNLTTRTGIPPGYTNSSTRGVYYPDKVFRSSILHLTQDLFLPFFSNVTWFNTITYQGGSKKFDNPVLPFNDGVYFASTEKSNIIRGWIFGTTLDARTQSLLIVNNATNVVIKVCEFQFCTDPFLGVYYHNNNKTWVENEFRVYSSANNCTFEYISQPFLMDLEGKQGNFKNLREFVFKNVDGYFKIYSKHTPIDLVRDLPRGFAALEPLVDLPIGINITRFQTLLALHRSYLTPGKLESGWTTGAAAYYVGYLQQRTFLLSYNQNGTITDAVDCSLDPLSETKCTLKSLTVEKGIYQTSNFRVQPTISIVRFPNITNLCPFGEVFNASKFASVYAWNRKRISNCVADYSVLYNSTSFSTFKCYGVSPTKLNDLCFTNVYADSFVVKGDEVRQIAPGQTGVIADYNYKLPDDFTGCVIAWNSVKQDALTGDNYGYLYRLFRKSKLKPFERDISTEIYQAGSTPCNGQVGLNCYYPLERYGFHPTTGVNYQPFRVVVLSFELLNGPATVCGPKLSTTLVKDKCVNFNFNGLTGTGVLTTSKKQFLPFQQFGRDISDTTDAVRDPQTLEILDITPCSFGGVSVITPGTNTSNQVAVLYQDVNCTEVPMAIHAEQLTPAWRVYSAGANVFQTRAGCLVGAEHVNNSYECDIPVGAGICASYHSMSSFRSVNQRSIIAYTMSLGAENSVAYSNNSIAIPTNFTISVTTEILPVSMTKTSVDCTMYICGDSIECSNLLLQYGSFCTQLNRALTGIAVEQDKNTQEVFAQVKQIYKTPPIKDFGGFNFSQILPDPSKPSKRSFIEDLLFNKVTLADAGFIKQYGDCLGDIAARDLICAQKFNGLTVLPPLLTDEMIAQYTSALLAGTITSGWTFCAGAALQIPFAMQMAYRFNGIGVTQNVLYENQKLIANQFNSAIGKIQDSLSSTASALGKLQDVVNQNAQALNTLVKQLSSNFGAISSVLNDILSRLDKVEAEVQIDRLITGRLQSLQTYVTQQLIRAAEIRASANLAATKMSECVCGQSKRVDFCGKGYHLMSFPQSAPHGVVFLHVTYVPAQEKNFTTAPAICHEGKAHFPREGVFVSNGTHWFITQRNFYEPQIITTDNTFVSGSCDVVIGIVNNTVYDPLQPELDSFKEELDKYFKNHTSPDVDLGDISGINASVVNIQKEIDRLNEVAKNLNESLIDLQELGKYEQYIKGGSGYIPEAPRDGQAYVRKDGEWVLLSTFL

SEQ ID NO: 6236 - protein, 1233 aa, Artificial Sequence
  SARS-CoV-2/pangolin/Guangxi/P1E/2017__EPI_ISL_410539 spike protein (1-1203)(G881C_L1026C) Foldon construct
MFVFLFVLPLVSSQCVNLTTRTGIQPGYTNSSTRGVYYPDKVFRSSILHLTQDLFLPFFSNVTWFNTINYQGGFKKFDNPVLPFNDGVYFASTEKSNIIRGWIFGTTLDARTQSLLIVNNATNVVIKVCEFQFCTDPFLGVYYHNNNKTWVENEFRVYSSANNCTFEYISQPFLMDLEGKQGNFKNLREFVFKNVDGYFKIYSKHTPIDLVRDLPRGFAALEPLVDLPIGINITRFQTLLALHRSYLTPGKLESGWTTGAAAYYVGYLQQRTFLLSYNQNGTITDAVDCSLDPLSETKCTLKSLTVEKGIYQTSNFRVQPTISIVRFPNITNLCPFGEVFNASKFASVYAWNRKRISNCVADYSVLYNSTSFSTFKCYGVSPTKLNDLCFTNVYADSFVVKGDEVRQIAPGQTGVIADYNYKLPDDFTGCVIAWNSVKQDALTGGNYLYRLFRKSKLKPFERDISTEIYQAGSTPCNGQVGLNCYYPLERYGFHPTTGVNYQPFRVVVLSFELLNGPATVCGPKLSTTLVKDKCVNFNFNGLTGTGVLTTSKKQFLPFQQFGRDISDTTDAVRDPQTLEILDITPCSFGGVSVITPGTNTSNQVAVLYQDVNCTEVPMAIHAEQLTPAWRVYSAGANVFQTRAGCLVGAEHVNNSYECDIPVGAGICASYHSMSSLRSVNQRSIIAYTMSLGAENSVAYSNNSIAIPTNFTISVTTEILPVSMTKTSVDCTMYICGDSIECSNLLLQYGSFCTQLNRALTGIAVEQDKNTQEVFAQVKQIYKTPPIKDFGGFNFSQILPDPSKPSKRSFIEDLLFNKVTLADAGFIKQYGDCLGDIAARDLICAQKFNGLTVLPPLLTDEMIAQYTSALLAGTITSGWTFCAGAALQIPFAMQMAYRFNGIGVTQNVLYENQKLIANQFNSAIGKIQDSLSSTASALGKLQDVVNQNAQALNTLVKQLSSNFGAISSVLNDILSRLDKVEAEVQIDRLITGRLQSLQTYVTQQLIRAAEIRASANLAATKMSECVCGQSKRVDFCGKGYHLMSFPQSAPHGVVFLHVTYVPAQEKNFTTAPAICHEGKAHFPREGVFVSNGTHWFITQRNFYEPQIITTDNTFVSGSCDVVIGIVNNTVYDPLQPELDSFKEELDKYFKNHTSPDVDLGDISGINASVVNIQKEIDRLNEVAKNLNESLIDLQELGKYEQYIKGGSGYIPEAPRDGQAYVRKDGEWVLLSTFL

SEQ ID NO: 6237 - protein, 1241 aa, Artificial Sequence
  SARS-CoV-2/Wuhan/WIV05/2019__EPI_ISL_402128 spike protein (1-1211)(I909C_Y1047C) Foldon construct
MFVFLVLLPLVSSQCVNLTTRTQLPPAYTNSFTRGVYYPDKVFRSSVLHSTQDLFLPFFSNVTWFHAIHVSGTNGTKRFDNPVLPFNDGVYFASTEKSNIIRGWIFGTTLDSKTQSLLIVNNATNVVIKVCEFQFCNDPFLGVYYHKNNKSWMESEFRVYSSANNCTFEYVSQPFLMDLEGKQGNFKNLREFVFKNIDGYFKIYSKHTPINLVRDLPQGFSALEPLVDLPIGINITRFQTLLALHRSYLTPGDSSSGWTAGAAAYYVGYLQPRTFLLKYNENGTITDAVDCALDPLSETKCTLKSFTVEKGIYQTSNFRVQPTESIVRFPNITNLCPFGEVFNATRFASVYAWNRKRISNCVADYSVLYNSASFSTFKCYGVSPTKLNDLCFTNVYADSFVIRGDEVRQIAPGQTGKIADYNYKLPDDFTGCVIAWNSNNLDSKVGGNYNYLYRLFRKSNLKPFERDISTEIYQAGSTPCNGVEGFNCYFPLQSYGFQPTNGVGYQPYRVVVLSFELLHAPATVCGPKKSTNLVKNKCVNFNFNGLTGTGVLTESNKKFLPFQQFGRDIADTTDAVRDPQTLEILDITPCSFGGVSVITPGTNTSNQVAVLYQDVNCTEVPVAIHADQLTPTWRVYSTGSNVFQTRAGCLIGAEHVNNSYECDIPIGAGICASYQTQTNSPRRARSVASQSIIAYTMSLGAENSVAYSNNSIAIPTNFTISVTTEILPVSMTKTSVDCTMYICGDSTECSNLLLQYGSFCTQLNRALTGIAVEQDKNTQEVFAQVKQIYKTPPIKDFGGFNFSQILPDPSKPSKRSFIEDLLFNKVTLADAGFIKQYGDCLGDIAARDLICAQKFNGLTVLPPLLTDEMIAQYTSALLAGTITSGWTFGAGAALQIPFAMQMAYRFNGCGVTQNVLYENQKLIANQFNSAIGKIQDSLSSTASALGKLQDVVNQNAQALNTLVKQLSSNFGAISSVLNDILSRLDKVEAEVQIDRLITGRLQSLQTYVTQQLIRAAEIRASANLAATKMSECVLGQSKRVDFCGKGCHLMSFPQSAPHGVVFLHVTYVPAQEKNFTTAPAICHDGKAHFPREGVFVSNGTHWFVTQRNFYEPQIITTDNTFVSGNCDVVIGIVNNTVYDPLQPELDSFKEELDKYFKNHTSPDVDLGDISGINASVVNIQKEIDRLNEVAKNLNESLIDLQELGKYEQYIKGGSGYIPEAPRDGQAYVRKDGEWVLLSTFL

SEQ ID NO: 6238 - protein, 1237 aa, Artificial Sequence
  SARS-CoV-2/bat/Yunnan/RaTG13/2013__EPI_ISL_402131 spike protein (1-1207)(I905C_Y1043C) Foldon construct
MFVFLVLLPLVSSQCVNLTTRTQLPPAYTNSSTRGVYYPDKVFRSSVLHLTQDLFLPFFSNVTWFHAIHVSGTNGIKRFDNPVLPFNDGVYFASTEKSNIIRGWIFGTTLDSKTQSLLIVNNATNVVIKVCEFQFCNDPFLGVYYHKNNKSWMESEFRVYSSANNCTFEYVSQPFLMDLEGKQGNFKNLREFVFKNIDGYFKIYSKHTPINLVRDLPPGFSALEPLVDLPIGINITRFQTLLALHRSYLTPGDSSSGWTAGAAAYYVGYLQPRTFLLKYNENGTITDAVDCALDPLSETKCTLKSFTVEKGIYQTSNFRVQPTDSIVRFPNITNLCPFGEVFNATTFASVYAWNRKRISNCVADYSVLYNSTSFSTFKCYGVSPTKLNDLCFTNVYADSFVITGDEVRQIAPGQTGKIADYNYKLPDDFTGCVIAWNSKHIDAKEGGNFNYLYRLFRKANLKPFERDISTEIYQAGSKPCNGQTGLNCYYPLYRYGFYPTDGVGHQPYRVVVLSFELLNAPATVCGPKKSTNLVKNKCVNFNFNGLTGTGVLTESNKKFLPFQQFGRDIADTTDAVRDPQTLEILDITPCSFGGVSVITPGTNASNQVAVLYQDVNCTEVPVAIHADQLTPTWRVYSTGSNVFQTRAGCLIGAEHVNNSYECDIPIGAGICASYQTQTNSRSVASQSIIAYTMSLGAENSVAYSNNSIAIPTNFTISVTTEILPVSMTKTSVDCTMYICGDSTECSNLLLQYGSFCTQLNRALTGIAVEQDKNTQEVFAQVKQIYKTPPIKDFGGFNFSQILPDPSKPSKRSFIEDLLFNKVTLADAGFIKQYGDCLGDIAARDLICAQKFNGLTVLPPLLTDEMIAQYTSALLAGTITSGWTFGAGAALQIPFAMQMAYRFNGCGVTQNVLYENQKLIANQFNSAIGKIQDSLSSTASALGKLQDVVNQNAQALNTLVKQLSSNFGAISSVLNDILSRLDKVEAEVQIDRLITGRLQSLQTYVTQQLIRAAEIRASANLAATKMSECVLGQSKRVDFCGKGCHLMSFPQSAPHGVVFLHVTYVPAQEKNFTTAPAICHDGKAHFPREGVFVSNGTHWFVTQRNFYEPQIITTDNTFVSGSCDVVIGIVNNTVYDPLQPELDSFKEELDKYFKNHTSPDVDLGDISGINASVVNIQKEIDRLNEVAKNLNESLIDLQELGKYEQYIKGGSGYIPEAPRDGQAYVRKDGEWVLLSTFL

SEQ ID NO: 6239 - protein, 1241 aa, Artificial Sequence
  SARS-CoV-2/Wuhan/HBCDC-HB-01/2019__EPI_ISL_402132 spike protein (1-1211)(I909C_Y1047C) Foldon construct
MFVFLVLLPLVSSQCVNLTTRTQLPPAYTNSITRGVYYPDKVFRSSVLHSTQDLFLPFFSNVTWFHAIHVSGTNGTKRFDNPVLPFNDGVYFASTEKSNIIRGWIFGTTLDSKTQSLLIVNNATNVVIKVCEFQFCNDPFLGVYYHKNNKSWMESEFRVYSSANNCTFEYVSQPFLMDLEGKQGNFKNLREFVFKNIDGYFKIYSKHTPINLVRDLPQGFSALEPLVDLPIGINITRFQTLLALHRSYLTPGDSSSGWTAGAAAYYVGYLQPRTFLLKYNENGTITDAVDCALDPLSETKCTLKSFTVEKGIYQTSNFRVQPTESIVRFPNITNLCPFGEVFNATRFASVYAWNRKRISNCVADYSVLYNSASFSTFKCYGVSPTKLNDLCFTNVYADSFVIRGDEVRQIAPGQTGKIADYNYKLPDDFTGCVIAWNSNNLDSKVGGNYNYLYRLFRKSNLKPFERDISTEIYQAGSTPCNGVEGFNCYFPLQSYGFQPTNGVGYQPYRVVVLSFELLHAPATVCGPKKSTNLVKNKCVNFNFNGLTGTGVLTESNKKFLPFQQFGRDIADTTDAVRDPQTLEILDITPCSFGGVSVITPGTNTSNQVAVLYQDVNCTEVPVAIHADQLTPTWRVYSTGSNVFQTRAGCLIGAEHVNNSYECDIPIGAGICASYQTQTNSPRRARSVASQSIIAYTMSLGAENSVAYSNNSIAIPTNFTISVTTEILPVSMTKTSVDCTMYICGDSTECSNLLLQYGSFCTQLNRALTGIAVEQDKNTQEVFAQVKQIYKTPPIKDFGGFNFSQILPDPSKPSKRSFIEDLLFNKVTLADAGFIKQYGDCLGDIAARDLICAQKFNGLTVLPPLLTDEMIAQYTSALLAGTITSGWTFGAGAALQIPFAMQMAYRFNGCGVTQNVLYENQKLIANQFNSAIGKIQDSLSSTASALGKLQDVVNQNAQALNTLVKQLSSNFGAISSVLNDILSRLDKVEAEVQIDRLITGRLQSLQTYVTQQLIRAAEIRASANLAATKMSECVLGQSKRVDFCGKGCHLMSFPQSAPHGVVFLHVTYVPAQEKNFTTAPAICHDGKAHFPREGVFVSNGTHWFVTQRNFYEPQIITTDNTFVSGNCDVVIGIVNNTVYDPLQPELDSFKEELDKYFKNHTSPDVDLGDISGINASVVNIQKEIDRLNEVAKNLNESLIDLQELGKYEQYIKGGSGYIPEAPRDGQAYVRKDGEWVLLSTFL

SEQ ID NO: 6240 - protein, 1241 aa, Artificial Sequence
  SARS-CoV-2/Guangdong/20SF028/2020__EPI_ISL_403936 spike protein (1-1211)(I909C_Y1047C) Foldon construct
MFVFLVLLPLVSSQCVNLTTRTQLPPAYTNSFTRGVYYPDKVFRSSVLYSTQDLFLPFFSNVTWFHAIHVSGTNGTKRFDNPVLPFNDGVYFASTEKSNIIRGWIFGTTLDSKTQSLLIVNNATNVVIKVCEFQFCNDPFLGVYYHKNNKSWMESEFRVYSSANNCTFEYVSQPFLMDLEGKQGNFKNLREFVFKNIDGYFKIYSKHTPINLVRDLPQGFSALEPLVDLPIGINITRFQTLLALHRSYLTPGDSSSGWTAGAAAYYVGYLQPRTFLLKYNENGTITDAVDCALDPLSETKCTLKSFTVEKGIYQTSNFRVQPTESIVRFPNITNLCPFGEVFNATRFASVYAWNRKRISNCVADYSVLYNSASFSTFKCYGVSPTKLNDLCFTNVYADSFVIRGDEVRQIAPGQTGKIADYNYKLPDDFTGCVIAWNSNNLDSKVGGNYNYLYRLFRKSNLKPFERDISTEIYQAGSTPCNGVEGFNCYFPLQSYGFQPTNGVGYQPYRVVVLSFELLHAPATVCGPKKSTNLVKNKCVNFNFNGLTGTGVLTESNKKFLPFQQFGRDIADTTDAVRDPQTLEILDITPCSFGGVSVITPGTNTSNQVAVLYQDVNCTEVPVAIHADQLTPTWRVYSTGSNVFQTRAGCLIGAEHVNNSYECDIPIGAGICASYQTQTNSPRRARSVASQSIIAYTMSLGAENSVAYSNNSIAIPTNFTISVTTEILPVSMTKTSVDCTMYICGDSTECSNLLLQYGSFCTQLNRALTGIAVEQDKNTQEVFAQVKQIYKTPPIKDFGGFNFSQILPDPSKPSKRSFIEDLLFNKVTLADAGFIKQYGDCLGDIAARDLICAQKFNGLTVLPPLLTDEMIAQYTSALLAGTITSGWTFGAGAALQIPFAMQMAYRFNGCGVTQNVLYENQKLIANQFNSAIGKIQDSLSSTASALGKLQDVVNQNAQALNTLVKQLSSNFGAISSVLNDILSRLDKVEAEVQIDRLITGRLQSLQTYVTQQLIRAAEIRASANLAATKMSECVLGQSKRVDFCGKGCHLMSFPQSAPHGVVFLHVTYVPAQEKNFTTAPAICHDGKAHFPREGVFVSNGTHWFVTQRNFYEPQIITTDNTFVSGNCDVVIGIVNNTVYDPLQPELDSFKEELDKYFKNHTSPDVDLGDISGINASVVNIQKEIDRLNEVAKNLNESLIDLQELGKYEQYIKGGSGYIPEAPRDGQAYVRKDGEWVLLSTFL

SEQ ID NO: 6241 - protein, 1241 aa, Artificial Sequence
  SARS-CoV-2/Shenzhen/SZTH-001/2020__EPI_ISL_406592 spike protein (1-1211)(I909C_Y1047C) Foldon construct
MFVFLVLLPLVSSQCVNLTTRTQLPPAYTNSFTRGVYYPDKVFRSSVLHSTQDLFLPFFSNVTWFHAIHVSGTNGTKRFDNPVLPFNDGVYFASTEKSNIIRGWIFGTTLDSKTQSLLIVNNATNVVIKVCEFQFCNDPFLGVYYHKNNKSWMESEFRVYSSANNCTFEYVSQPFLMDLEGKQGNFKNLREFVFKNIDGYFKIYSKHTPINLVRDLPQGFSALEPLVDLPIGINITRFQTLLALHRSYLTPGDSSSGWTAGAAAYYVGYLQPRTFLLKYNENGTITDAVDCALDPLSETKCTLKSFTVEKGIYQTSNFRVQPTESIVRFPNITNLCPFGEVFNATRFASVYAWNRKRISNCVADYSVLYNSASFSTFKCYGVSPTKLNDLCFTNVYADSFVIRGDEVRQIAPGQTGKIADYNYKLPDDFTGCVIAWNSNNLDSKVGGNYNYLYRLFRKSNLKPFERDISTEIYQAGSTPCNGVEGFNCYFPLQSYGFQPTNGVGYQPYRVVVLSFELLHAPATVCGPKKSTNLVKNKCVNFNFNGLTGTGVLTESNKKFLPFQQFGRDIADTTDAVRDPQTLEILDITPCSFGGVSVITPGTNTSNQVAVLYQDVNCTEVPVAIHADQLTPTWRVYSTGSNVFQTRAGCLIGAEHVNNSYECDIPIGAGICASYQTQTNSPRRARSVASQSIIAYTMSLGAENSVAYSNNSIAIPTNFTISVTTEILPVSMTKTSVDCTMYICGDSTECSNLLLQYGSFCTQLNRALTGIAVEQDKNTQEVFAQVKQIYKTPPIKDFGGFNFSQILPDPSKPSKRSFIEDLLFNKVTLADAGFIKQYGDCLGDIAARDLICAQKFNGLTVLPPLLTDEMIAQYTSALLAGTITSGWTFGAGAALQIPFAMQMAYRFNGCGVTQNVLYENQKLIANQFNSAIGKIQDSLSSTASALGKLQDVVNQNAQALNTLVKQLSSNFGAISSVLNDILSRLDKVEAEVQIDRLITGRLQSLQTYVTQQLIRAAEIRASANLAATKMSECVLGQSKRVDFCGKGCHLMSFPQSAPHGVVFLHVTYVPAQEKNFTTAPAICHDGKAHFPREGVFVSNGTHWFVTQRNFYEPQIITTDNTFVSGNCDVLIGIVNNTVYDPLQPELDSFKEELDKYFKNHTSPDVDLGDISGINASVVNIQKEIDRLNEVAKNLNESLIDLQELGKYEQYIKGGSGYIPEAPRDGQAYVRKDGEWVLLSTFL

SEQ ID NO: 6242 - protein, 1241 aa, Artificial Sequence
  SARS-CoV-2/Shenzhen/SZTH-004/2020__EPI_ISL_406595 spike protein (1-1211)(I909C_Y1047C) Foldon construct
MFVFLVLLPLVSSQCVNLTTRTQLPPAYTNSFTRGVYYPDKVFRSSVLHSTQDLFLPFFSNVTWFHAIHVSGTNGTKRFDNPVLPFNDGVYFASTEKSNIIRGWIFGTTLDSKTQSLLIVNNATNVVIKVCEFQFCNDPFLGVYYHKNNKSWMESEFRVYSSANNCTFEYVSQPFLMDLEGKQGNFKNLREFVFKNIDGYFKIYSKHTPINLVRDLPQGFSALEPLVDLPIGINITRFQTLLALHRSYLTPGDSSSGWTAGAAAYYVGYLQPRTFLLKYNENGTITDAVDCALDPLSETKCTLKSFTVEKGIYQTSNFRVQPTESIVRFPNITNLCPFGEVFNATRFASVYAWDRKRISNCVAYYSVLYNSASFSTFKCYGVSPTKLNDLCFTNVYADSFVIRGDEVRQIAPGQTGKIADYNYKLPDDFTGCVIAWNSNNLDSKVGGNYNYLYRLFRKSNLKPFERDISTEIYQAGSTPCNGVEGFNCYFPLQSYGFQPTNGVGYQPYRVVVLSFELLHAPATVCGPKKSTNLVKNKCVNFNFNGLTGTGVLTESNKKFLPFQQFGRDIADTTDAVRDPQTLEILDITPCSFGGVSVITPGTNTSNQVAVLYQDVNCTEVPVAIHADQLTPTWRVYSTGSNVFQTRAGCLIGAEHVNNSYECDIPIGAGICASYQTQTNSPRRARSVASQSIIAYTMSLGAENSVAYSNNSIAIPTNFTISVTTEILPVSMTKTSVDCTMYICGDSTECSNLLLQYGSFCTQLNRALTGIAVEQDKNTQEVFAQVKQIYKTPPIKDFGGFNFSQILPDPSKPSKRSFIEDLLFNKVTLADAGFIKQYGDCLGDIAARDLICAQKFNGLTVLPPLLTDEMIAQYTSALLAGTITSGWTFGAGAALQIPFAMQMAYRFNGCGVTQNVLYENQKLIANQFNSAIGKIQDSLSSTASALGKLQDVVNQNAQALNTLVKQLSSNFGAISSVLNDILSRLDKVEAEVQIDRLITGRLQSLQTYVTQQLIRAAEIRASANLAATKMSECVLGQSKRVDFCGKGCHLMSFPQSAPHGVVFLHVTYVPAQEKNFTTAPAICHDGKAHFPREGVFVSNGTHWFVTQRNFYEPQIITTDNTFVSGNCDVVIGIVNNTVYDPLQPELDSFKEELDKYFKNHTSPDVDLGDISGINASVVNIQKEIDRLNEVAKNLNESLIDLQELGKYEQYIKGGSGYIPEAPRDGQAYVRKDGEWVLLSTFL

SEQ ID NO: 6243 - protein, 1241 aa, Artificial Sequence
  SARS-CoV-2/France/IDF0372/2020__EPI_ISL_406596 spike protein (1-1211)(I909C_Y1047C) Foldon construct
MFVFLVLLPLVSSQCVNLTTRTQLPPAYTNSFTRGVYYPDKVFRSSVLHSTQDLFLPFFSNVTWFHAIHVSGTNGTKRFDNPVLPFNDGVYFASTEKSNIIRGWIFGTTLDSKTQSLLIVNNATNVVIKVCEFQFCNDPFLGVYYHKNNKSWMESEFRVYSSANNCTFEYVSQPFLMDLEGKQGNFKNLREFVFKNIDGYFKIYSKHTPINLVRDLPQGFSALEPLVDLPIGINITRFQTLLALHRSYLTPGDSSSGWTAGAAAYYVGYLQPRTFLLKYNENGTITDAVDCALDPLSETKCTLKSFTVEKGIYQTSNFRVQPTESIVRFPNITNLCPFGEVFNATRFASVYAWNRKRISNCVADYSFLYNSASFSTFKCYGVSPTKLNDLCFTNVYADSFVIRGDEVRQIAPGQTGKIADYNYKLPDDFTGCVIAWNSNNLDSKVGGNYNYLYRLFRKSNLKPFERDISTEIYQAGSTPCNGVEGFNCYFPLQSYGFQPTNGVGYQPYRVVVLSFELLHAPATVCGPKKSTNLVKNKCVNFNFNGLTGTGVLTESNKKFLPFQQFGRDIADTTDAVRDPQTLEILDITPCSFGGVSVITPGTNTSNQVAVLYQDVNCTEVPVAIHADQLTPTWRVYSTGSNVFQTRAGCLIGAEHVNNSYECDIPIGAGICASYQTQTNSPRRARSVASQSIIAYTMSLGAENSVAYSNNSIAIPTNFTISVTTEILPVSMTKTSVDCTMYICGDSTECSNLLLQYGSFCTQLNRALTGIAVEQDKNTQEVFAQVKQIYKTPPIKDFGGFNFSQILPDPSKPSKRSFIEDLLFNKVTLADAGFIKQYGDCLGDIAARDLICAQKFNGLTVLPPLLTDEMIAQYTSALLAGTITSGWTFGAGAALQIPFAMQMAYRFNGCGVTQNVLYENQKLIANQFNSAIGKIQDSLSSTASALGKLQDVVNQNAQALNTLVKQLSSNFGAISSVLNDILSRLDKVEAEVQIDRLITGRLQSLQTYVTQQLIRAAEIRASANLAATKMSECVLGQSKRVDFCGKGCHLMSFPQSAPHGVVFLHVTYVPAQEKNFTTAPAICHDGKAHFPREGVFVSNGTHWFVTQRNFYEPQIITTDNTFVSGNCDVVIGIVNNTVYDPLQPELDSFKEELDKYFKNHTSPDVDLGDISGINASVVNIQKEIDRLNEVAKNLNESLIDLQELGKYEQYIKGGSGYIPEAPRDGQAYVRKDGEWVLLSTFL

SEQ ID NO: 6244 - protein, 1241 aa, Artificial Sequence
  SARS-CoV-2/Australia/VIC01/2020__EPI_ISL_406844 spike protein (1-1211)(I909C_Y1047C) Foldon construct
MFVFLVLLPLVSSQCVNLTTRTQLPPAYTNSFTRGVYYPDKVFRSSVLHSTQDLFLPFFSNVTWFHAIHVSGTNGTKRFDNPVLPFNDGVYFASTEKSNIIRGWIFGTTLDSKTQSLLIVNNATNVVIKVCEFQFCNDPFLGVYYHKNNKSWMESEFRVYSSANNCTFEYVSQPFLMDLEGKQGNFKNLREFVFKNIDGYFKIYSKHTPINLVRDLPQGFSALEPLVDLPIGINITRFQTLLALHRRYLTPGDSSSGWTAGAAAYYVGYLQPRTFLLKYNENGTITDAVDCALDPLSETKCTLKSFTVEKGIYQTSNFRVQPTESIVRFPNITNLCPFGEVFNATRFASVYAWNRKRISNCVADYSVLYNSASFSTFKCYGVSPTKLNDLCFTNVYADSFVIRGDEVRQIAPGQTGKIADYNYKLPDDFTGCVIAWNSNNLDSKVGGNYNYLYRLFRKSNLKPFERDISTEIYQAGSTPCNGVEGFNCYFPLQSYGFQPTNGVGYQPYRVVVLSFELLHAPATVCGPKKSTNLVKNKCVNFNFNGLTGTGVLTESNKKFLPFQQFGRDIADTTDAVRDPQTLEILDITPCSFGGVSVITPGTNTSNQVAVLYQDVNCTEVPVAIHADQLTPTWRVYSTGSNVFQTRAGCLIGAEHVNNSYECDIPIGAGICASYQTQTNSPRRARSVASQSIIAYTMSLGAENSVAYSNNSIAIPTNFTISVTTEILPVSMTKTSVDCTMYICGDSTECSNLLLQYGSFCTQLNRALTGIAVEQDKNTQEVFAQVKQIYKTPPIKDFGGFNFSQILPDPSKPSKRSFIEDLLFNKVTLADAGFIKQYGDCLGDIAARDLICAQKFNGLTVLPPLLTDEMIAQYTSALLAGTITSGWTFGAGAALQIPFAMQMAYRFNGCGVTQNVLYENQKLIANQFNSAIGKIQDSLSSTASALGKLQDVVNQNAQALNTLVKQLSSNFGAISSVLNDILSRLDKVEAEVQIDRLITGRLQSLQTYVTQQLIRAAEIRASANLAATKMSECVLGQSKRVDFCGKGCHLMSFPQSAPHGVVFLHVTYVPAQEKNFTTAPAICHDGKAHFPREGVFVSNGTHWFVTQRNFYEPQIITTDNTFVSGNCDVVIGIVNNTVYDPLQPELDSFKEELDKYFKNHTSPDVDLGDISGINASVVNIQKEIDRLNEVAKNLNESLIDLQELGKYEQYIKGGSGYIPEAPRDGQAYVRKDGEWVLLSTFL

SEQ ID NO: 6245 - protein, 1241 aa, Artificial Sequence
  SARS-CoV-2/Germany/BavPat1/2020__EPI_ISL_406862 spike protein (1-1211)(I909C_Y1047C) Foldon construct
MFVFLVLLPLVSSQCVNLTTRTQLPPAYTNSFTRGVYYPDKVFRSSVLHSTQDLFLPFFSNVTWFHAIHVSGTNGTKRFDNPVLPFNDGVYFASTEKSNIIRGWIFGTTLDSKTQSLLIVNNATNVVIKVCEFQFCNDPFLGVYYHKNNKSWMESEFRVYSSANNCTFEYVSQPFLMDLEGKQGNFKNLREFVFKNIDGYFKIYSKHTPINLVRDLPQGFSALEPLVDLPIGINITRFQTLLALHRSYLTPGDSSSGWTAGAAAYYVGYLQPRTFLLKYNENGTITDAVDCALDPLSETKCTLKSFTVEKGIYQTSNFRVQPTESIVRFPNITNLCPFGEVFNATRFASVYAWNRKRISNCVADYSVLYNSASFSTFKCYGVSPTKLNDLCFTNVYADSFVIRGDEVRQIAPGQTGKIADYNYKLPDDFTGCVIAWNSNNLDSKVGGNYNYLYRLFRKSNLKPFERDISTEIYQAGSTPCNGVEGFNCYFPLQSYGFQPTNGVGYQPYRVVVLSFELLHAPATVCGPKKSTNLVKNKCVNFNFNGLTGTGVLTESNKKFLPFQQFGRDIADTTDAVRDPQTLEILDITPCSFGGVSVITPGTNTSNQVAVLYQGVNCTEVPVAIHADQLTPTWRVYSTGSNVFQTRAGCLIGAEHVNNSYECDIPIGAGICASYQTQTNSPRRARSVASQSIIAYTMSLGAENSVAYSNNSIAIPTNFTISVTTEILPVSMTKTSVDCTMYICGDSTECSNLLLQYGSFCTQLNRALTGIAVEQDKNTQEVFAQVKQIYKTPPIKDFGGFNFSQILPDPSKPSKRSFIEDLLFNKVTLADAGFIKQYGDCLGDIAARDLICAQKFNGLTVLPPLLTDEMIAQYTSALLAGTITSGWTFGAGAALQIPFAMQMAYRFNGCGVTQNVLYENQKLIANQFNSAIGKIQDSLSSTASALGKLQDVVNQNAQALNTLVKQLSSNFGAISSVLNDILSRLDKVEAEVQIDRLITGRLQSLQTYVTQQLIRAAEIRASANLAATKMSECVLGQSKRVDFCGKGCHLMSFPQSAPHGVVFLHVTYVPAQEKNFTTAPAICHDGKAHFPREGVFVSNGTHWFVTQRNFYEPQIITTDNTFVSGNCDVVIGIVNNTVYDPLQPELDSFKEELDKYFKNHTSPDVDLGDISGINASVVNIQKEIDRLNEVAKNLNESLIDLQELGKYEQYIKGGSGYIPEAPRDGQAYVRKDGEWVLLSTFL

SEQ ID NO: 6246 - protein, 1241 aa, Artificial Sequence
  SARS-CoV-2/Wuhan/HBCDC-HB-02/2020__EPI_ISL_412978 spike protein (1-1211)(I909C_Y1047C) Foldon construct
MFVFLVLLPLVSSQCVNLTTRTQLPPAYTNSFTRGVYYPDKVFRSSVLHSTQDLFLPFFSNVTWFHAIHVSGTNGTKRFDNPVLPFNDGVYFASTEKSNIIRGWIFGTTLDSKTQSLLIVNNATNVVIKVCEFQFCNDPFLGVYYHKNNKSWMESEFRVYSSANNCTFEYVSQPFLMDLEGKQGNFKNLREFVFKNIDGYFKIYSKHTPINLVRDLPQGFSALEPLVDLPIGINITRFQTLLALHRSYLTPGDSSSGWTAGAAAYYVGYLQPRTFLLKYNENGTITDAVDCALDPLSETKCTLKSFTVEKGIYQTSNFRVQPTESIVRFPNITNLCPFGEVFNATRFASVYAWNRKRISNCVADYSVLYNSASFSTFKCYGVSPTKLNDLCFTNVYADSFVIRGDEVRQIAPGQTGKIADYNYKLPDDFTGCVIAWNSNNLDSKVGGNYNYLYRLFRKSNLKPFERDISTEIYQAGSTPCNGVEGFNCYFPLQSYGFQPTNGVGYQPYRVVVLSFELLHAPATVCGPKKSTNLVKNKCVNFNFNGLTGTGVLTESNKKFLPFQQFGRDIADTTDAVRDPQTLEILDITPCSFGGVSVITPGTNTSNQVAVLYQDVNCTEVPVAIHADQLTPTWRVYSTGSNVFQTRAGCLIGAEHVNNSYECDIPIGAGICASYQTQTNSPRRARSVASQSIIAYTMSLGAENSVAYSNNSIAIPTNFTISVTTEILPVSMTKTSVDCTMYICGDSTECSNFLLQYGSFCTQLNRALTGIAVEQDKNTQEVFAQVKQIYKTPPIKDFGGFNFSQILPDPSKPSKRSFIEDLLFNKVTLADAGFIKQYGDCLGDIAARDLICAQKFNGLTVLPPLLTDEMIAQYTSALLAGTITSGWTFGAGAALQIPFAMQMAYRFNGCGVTQNVLYENQKLIANQFNSAIGKIQDSLSSTASALGKLQDVVNQNAQALNTLVKQLSSNFGAISSVLNDILSRLDKVEAEVQIDRLITGRLQSLQTYVTQQLIRAAEIRASANLAATKMSECVLGQSKRVDFCGKGCHLMSFPQSAPHGVVFLHVTYVPAQEKNFTTAPAICHDGKAHFPREGVFVSNGTHWFVTQRNFYEPQIITTDNTFVSGNCDVVIGIVNNTVYDPLQPELDSFKEELDKYFKNHTSPDVDLGDISGINASVVNIQKEIDRLNEVAKNLNESLIDLQELGKYEQYIKGGSGYIPEAPRDGQAYVRKDGEWVLLSTFL

SEQ ID NO: 6247 - protein, 1241 aa, Artificial Sequence
  SARS-CoV-2/Australia/QLD02/2020__EPI_ISL_407896 spike protein (1-1211)(I909C_Y1047C) Foldon construct
MFVFLVLLPLVSSQCVNLTTRTQLPPAYTNSFTRGVYYPDKVFRSSVLHSTQDLFLPFFSNVTWFHAIHVSGTNGTKRFDNPVLPFNDGVYFASTEKSNIIRGWIFGTTLDSKTQSLLIVNNATNVVIKVCEFQFCNDPFLGVYYHKNNKSWMESEFRVYSSANNCTFEYVSQPFLMDLEGKQGNFKNLREFVFKNIDGYFKIYSKHTPINLVRDLPQGFSALEPLVDLPIGINITRFQTLLALHRSYLTPGDSSSGWTAGAAAYYVGYLQPRTFLLKYNENGTITDAVDCALDPLSETKCTLKSFTVEKGIYQTSNFRVQPTESIVRFPNITNLCPFGEVFNATRFASVYAWNRKRISNCVADYSVLYNSASFSTFKCYGVSPTKLNDLCFTNVYADSFVIRGDEVRQIAPGQTGKIADYNYKLPDDFTGCVIAWNSNNLDSKVGGNYNYLYRLFRKSNLKPFERDISTEIYQAGSTPCNGVEGFNCYFPLQSYGFQPTNGVGYQPYRVVVLSFELLHAPATVCGPKKSTNLVKNKCVNFNFNGLTGTGVLTESNKKFLPFQQFGRDIADTTDAVRDPQTLEILDITPCSFGGVSVITPGTNTSNQVAVLYQDVNCTEVPVAIHADQLTPTWRVYSTGSNVFQTRAGCLIGAEHVNNSYECDIPIGAGICASYQTQTNSPRRARSVASQSIIAYTMSLGAENSVAYSNNSIAIPTNFTISVTTEILPVSMTKTSVDCTMYICGDSTECSNLLLQYGSFCTQLNRALTGIAVEQDKNTQEVFAQVKQIYKTPPIKDFGGFNFSQILPDPSKPSKRSFIEDLLFNKVTLADAGFIKQYGDCLGDIAARDLICAQKFNGLTVLPPLLTDEMIAQYTSALLAGTITSGWTFGAGAALQIPFAMQMAYRFNGCGVTQNVLYENQKLIANQFNSAIGKIQDSLSSTASALGKLQDVVNQNAQALNTLVKQLSSNFGAISSVLNDILSRLDKVEAEVQIDRLITGRLQSLQTYVTQQLIRAAEIRASANLAATKMSECVLGQSKRVDFCGKGCHLMSFPQSAPHGVVFLHVTYVPAQEKNFTTAPAICHDGKAHFPREGVFVSNGTHWFVTQRNFYEPQIITTDNTFVSGNCDVVIGIVNNTVYDPLQLELDSFKEELDKYFKNHTSPDVDLGDISGINASVVNIQKEIDRLNEVAKNLNESLIDLQELGKYEQYIKGGSGYIPEAPRDGQAYVRKDGEWVLLSTFL

SEQ ID NO: 6248 - protein, 1241 aa, Artificial Sequence
  SARS-CoV-2/India/1-31/2020__EPI_ISL_413523 spike protein (1-1211)(I909C_Y1047C) Foldon construct
MFVFLVLLPLVSSQCVNLTTRTQLPPAYTNSFTRGVYYPDKVFRSSVLHSTQDLFLPFFSNVTWFHAIHVSGTNGTKRFDNPVLPFNDGVYFASTEKSNIIRGWIFGTTLDSKTQSLLIVNNATNVVIKVCEFQFCNDPFLGVYYHKNNKSWMESEFRVYSSANNCTFEYVSQPFLMDLEGKQGNFKNLREFVFKNIDGYFKIYSKHTPINLVRDLPQGFSALEPLVDLPIGINITRFQTLLALHRSYLTPGDSSSGWTAGAAAYYVGYLQPRTFLLKYNENGTITDAVDCALDPLSETKCTLKSFTVEKGIYQTSNFRVQPTESIVRFPNITNLCPFGEVFNATRFASVYAWNRKRISNCVADYSVLYNSASFSTFKCYGVSPTKLNDLCFTNVYADSFVIRGDEVRQIAPGQTGKIADYNYKLPDDFTGCVIAWNSNNLDSKVGGNYNYLYRLFRKSNLKPFERDISTEIYQAGSTPCNGVEGFNCYFPLQSYGFQPTNGVGYQPYRVVVLSFELLHAPATVCGPKKSTNLVKNKCVNFNFNGLTGTGVLTESNKKFLPFQQFGRDIADTTDAVRDPQTLEILDITPCSFGGVSVITPGTNTSNQVAVLYQDVNCTEVPVAIHADQLTPTWRVYSTGSNVFQTRAGCLIGAEHVNNSYECDIPIGAGICASYQTQTNSPRRARSVASQSIIAYTMSLGAENSVAYSNNSIAIPTNFTISVTTEILPVSMTKTSVDCTMYICGDSTECSNLLLQYGSFCTQLNRALTGIAVEQDKNTQEVFAQVKQIYKTPPIKDFGGFNFSQILPDPSKPSKRSFIEDLLFNKVTLADAGFIKQYGDCLGDIAARDLICAQKFNGLTVLPPLLTDEMIAQYTSALLAGTITSGWTFGAGAALQIPFAMQMAYRFNGCGVTQNVLYENQKLIANQFNSVIGKIQDSLSSTASALGKLQDVVNQNAQALNTLVKQLSSNFGAISSVLNDILSRLDKVEAEVQIDRLITGRLQSLQTYVTQQLIRAAEIRASANLAATKMSECVLGQSKRVDFCGKGCHLMSFPQSAPHGVVFLHVTYVPAQEKNFTTAPAICHDGKAHFPREGVFVSNGTHWFVTQRNFYEPQIITTDNTFVSGNCDVVIGIVNNTVYDPLQPELDSFKEELDKYFKNHTSPDVDLGDISGINASVVNIQKEIDRLNEVAKNLNESLIDLQELGKYEQYIKGGSGYIPEAPRDGQAYVRKDGEWVLLSTFL

SEQ ID NO: 6249 - protein, 1241 aa, Artificial Sequence
  SARS-CoV-2/Guangdong/GD2020087-P0008/2020__EPI_ISL_413863 spike protein (1-1211)(I909C_Y1047C) Foldon construct
MFVFLVLLPLVSSQCVNLTTRTQLPPAYTNSFTRGVYYPDKVFRSSVLHSTQDLFLPFFSNVTWFHAIHVSGTNGTKRFDNPVLPFNDGVYFASTEKSNIIRGWIFGTTLDSKTQSLLIVNNATNVVIKVCEFQFCNDPFLGVYYHKNNKSWMESEFRVYSSANNCTFEYVSQPFLMDLEGKQGNFKNLREFVFKNIDGYFKIYSKHTPINLVRDLPQGFSALEPLVDLPIGINITRFQTLLALHRSYLTPGDSSSGWTAGAAAYYVGYLQPRTFLLKYNENGTITDAVDCALDPLSETKCTLKSFTVEKGIYQTSNFRVQPTESIVRFPNITNLCPFGEVFNATRFASVYAWNRKRISNCVADYSVLYNSASFSTFKCYGVSPTKLNDLCFTNVYADSFVIRGDEVREIAPGQTGKIADYNYKLPDDFTGCVIAWNSNNLDSKVGGNYNYLYRLFRKSNLKPFERDISTEIYQAGSTPCNGVEGFNCYFPLQSYGFQPTNGVGYQPYRVVVLSFELLHAPATVCGPKKSTNLVKNKCVNFNFNGLTGTGVLTESNKKFLPFQQFGRDIADTTDAVRDPQTLEILDITPCSFGGVSVITPGTNTSNQVAVLYQDVNCTEVPVAIHADQLTPTWRVYSTGSNVFQTRAGCLIGAEHVNNSYECDIPIGAGICASYQTQTNSPRRARSVASQSIIAYTMSLGAENSVAYSNNSIAIPTNFTISVTTEILPVSMTKTSVDCTMYICGDSTECSNLLLQYGSFCTQLNRALTGIAVEQDKNTQEVFAQVKQIYKTPPIKDFGGFNFSQILPDPSKPSKRSFIEDLLFNKVTLADAGFIKQYGDCLGDIAARDLICAQKFNGLTVLPPLLTDEMIAQYTSALLAGTITSGWTFGAGAALQIPFAMQMAYRFNGCGVTQNVLYENQKLIANQFNSAIGKIQDSLSSTASALGKLQDVVNQNAQALNTLVKQLSSNFGAISSVLNDILSRLDKVEAEVQIDRLITGRLQSLQTYVTQQLIRAAEIRASANLAATKMSECVLGQSKRVDFCGKGCHLMSFPQSAPHGVVFLHVTYVPAQEKNFTTAPAICHDGKAHFPREGVFVSNGTHWFVTQRNFYEPQIITTDNTFVSGNCDVVIGIVNNTVYDPLQPELDSFKEELDKYFKNHTSPDVDLGDISGINASVVNIQKEIDRLNEVAKNLNESLIDLQELGKYEQYIKGGSGYIPEAPRDGQAYVRKDGEWVLLSTFL

SEQ ID NO: 6250 - protein, 1241 aa, Artificial Sequence
  SARS-CoV-2/Sweden/01/2020__EPI_ISL_411951 spike protein (1-1211)(I909C_Y1047C) Foldon construct
MFVFLVLLPLVSSQCVNLTTRTQLPPAYTNSFTRGVYYPDKVFRSSVLHSTQDLFLPFFSNVTWFHAIHVSGTNGTKRFDNPVLPFNDGVYFASTEKSNIIRGWIFGTTLDSKTQSLLIVNNATNVVIKVCEFQFCNDPFLGVYYHKNNKSWMESEFRVYSSANNCTFEYVSQPFLMDLEGKQGNFKNLREFVFKNIDGYFKIYSKHTPINLVRDLPQGFSALEPLVDLPIGINITRFQTLLALHRSYLTPGDSSSGWTAGAAAYYVGYLQPRTFLLKYNENGTITDAVDCALDPLSETKCTLKSFTVEKGIYQTSNFRVQPTESIVRFPNITNLCPFGEVFNATRFASVYAWNRKRISNCVADYSVLYNSASFSTFKCYGVSPTKLNDLCFTNVYADSFVIRGDEVRQIAPGQTGKIADYNYKLPDDFTGCVIAWNSNNLDSKVGGNYNYLYRLFRKSNLKPFERDISTEIYQAGSTPCNGVEGFNCYFPLQSYGFQPTNGVGYQPYRVVVLSFELLHAPATVCGPKKSTNLVKNKCVNFNFNGLTGTGVLTESNKKFLPFQQFGRDIADTTDAVRDPQTLEILDITPCSFGGVSVITPGTNTSNQVAVLYQDVNCTEVPVAIHADQLTPTWRVYSTGSNVFQTRAGCLIGAEHVNNSYECDIPIGAGICASYQTQTNSPRRARSVASQSIIAYTMSLGAENSVAYSNNSIAIPTNFTISVTTEILPVSMTKTSVDCTMYICGDSTECSNLLLQYGSFCTQLNRALTGIAVEQDKNTQEVFAQVKQIYKTPPIKDCGGFNFSQILPDPSKPSKRSFIEDLLFNKVTLADAGFIKQYGDCLGDIAARDLICAQKFNGLTVLPPLLTDEMIAQYTSALLAGTITSGWTFGAGAALQIPFAMQMAYRFNGCGVTQNVLYENQKLIANQFNSAIGKIQDSLSSTASALGKLQDVVNQNAQALNTLVKQLSSNFGAISSVLNDILSRLDKVEAEVQIDRLITGRLQSLQTYVTQQLIRAAEIRASANLAATKMSECVLGQSKRVDFCGKGCHLMSFPQSAPHGVVFLHVTYVPAQEKNFTTAPAICHDGKAHFPREGVFVSNGTHWFVTQRNFYEPQIITTDNTFVSGNCDVVIGIVNNTVYDPLQPELDSFKEELDKYFKNHTSPDVDLGDISGINASVVNIQKEIDRLNEVAKNLNESLIDLQELGKYEQYIKGGSGYIPEAPRDGQAYVRKDGEWVLLSTFL

SEQ ID NO: 6251 - protein, 1241 aa, Artificial Sequence
  SARS-CoV-2/Tianmen/HBCDC-HB-07/2020__EPI_ISL_412983 spike protein (1-1211)(I909C_Y1047C) Foldon construct
MFVFLVLLPLVSSQCVNLTTRTQLPPAYTNSFTRGVYYPDKVFRSSVLHSTQDLFLPFFSNVTWFHAIHVSGTNGTKRFDNPVLPFNDGVYFASTEKSNIIRGWIFGTTLDSKTQSLLIVNNATNVVIKVCEFQFCNDPFLGVYYHKNNKSWMESEFRVYSSANNCTFEYVSQPFLMDLEGKQGNFKNLREFVFKNIDGYFKIYSKHTPINLVRDLPQGFSALEPLVDLPIGINITRFQTLLALHRSYLTPGDSSSGWTAGAAAYYVGYLQPRTFLLKYNENGTITDAVDCALDPLSETKCTLKSFTVEKGIYQTSNFRVQPTESIVRFPNITNLCPFGEVFNATRFASVYAWNRKRISNCVADYSVLYNSASFSTFKCYGVSPTKLNDLCFTNVYADSFVIRGDEVRQIAPGQTGKIADYNYKLPDDFTGCVIAWNSNNLDSKVGGNYNYLYRLFRKSNLKPFERDISTEIYQAGSTPCNGVEGFNCYFPLQSYGFQPTNGVGYQPYRVVVLSFELLHAPATVCGPKKSTNLVKNKCVNFNFNGLTGTGVLTESNKKFLPFQQFGRDIADTTDAVRDPQTLEILDITPCSFGGVSVITPGTNTSNQVAVLYQDLNCTEVPVAIHADQLTPTWRVYSTGSNVFQTRAGCLIGAEHVNNSYECDIPIGAGICASYQTQTNSPRRARSVASQSIIAYTMSLGAENSVAYSNNSIAIPTNFTISVTTEILPVSMTKTSVDCTMYICGDSTECSNLLLQYGSFCTQLNRALTGIAVEQDKNTQEVFAQVKQIYKTPPIKDFGGFNFSQILPDPSKPSKRSFIEDLLFNKVTLADAGFIKQYGDCLGDIAARDLICAQKFNGLTVLPPLLTDEMIAQYTSALLAGTITSGWTFGAGAALQIPFAMQMAYRFNGCGVTQNVLYENQKLIANQFNSAIGKIQDSLSSTASALGKLQDVVNQNAQALNTLVKQLSSNFGAISSVLNDILSRLDKVEAEVQIDRLITGRLQSLQTYVTQQLIRAAEIRASANLAATKMSECVLGQSKRVDFCGKGCHLMSFPQSAPHGVVFLHVTYVPAQEKNFTTAPAICHDGKAHFPREGVFVSNGTHWFVTQRNFYEPQIITTDNTFVSGNCDVVIGIVNNTVYDPLQPELDSFKEELDKYFKNHTSPDVDLGDISGINASVVNIQKEIDRLNEVAKNLNESLIDLQELGKYEQYIKGGSGYIPEAPRDGQAYVRKDGEWVLLSTFL

SEQ ID NO: 6252 - protein, 1241 aa, Artificial Sequence
  SARS-CoV-2/Hong Kong/case42_VM20002493/2020__EPI_ISL_414527 spike protein (1-1211)(I909C_Y1047C) Foldon construct
MFVFLVLLPLVSSQCVNLTTRTQLPPAYTNSFTRGVYYPDKVFRSSVLHSTQDLFLPFFSNVTWFHAIHVSGTNGTKRFDNPVLPFNDGVYFASTEKSNIIRGWIFGTTLDSKTQSLLIVNNATNVVIKVCEFQFCNDPFLGVYYHKNNKSWMESEFRVYSSANNCTFEYVSQPFLMDLEGKQGNFKNLREFVFKNIDGYFKIYSKHTPINLVRDLPQGFSALEPLVDLPIGINITRFQTLLALHRSYLTPGDSSSGWTAGAAAYYVGYLQPRTFLLKYNENGTITDAVDCALDPLSETKCTLKSFTVEKGIYQTSNFRVQPTESIVRFPNITNLCPFGEVFNATRFASVYAWNRKRISNCVADYSVLYNSASFSTFKCYGVSPTKLNDLCFTNVYADSFVIRGDEVRQIAPGQTGKIADYNYKLPDDFTGCVIAWNSNNLDSKVGGNYNYLYRLFRKSNLKPFERDISTEIYQAGSTPCNGVEGFNCYFPLQSYGFQPTNGVGYQPYRVVVLSFELLHAPATVCGPKKSTNLVKNKCVNFNFNGLTGTGVLTESNKKFLPFQQFGRDIADTTDAVRDPQTLEILDITPCSFGGVSVITPGTNTSNQVAVLYQDVNCTEVPVAIHADQLTPTWRVYSTGSNVFQTRAGCLIGAEHVNNSYECDIPIGAGICASYQTQTNSPRRARSVASQSIIAYTMSLGAENSVAYSNNSIAIPTNFAISVTTEILPVSMTKTSVDCTMYICGDSTECSNLLLQYGSFCTQLNRALTGIAVEQDKNTQEVFAQVKQIYKTPPIKDFGGFNFSQILPDPSKPSKRSFIEDLLFNKVTLADAGFIKQYGDCLGDIAARDLICAQKFNGLTVLPPLLTDEMIAQYTSALLAGTITSGWTFGAGAALQIPFAMQMAYRFNGCGVTQNVLYENQKLIANQFNSAIGKIQDSLSSTASALGKLQDVVNQNAQALNTLVKQLSSNFGAISSVLNDILSRLDKVEAEVQIDRLITGRLQSLQTYVTQQLIRAAEIRASANLAATKMSECVLGQSKRVDFCGKGCHLMSFPQSAPHGVVFLHVTYVPAQEKNFTTAPAICHDGKAHFPREGVFVSNGTHWFVTQRNFYEPQIITTDNTFVSGNCDVVIGIVNNTVYDPLQPELDSFKEELDKYFKNHTSPDVDLGDISGINASVVNIQKEIDRLNEVAKNLNESLIDLQELGKYEQYIKGGSGYIPEAPRDGQAYVRKDGEWVLLSTFL

SEQ ID NO: 6253 - protein, 1241 aa, Artificial Sequence
  SARS-CoV-2/USA/CruiseA-23/2020__EPI_ISL_414482 spike protein (1-1211)(I909C_Y1047C) Foldon construct
MFVFLVLLPLVSSQCVNLTTRTQLPPAYTNSFTRGVYYPDKVFRSSVLHSTQDLFLPFFSNVTWFHAIHVSGTNGTKRFDNPVLPFNDGVYFASTEKSNIIRGWIFGTTLDSKTQSLLIVNNATNVVIKVCEFQFCNDPFLGVYYHKNNKSWMESEFRVYSSANNCTFEYVSQPFLMDLEVKQGNFKNLREFVFKNIDGYFKIYSKHTPINLVRDLPQGFSALEPLVDLPIGINITRFQTLLALHRSYLTPGDSSSGWTAGAAAYYVGYLQPRTFLLKYNENGTITDAVDCALDPLSETKCTLKSFTVEKGIYQTSNFRVQPTESIVRFPNITNLCPFGEVFNATRFASVYAWNRKRISNCVADYSVLYNSASFSTFKCYGVSPTKLNDLCFTNVYADSFVIRGDEVRQIAPGQTGKIADYNYKLPDDFTGCVIAWNSNNLDSKVGGNYNYLYRLFRKSNLKPFERDISTEIYQAGSTPCNGVEGFNCYFPLQSYGFQPTNGVGYQPYRVVVLSFELLHAPATVCGPKKSTNLVKNKCVNFNFNGLTGTGVLTESNKKFLPFQQFGRDIADTTDAVRDPQTLEILDITPCSFGGVSVITPGTNTSNQVAVLYQDVNCTEVPVAIHADQLTPTWRVYSTGSNVFQTRAGCLIGAEHVNNSYECDIPIGAGICASYQTQTNSPRRARSVASQSIIAYTMSLGAENSVAYSNNSIAIPTNFTISVTTEILPVSMTKTSVDCTMYICGDSTECSNLLLQYGSFCTQLNRALTGIAVEQDKNTQEVFAQVKQIYKTPPIKDFGGFNFSQILPDPSKPSKRSFIEDLLFNKVTLADAGFIKQYGDCLGDIAARDLICAQKFNGLTVLPPLLTDEMIAQYTSALLAGTITSGWTFGAGAALQIPFAMQMAYRFNGCGVTQNVLYENQKLIANQFNSAIGKIQDSLSSTASALGKLQDVVNQNAQALNTLVKQLSSNFGAISSVLNDILSRLDKVEAEVQIDRLITGRLQSLQTYVTQQLIRAAEIRASANLAATKMSECVLGQSKRVDFCGKGCHLMSFPQSAPHGVVFLHVTYVPAQEKNFTTAPAICHDGKAHFPREGVFVSNGTHWFVTQRNFYEPQIITTDNTFVSGNCDVVIGIVNNTVYDPLQPELDSFKEELDKYFKNHTSPDVDLGDISGINASVVNIQKEIDRLNEVAKNLNESLIDLQELGKYEQYIKGGSGYIPEAPRDGQAYVRKDGEWVLLSTFL

SEQ ID NO: 6254 - protein, 1241 aa, Artificial Sequence
  SARS-CoV-2/Hong Kong/case85_VM20002868/2020__EPI_ISL_414519 spike protein (1-1211)(I909C_Y1047C) Foldon construct
MFVFLVLVPLVSSQCVNLTTRTQLPPAYTNSFTRGVYYPDKVFRSSVLHSTQDLFLPFFSNVTWFHAIHVSGTNGTKRFDNPVLPFNDGVYFASTEKSNIIRGWIFGTTLDSKTQSLLIVNNATNVVIKVCEFQFCNDPFLGVYYHKNNKSWMESEFRVYSSANNCTFEYVSQPFLMDLEGKQGNFKNLREFVFKNIDGYFKIYSKHTPINLVRDLPQGFSALEPLVDLPIGINITRFQTLLALHRSYLTPGDSSSGWTAGAAAYYVGYLQPRTFLLKYNENGTITDAVDCALDPLSETKCTLKSFTVEKGIYQTSNFRVQPTESIVRFPNITNLCPFGEVFNATRFASVYAWNRKRISNCVADYSVLYNSASFSTFKCYGVSPTKLNDLCFTNVYADSFVIRGDEVRQIAPGQTGKIADYNYKLPDDFTGCVIAWNSNNLDSKVGGNYNYLYRLFRKSNLKPFERDISTEIYQAGSTPCNGVEGFNCYFPLQSYGFQPTNGVGYQPYRVVVLSFELLHAPATVCGPKKSTNLVKNKCVNFNFNGLTGTGVLTESNKKFLPFQQFGRDIADTTDAVRDPQTLEILDITPCSFGGVSVITPGTNTSNQVAVLYQDVNCTEVPVAIHADQLTPTWRVYSTGSNVFQTRAGCLIGAEHVNNSYECDIPIGAGICASYQTQTNSPRRARSVASQSIIAYTMSLGAENSVAYSNNSIAIPTNFTISVTTEILPVSMTKTSVDCTMYICGDSTECSNLLLQYGSFCTQLNRALTGIAVEQDKNTQEVFAQVKQIYKTPPIKDFGGFNFSQILPDPSKPSKRSFIEDLLFNKVTLADAGFIKQYGDCLGDIAARDLICAQKFNGLTVLPPLLTDEMIAQYTSALLAGTITSGWTFGAGAALQIPFAMQMAYRFNGCGVTQNVLYENQKLIANQFNSAIGKIQDSLSSTASALGKLQDVVNQNAQALNTLVKQLSSNFGAISSVLNDILSRLDKVEAEVQIDRLITGRLQSLQTYVTQQLIRAAEIRASANLAATKMSECVLGQSKRVDFCGKGCHLMSFPQSAPHGVVFLHVTYVPAQEKNFTTAPAICHDGKAHFPREGVFVSNGTHWFVTQRNFYEPQIITTDNTFVSGNCDVVIGIVNNTVYDPLQPELDSFKEELDKYFKNHTSPDVDLGDISGINASVVNIQKEIDRLNEVAKNLNESLIDLQELGKYEQYIKGGSGYIPEAPRDGQAYVRKDGEWVLLSTFL

SEQ ID NO: 6255 - protein, 1241 aa, Artificial Sequence; identical to SEQ ID NO: 6245
  SARS-CoV-2/England/200990660/2020__EPI_ISL_414523 spike protein (1-1211)(I909C_Y1047C) Foldon construct

SEQ ID NO: 6256 - protein, 1241 aa, Artificial Sequence
  SARS-CoV-2/Australia/NSW09/2020__EPI_ISL_413595 spike protein (1-1211)(I909C_Y1047C) Foldon construct
MFVFLVLLPLVSSQCVNLTTRTQLPPAYTNSFTRGVYYPDKVFRSSVLHSTQDLFLPFFSNVTWFHAIHVSGTNGTKRFDNPVLPFNDGVYFASTEKSNIIRGWIFGTTLDSKTQSLLIVNNATNVVIKVCEFQFCNDPFLGVYYHKNNKSWMESEFRVYSSANNCTFEYVSQPFLMDLEGKQGNFKNLREFVFKNIDGYFKIYSKHTPINLVRDLPQGFSALEPLVDLPIGINITRFQTLLALHRSYLTPGDSSSGWTAGAAAYYVGYLQPRTFLLKYNENGTITDAVDCALDPLSETKCTLKSFTVEKGIYQTSNFRVQPTESIVRFPNITNLCPFGEVFNATRFASVYAWNRKRISNCVADYSVLYNSASFSTFKCYGVSPTKLNDLCFTNVYADSFVIRGDEVRQIAPGQTGKIADYNYKLPDDFTGCVIAWNSNNLDSKVGGNYNYLYRLFRKSNLKPFERDISTEIYQAGSTPCNGVEGFNCYFPLQSYGFQPTNGVGYQPYRVVVLSFELLHAPATVCGPKKSTNLVKNKCVNFNFNGLTGTGVLTESNKKFLPFQQFGRDIADTTDAVRDPQTLEILDITPCSFGGVSVITPGTNTSNQVAVLYQDVNCTEVPVAIHADQLTPTWRVYSTGSNVFQTRAGCLIGAEHVNNSYECDIPIGAGICASYQTQTNSPRRARSVASQSIIAYTMSLGAENSVAYSNNSIAIPTNFTISVTTEILPVSMTKTSVDCTMYICGDSTECSNLLLQYGSFCTQLNRALTGIAVEQDKNTQEVFAQVKQIYKTPPIKDFGGFNFSQILPDPSKPSKRSFIEDLLFNKVTLADAGFIKQYGDCLGDIAARDLICAQKFNGLTVLPPLLTDEMIAQYTSALLAGTITSGWTFGAGAALQIPFAMQMAYRFNGCGVTQNVLYENQKLIANQFNSAIGKIQDSLSFTASALGKLQDVVNQNAQALNTLVKQLSSNFGAISSVLNDILSRLDKVEAEVQIDRLITGRLQSLQTYVTQQLIRAAEIRASANLAATKMSECVLGQSKRVDFCGKGCHLMSFPQSAPHGVVFLHVTYVPAQEKNFTTAPAICHDGKAHFPREGVFVSNGTHWFVTQRNFYEPQIITTDNTFVSGNCDVVIGIVNNTVYDPLQPELDSFKEELDKYFKNHTSPDVDLGDISGINASVVNIQKEIDRLNEVAKNLNESLIDLQELGKYEQYIKGGSGYIPEAPRDGQAYVRKDGEWVLLSTFL

SEQ ID NO: 6257 - protein, 1241 aa, Artificial Sequence; identical to SEQ ID NO: 6237
  SARS-CoV-2/Australia/NSW10/2020__EPI_ISL_413596 spike protein (1-1211)(I909C_Y1047C) Foldon construct

SEQ ID NO: 6258 - protein, 1241 aa, Artificial Sequence
  SARS-CoV-2/Switzerland/1000477797/2020__EPI_ISL_413023 spike protein (1-1211)(I909C_Y1047C) Foldon construct
MFVFLVLLPLVSSQCVNLTTRTQLPPAYTNSFTRGVYYPDKVFRSSVLHSTQDLFLPFFSNVTWFHAIHVSGTNGTKRFDNPVLPFNDGVYFASTEKSNIIRGWIFGTTLDSKTQSLLIVNNATNVVIKVCEFQFCNDPFLGVYYHKNNKSWMESEFRVYSSANNCTFEYVSQPFLMDLEGKQGNFKNLREFVFKNIDGYFNIYSKHTPINLVRDLPQGFSALEPLVDLPIGINITRFQTLLALHRSYLTPGDSSSGWTAGAAAYYVGYLQPRTFLLKYNENGTITDAVDCALDPLSETKCTLKSFTVEKGIYQTSNFRVQPTESIVRFPNITNLCPFGEVFNATRFASVYAWNRKRISNCVADYSVLYNSASFSTFKCYGVSPTKLNDLCFTNVYADSFVIRGDEVRQIAPGQTGKIADYNYKLPDDFTGCVIAWNSNNLDSKVGGNYNYLYRLFRKSNLKPFERDISTEIYQAGSTPCNGVEGFNCYFPLQSYGFQPTNGVGYQPYRVVVLSFELLHAPATVCGPKKSTNLVKNKCVNFNFNGLTGTGVLTESNKKFLPFQQFGRDIADTTDAVRDPQTLEILDITPCSFGGVSVITPGTNTSNQVAVLYQGVNCTEVPVAIHADQLTPTWRVYSTGSNVFQTRAGCLIGAEHVNNSYECDIPIGAGICASYQTQTNSPRRARSVASQSIIAYTMSLGAENSVAYSNNSIAIPTNFTISVTTEILPVSMTKTSVDCTMYICGDSTECSNLLLQYGSFCTQLNRALTGIAVEQDKNTQEVFAQVKQIYKTPPIKDFGGFNFSQILPDPSKPSKRSFIEDLLFNKVTLADAGFIKQYGDCLGDIAARDLICAQKFNGLTVLPPLLTDEMIAQYTSALLAGTITSGWTFGAGAALQIPFAMQMAYRFNGCGVTQNVLYENQKLIANQFNSAIGKIQDSLSSTASALGKLQDVVNQNAQALNTLVKQLSSNFGAISSVLNDILSRLDKVEAEVQIDRLITGRLQSLQTYVTQQLIRAAEIRASANLAATKMSECVLGQSKRVDFCGKGCHLMSFPQSAPHGVVFLHVTYVPAQEKNFTTAPAICHDGKAHFPREGVFVSNGTHWFVTQRNFYEPQIITTDNTFVSGNCDVVIGIVNNTVYDPLQPELDSFKEELDKYFKNHTSPDVDLGDISGINASVVNIQKEIDRLNEVAKNLNESLIDLQELGKYEQYIKGGSGYIPEAPRDGQAYVRKDGEWVLLSTFL

SEQ ID NO: 6259 - protein, 1241 aa, Artificial Sequence
  SARS-CoV-2/Belgium/BA-02291/2020__EPI_ISL_415159 spike protein (1-1211)(I909C_Y1047C) Foldon construct
MFVFLVLLPLVSSQCVNLTTRTQLPPAYTNSFTRGVYYPDKVFRSSVLHSTQDLFLPFFSNVTWFHAIHVSGTNGTKRFDNPVLPFNDGVYFASTEKSNIIRGWIFGTTLDSKTQSLLIVNNATNVVIKVCEFQFCNDPFLGVYYHKNNKSWMESEFRVYSSANNCTFEYVSQPFLMDLEGKQGNFKNLREFVFKNIDGYFKIYSKHTPINLVRDLPQGFSALEPLVDLPIGINITRFQTLLALHRSYLTPGDSSSGWTAGAAAYYVGYLQPRTFLLKYNENGTITDAVDCALDPLSETKCTLKSFTVEKGIYQTSNFRVQPTESIVRFPNITNLCPFGEVFNATRFASVYAWNRKRISNCVADYSVLYNSASFSTFKCYGVSPTKLNDLCFTNVYADSFVIRGDEVRQIAPGQTGKIADYNYKLPDDFTGCVIAWNSNNLDSKVGGNYNYLYRLFRRSNLKPFERDISTEIYQAGSTPCNGVEGFNCYFPLQSYGFQPTNGVGYQPYRVVVLSFELLPAPATVCGPKKSTNLVKNKCVNFNFNGLTGTGVLTESNKKFLPFQQFGRDIADTTDAVRDPQTLEILDITPCSFGGVSVITPGTNTSNQVAVLYQGVNCTEVPVAIHADQLTPTWRVYSTGSNVFQTRAGCLIGAEHVNNSYECDIPIGAGICASYQTQTNSPRRARSVASQSIIAYTMSLGAENSVAYSNNSIAIPTNFTISVTTEILPVSMTKTSVDCTMYICGDSTECSNLLLQYGSFCTQLNRALTGIAVEQDKNTQEVFAQVKQIYKTPPIKDFGGFNFSQILPDPSKPSKRSFIEDLLFNKVTLADAGFIKQYGDCLGDIAARDLICAQKFNGLTVLPPLLTDEMIAQYTSALLAGTITSGWTFGAGAALQIPFAMQMAYRFNGCGVTQNVLYENQKLIANQFNSAIGKIQDSLSSAAPALGKLQDVVNQNAQALNTLVKQLSSNFGAISSVLNDILSRLDKVEAEVQIDRLITGRLQSLQTYVTQQLIRAAEIRASANLAATKMSECVLGQSKRVDFCGKGCHLMSFPQSAPHGVVFLHVTYVPAQEKNFTTAPAICHDGKAHFPREGVFVSNGTHWFVTQRNFYEPQIITTDNTFVSGNCDVVIGIVNNTVYDPLQPELDSFKEELDKYFKNHTSPDVDLGDISGINASVVNIQKEIDRLNEVAKNLNESLIDLQELGKYEQYIKGGSGYIPEAPRDGQAYVRKDGEWVLLSTFL

SEQ ID NO: 6260 - protein, 1241 aa, Artificial Sequence
  SARS-CoV-2/USA/WA8-UW5/2020__EPI_ISL_413486 spike protein (1-1211)(I909C_Y1047C) Foldon construct
MFVFLVLLPLVSSQCVNLTTRTQLPPAYTNSFTRGVYYPDKVFRSSVLHSTQDLFLPFFSNVTWFHAIHVSGTNGTKRFDNPVLPFNDGVYFASTEKSNIIRGWIFGTTLDSKTQSLLIVNNATNVVIKVCEFQFCNDPFLGVYYHKNNKSWMESEFRVYSSANNCTFEYVSQPFLMDLEGKQGNFKNLREFVFKNIDGYFKIYSKHTPINLVRDLPQGFSALEPLVDLPIGINITRFQTLLALHRSYLTPGDSSSGWTAGAAAYYVGYLQPRTFLLKYNENGTITDAVDCALDPLSETKCTLKSFTVEKGIYQTSNFRVQPTESIVRFPNITNLCPFGEVFNATRFASVYAWNRKRISNCVADYSVLYNSASFSTFKCYGVSPTKLNDLCFTNVYADSFVIRGDEVRQIAPGQTGKIADYNYKLPDDFTGCVIAWNSNNLDSKVGGNYNYLYRLFRKSNLKPFERDISTEIYQAGSTPCNGVEGFNCYFPLQSYGFQPTNGVGYQPYRVVVLSFELLHAPATVCGPKKSTNLVKNKCVNFNFNGLTGTGVLTESNKKFLPFQQFGRDIADTTDAVRDPQTLEILDITPCSFGGVSVITPGTNTSNQVAVLYQDVNCTEVPVAIHADQLTPTWRVYSTGSNVFQTRAGCLIGAEYVNNSYECDIPIGAGICASYQTQTNSPRRARSVASQSIIAYTMSLGAENSVAYSNNSIAIPTNFTISVTTEILPVSMTKTSVDCTMYICGDSTECSNLLLQYGSFCTQLNRALTGIAVEQDKNTQEVFAQVKQIYKTPPIKDFGGFNFSQILPDPSKPSKRSFIEDLLFNKVTLADAGFIKQYGDCLGDIAARDLICAQKFNGLTVLPPLLTDEMIAQYTSALLAGTITSGWTFGAGAALQIPFAMQMAYRFNGCGVTQNVLYENQKLIANQFNSAIGKIQDSLSSTASALGKLQDVVNQNAQALNTLVKQLSSNFGAISSVLNDILSRLDKVEAEVQIDRLITGRLQSLQTYVTQQLIRAAEIRASANLAATKMSECVLGQSKRVDFCGKGCHLMSFPQSAPHGVVFLHVTYVPAQEKNFTTAPAICHDGKAHFPREGVFVSNGTHWFVTQRNFYEPQIITTDNTFVSGNCDVVIGIVNNTVYDPLQPELDSFKEELDKYFKNHTSPDVDLGDISGINASVVNIQKEIDRLNEVAKNLNESLIDLQELGKYEQYIKGGSGYIPEAPRDGQAYVRKDGEWVLLSTFL

SEQ ID NO: 6261 - protein, 1241 aa, Artificial Sequence
  SARS-CoV-2/England/20102000506/2020__EPI_ISL_415147 spike protein (1-1211)(I909C_Y1047C) Foldon construct
MFVFLVLLPLVSSQCVNLTTRTQLPPAYTNSFTRGVYYPDKVFRSSVLHSTQDLFLPFFSNVTWFHAIHVSGTNGTKRFDNPVLPFNDGVYFASTEKSNIIRGWIFGTTLDSKTQSLLIVNNATNVVIKVCEFQFCNDPFLGVYYHKNNKSWMESEFRVYSSANNCTFEYVSQPFLMDLEGKQGNFKNLREFVFKNIDGYFKIYSKHTPINLVRDLPQGFSALEPLVDLPIGINITRFQTLLALHRSYLTPGDSSSGWTAGAAAYYVGYLQPRTFLLKYNENGTITDAVDCALDPLSETKCTLKSFTVEKGIYQTSNFRVQPTESIVRFPNITNLCPFGEVFNATRFASVYAWNRKRISNCVADYSVLYNSASFSTFKCYGVSPTKLNDLCFTNVYADSFVIRGDEVRQIAPGQTGKIADYNYKLPDDFTGCVIAWNSNNLDSKVGGNYNYLYRLFRKSNLKPFERDISTEIYQAGSTPCNGVEGFNCYFPLQSYGFQPTNGVGYQPYRVVVLSFELLHAPATVCGPKKSTNLVKNKCVNFNFNGLTGTGVLTESNKKFLPFQQFGRDIADTTDAVRDPQTLEILDITPCSFGGVSVITPGTNTSNQVAVLYQGVNCTEVPVAIHADQLTPTWRVYSTGSNVFQTRAGCLIGAEHVNNSYECDIPIGAGICASYQTQTNSPRRARSVASQSIIAYTMSLGAENSVAYSNNSIAIPTNFTISVTTEILPVSMTKTSVDCTMYICGDSTECSNLLLQYGSFCTQLNRALTGIAVEQDKNTQEVFAQVKQIYKTPPIKDFGGFNFSQILPDPSKPSKRSFIEDLLFNKVTLADAGFIKQYGYCLGDIAARDLICAQKFNGLTVLPPLLTDEMIAQYTSALLAGTITSGWTFGAGAALQIPFAMQMAYRFNGCGVTQNVLYENQKLIANQFNSAIGKIQDSLSSTASALGKLQDVVNQNAQALNTLVKQLSSNFGAISSVLNDILSRLDKVEAEVQIDRLITGRLQSLQTYVTQQLIRAAEIRASANLAATKMSECVLGQSKRVDFCGKGCHLMSFPQSAPHGVVFLHVTYVPAQEKNFTTAPAICHDGKAHFPREGVFVSNGTHWFVTQRNFYEPQIITTDNTFVSGNCDVVIGIVNNTVYDPLQPELDSFKEELDKYFKNHTSPDVDLGDISGINASVVNIQKEIDRLNEVAKNLNESLIDLQELGKYEQYIKGGSGYIPEAPRDGQAYVRKDGEWVLLSTFL

SEQ ID NO: 6262 - protein, 1241 aa, Artificial Sequence
  SARS-CoV-2/Belgium/VAG-03013/2020__EPI_ISL_415155 spike protein (1-1211)(I909C_Y1047C) Foldon construct
MFVFLVLLPLVSSQCVNLTTRTQLPPAYTNSFTRGVYYPDKVFRSSVLHSTQDLFLPFFSNVTWFHAIHVSGTNGTKRFDNPVLPFNDGVYFASTEKSNIIRGWIFGTTLDSKTQSLLIVNNATNVVIKVCEFQFCNDPFLGVYYHKNNKSWMESEFRVYSSANNCTFEYVSQPFLMDLEGKQGNFKNLREFVFKNIDGYFKIYSKHTPINLVRDLPQGFSALEPLVDLPIGINITRFQTLLALHRSYLTPGDSSSGWTAGAAAYYVGYLQPRTFLLKYNENGTITDAVDCALDPLSETKCTLKSFTVEKGIYQTSNFRVQPTESIVRFPNITNLCPFGEVFNATRFASVYAWNRKRISNCVADYSVLYNSASFSTFKCYGVSPTKLNDLCFTNVYADSFVIRGDEVRQIAPGQTGKIADYNYKLPDDFTGCVIAWNSNNLDSKVGGNYNYLYRLFRKSNLKPFERDISTEIYQAGSTPCNGVEGFNCYFPLQSYGFQPTNGVGYQPYRVVVLSFELLHAPATVCGPKKSTNLVKNKCVNFNFNGLTGTGVLTESNKKFLPFQQFGRDIADTTDAVRDPQTLEILDITPCSFGGVSVITPGTNTSNQVAVLYQGVNCTEVPVAIHADQLTPTWRVYSTGSNVFQTRAGCLIGAEHVNNSYECDIPIGAGICASYQTQTNSPRRARSVASQSIIAYTMSLGAENSVAYSNNSIAIPTNFTISVTTEILPVSMTKTSVDCTMYICGDSTECSNLLLQYGSFCTQLNRALTGIAVEQDKNTQEVFAQVKQIYKTPPIKDFGGFNFSQILPDPSKPSKRSFIEDLLFNKVTLADAGFIKQYGDCLGDIAARDLICAQKFNGLTVLPPLLTDEMIAQYTSALLAGTITSGWTFGAGAALQIPFAMQMAYRFNGCGVTQNVLYENQKLIANQFNSAIGKIQDSLSSTATALGKLQDVVNQNAQALNTLVKQLSSNFGAISSVLNDILSRLDKVEAEVQIDRLITGRLQSLQTYVTQQLIRAAEIRASANLAATKMSECVLGQSKRVDFCGKGCHLMSFPQSAPHGVVFLHVTYVPAQEKNFTTAPAICHDGKAHFPREGVFVSNGTHWFVTQRNFYEPQIITTDNTFVSGNCDVVIGIVNNTVYDPLQPELDSFKEELDKYFKNHTSPDVDLGDISGINASVVNIQKEIDRLNEVAKNLNESLIDLQELGKYEQYIKGGSGYIPEAPRDGQAYVRKDGEWVLLSTFL

SEQ ID NO: 6263 - protein, 1241 aa, Artificial Sequence
  SARS-CoV-2/Belgium/BC-03016/2020__EPI_ISL_415157 spike protein (1-1211)(I909C_Y1047C) Foldon construct
MFVFLVLLPLVSSQCVNLTTRTQLPPAYTNSFTRGVYYPDKVFRSSVLHSTQDLFLPFFSNVTWFHAIHVSGTNGTKRFDNPVLPFNDGVYFASTEKSNIIRGWIFGTTLDSKTQSLLIVNNATNVVIKVCEFQFCNDPFLGVYYHKNNKSWMESEFRVYSSANNCTFEYVSQPFLMDLEGKQGNFKNLREFVFKNIDGYFKIYSKHTPINLVRDLPQGFSALEPLVDLPIGINITRFQTLLALHRSYLTPGDSSSGWTAGAAAYYVGYLQPRTFLLKYNENGTITDAVDCALDPLSETKCTLKSFTVEKGIYQTSNFRVQPTESIVRFPNITNLCPFGEVFNATRFASVYAWNRKRISNCVADYSVLYNSASFSTFKCYGVSPTKLNDLCFTNVYADSFVIRGDEVRQIAPGQTGKIADYNYKLPDDFTGCVIAWNSNNLDSKVGGNYNYLYRLFRKSNLKPFERDISTEIYQAGSTPCNGVEGFNCYFPLQSYGFQPTNGVGYQPYRVVVLSFELLHAPATVCGPKKSTNLVKNKCVNFNFNGLTGTGVLTESNKKFLPFQQFGRDIADTTDAVRDPQTLEILDITPCSFGGVSVITPGTNTSNQVAVLYQGVNCTEVPVAIHADQLTPTWRVYSTGSNVFQTRAGCLIGAEHVNNSYECDIPIGAGICASYQTQTNSPRRARSVASQSIIAYTMSLGAENSVAYSNNSIAIPTNFTISVTTEILPVSMTKTSVDCTMYICGDSTECSNLLLQYGSFCTQLNRALTGIAVEQDKNTQEVFAQVKQIYKTPPIKDFGGFNFSQILPDPSKPSKRSFIEDLLFNKVTLADAGFIKQYGDCLGDIAARDLICAQKFNGLTVLPPLLTDEMIAQYTSALLAGTITSGWTFGAGAALQIPFAMQMAYRFNGCGVTQNVLYENQKLIANQFNSAIGKIQDSLSSTAPALGKLQDVVNQNAQALNTLVKQLSSNFGAISSVLNDILSRLDKVEAEVQIDRLITGRLQSLQTYVTQQLIRAAEIRASANLAATKMSECVLGQSKRVDFCGKGCHLMSFPQSAPHGVVFLHVTYVPAQEKNFTTAPAICHDGKAHFPREGVFVSNGTHWFVTQRNFYEPQIITTDNTFVSGNCDVVIGIVNNTVYDPLQPELDSFKEELDKYFKNHTSPDVDLGDISGINASVVNIQKEIDRLNEVAKNLNESLIDLQELGKYEQYIKGGSGYIPEAPRDGQAYVRKDGEWVLLSTFL

SEQ ID NO: 6264 - protein, 1241 aa, Artificial Sequence
  SARS-CoV-2/Germany/BavPat3/2020__EPI_ISL_414521 spike protein (1-1211)(I909C_Y1047C) Foldon construct
MFVFLVLLPLVSSQCVNLTTRTQLPPAYTNSFTRGVYYPDKVFRSSVLHSTQDLFLPFFSNVTWFHAIHVSGTNGTKRFDNPVLPFNDGVYFASTEKSNIIRGWIFGTTLDSKTQSLLIVNNATNVVIKVCEFQFCNDPFLGVYYHKNNKSWMESEFRVYSSANNCTFEYVSQPFLMDLEGKQGNFKNLREFVFKNIDGYFKIYSKHTPINLVRDLPQGFSALEPLVDLPIGINITRFQTLLALHRSYLTPGDSSSGWTAGAAAYYVGYLQPRTFLLKYNENGTITDAVDCALDPLSETKCTLKSFTVEKGIYQTSNFRVQPTESIVRFPNITNLCPFGEVFNATRFASVYAWNRKRISNCVADYSVLYNSASFSTFKCYGVSPTKLNDLCFTNVYADSFVIRGDEVRQIAPGQTGKIADYNYKLPDDFTGCVIAWNSNNLDSKVGGNYNYLYRLFRKSNLKPFERDISTEIYQAGSTPCNGVEGFNCYFPLQSYGFQPTNGVGYQPYRVVVLSFELLHAPATVCGPKKSTNLVKNKCVNFNFNGLTGTGVLTESNKKFLPFQQFGRDIADTTDAVRDPQTLEILDITPCSFGGVSVITPGTNTSNQVAVLYQDVNCTEVPVAIHADQLTPTWRVYSTGSNVFQTRAGCLIGAEHVNNSYECDIPIGAGICASYQTQTNSPRRARSVASQSIIAYTMSLGAENSVAYSNNSIAIPTNFTISVTTEILPVSMTKTSVDCTMYICGDSTECSNLLLQYGSFCTQLNRALTGIAVEQDKNTQQVFAQVKQIYKTPPIKDFGGFNFSQILPDPSKPSKRSFIEDLLFNKVTLADAGFIKQYGDCLGDIAARDLICAQKFNGLTVLPPLLTDEMIAQYTSALLAGTITSGWTFGAGAALQIPFAMQMAYRFNGCGVTQNVLYENQKLIANQFNSAIGKIQDSLSSTASALGKLQDVVNQNAQALNTLVKQLSSNFGAISSVLNDILSRLDKVEAEVQIDRLITGRLQSLQTYVTQQLIRAAEIRASANLAATKMSECVLGQSKRVDFCGKGCHLMSFPQSAPHGVVFLHVTYVPAQEKNFTTAPAICHDGKAHFPREGVFVSNGTHWFVTQRNFYEPQIITTDNTFVSGNCDVVIGIVNNTVYDPLQPELDSFKEELDKYFKNHTSPDVDLGDISGINASVVNIQKEIDRLNEVAKNLNESLIDLQELGKYEQYIKGGSGYIPEAPRDGQAYVRKDGEWVLLSTFL

SEQ ID NO: 6265 - protein, 1241 aa, Artificial Sequence
  SARS-CoV-2/France/HF1805/2020__EPI_ISL_414628 spike protein (1-1211)(I909C_Y1047C) Foldon construct
MFVFLVLLPLVSSQCVNLTTRTQLPPAYTNSFTRGVYYPDKVFRSSVLHSTQDLFLPFFSNVTWFHAIHVSGTNGTKRFDNPVLPFNDGVYFASTEKSNIIRGWIFGTTLDSKTQSLLIVNNATNVVIKVCEFQFCNDPFLGVYYHKNNKSWMESEFRVYSSANNCTFEYVSQPFLMDLEGKQGNFKNLREFVFKNIDGYFKIYSKHTPINLVRDLPQGFSALEPLVDLPIGINITRFQTLLALHRSYLTPGDSSSGWTAGAAAYYVGYLQPRTFLLKYNENGTITDAVDCALDPLSETKCTLKSFTVEKGIYQTSNFRVQPTESIVRFPNITNLCPFGEVFNATRFASVYAWNRKRISNCVADYSVLYNSASFSTFKCYGVSPTKLNDLCFTNVYADSFVIRGDEVRQIAPGQTGKIADYNYKLPDDFTGCVIAWNSNNLDSKVGGNYNYLYRLFRKSNLKPFERDISTEIYQAGSTPCNGVEGFNCYFPLQSYGFQPTNGVGYQPYRVVVLSFELLHAPATVCGPKKSTNLVKNKCVNFNFNGLTGTGVLTESNKKFLPFQQFGRDIADTTDAVRDPQTLEILDITPCSFGGVSVITPGTNTSNQVAVLYQGVNCTEVPVAIHADQLTPTWRVYSTGSNVFQTRAGCLIGAEHVNNSYECDIPIGAGICASYQTQTNSPRRARSVASQSIIAYTMSLGAENSVAYSNNSIAIPTNFTISVTTEILPVSMTKTSVDCTMYICGDSTECSNLLLQYGSFCTQLNRALTGIAVEQDKNTQEVFAQVKQIYKTPPIKDFGGFNFSQILPDPSKPSKRSFIEDLLFNKVTLADAGFIKQYGDCLGDIAARDLICAQKFNGLTVLPPLLTDEMIAQYTSALLAGTITSGWTFGAGAALQIPFAMQMAYRFNGCGVTQNVLYENQKLIANQFNSAIGKIQDSLSSTASALGKLQDVVNQNAQALNTLVKQLSSNFGAISSVLNDILSRLDKVEAEVQIDRLITGRLQSLQTYVTQQLIRAAEIRASANLAATKMSECVLGQSKRVDFCGKGCHLMSFPQSAPHGVVFLHVTYVPAQEKNFTTAPAICHDGKAHFPREGVFVSNGTHWFVTQRNFYEPQIITTDNTFVSGNCDVVIGVVNNTVYDPLQPELDSFKEELDKYFKNHTSPDVDLGDISGINASVVNIQKEIDRLNEVAKNLNESLIDLQELGKYEQYIKGGSGYIPEAPRDGQAYVRKDGEWVLLSTFL

SEQ ID NO: 6266 - protein, 1241 aa, Artificial Sequence
  SARS-CoV-2/Netherlands/ZuidHolland_9/2020__EPI_ISL_414445 spike protein (1-1211)(I909C_Y1047C) Foldon construct
MFVFLVLLPLVSSQCVNLTTRTQLPPAYTNSFTRGVYYPDKVFRSSVLHSTQDLFLPFFSNVTWFHAIHVSGTNGTKRFDNPVLPFNDGVYFASTEKSNIIRGWIFGTTLDSKTQSLLIVNNATNVVIKVCEFQFCNDPFLGVYYHKNNKSWMESEFRVYSSANNCTFEYVSQPFLMDLEGKQGNFKNLREFVFKNIDGYFKIYSKHTPINLVRDLPQGFSALEPLVDLPIGINITRFQTLLALHRSYLTPGDSSSGWTAGAAAYYVGYLQPRTFLLKYNENGTITDAVDCALDPLSETKCTLKSFTVEKGIYQTSNFRVQPTESIVRFPNITNLCPFGEVFNATRFASVYAWNRKRISNCVADYSVLYNSASFSTFKCYGVSPTKLNDLCFTNVYADSFVIRGDEVRQIAPGQTGKIADYNYKLPDDFTGCVIAWNSNNLDSKVGGNYNYLYRLFRKSNLKPFERDISTEIYQAGSTPCNGVEGFNCYFPLQSYGFQPTNGVGYQPYRVVVLSFELLHAPATVCGPKKSTNLVKNKCVNFNFNGLTGTGVLTESNKKFLPFQQFGRDIADTTDAVRDPQTLEILDITPCSFGGVSVITPGTNTSNQVAVLYQGVNCTEVPVAIHADQLTPTWRVYSTGSNVFQTRAGCLIGAEHVNNSYECDIPIGAGICASYQTQTNSPRRARSVASQSIIAYTMSLGAENSVAYSNNSIAIPTNFTISVTTEILPVSMTKTSVDCTMYICGDSTECSNLLLQYGSFCTQLNRALTGIAVEQDKNTQEVFAQVKQIYKTPPIKDFGGFNFSQILPDPSKPSKRSFIEDLLFNKVTLADAGFIKQYGDCLGDIAARDLICVQKFNGLTVLPPLLTDEMIAQYTSALLAGTITSGWTFGAGAALQIPFAMQMAYRFNGCGVTQNVLYENQKLIANQFNSAIGKIQDSLSSTASALGKLQDVVNQNAQALNTLVKQLSSNFGAISSVLNDILSRLDKVEAEVQIDRLITGRLQSLQTYVTQQLIRAAEIRASANLAATKMSECVLGQSKRVDFCGKGCHLMSFPQSAPHGVVFLHVTYVPAQEKNFTTAPAICHDGKAHFPREGVFVSNGTHWFVTQRNFYEPQIITTDNTFVSGNCDVVIGIVNNTVYDPLQPELDSFKEELDKYFKNHTSPDVDLGDISGINASVVNIQKEIDRLNEVAKNLNESLIDLQELGKYEQYIKGGSGYIPEAPRDGQAYVRKDGEWVLLSTFL

SEQ ID NO: 6267 - protein, 1241 aa, Artificial Sequence
  SARS-CoV-2/Finland/FIN03032020A/2020__EPI_ISL_413602 spike protein (1-1211)(I909C_Y1047C) Foldon construct
MFVFLVLLPLVSSQCVNLTTRTQLPPAYTNSFTRGVYYPDKVFRSSVLHSTQDLFLPFFSNVTWFHAIHVSGTNGTKRFDNPVLPFNDGVYFASTEKSNIIRGWIFGTTLDSKTQSLLIVNNATNVVIKVCEFQFCNDPFLGVYYHKNNKSWMESEFRVYSSANNCTFEYVSQPFLMDLEGKQGNFKNLREFVFKNIDGYFKIYSKHTPINLVRDLPQGFSALEPLVDLPIGINITRFQTLLALHRSYLTPGDSSSGWTAGAAAYYVGYLQPRTFLLKYNENGTITDAVDCALDPLSETKCTLKSFTVEKGIYQTSNFRVQPTESIVRFPNITNLCPFGEVFNATRFASVYAWNRKRISNCVADYSVLYNSASFSTFKCYGVSPTKLNDLCFTNVYADSFVIRGDEVRQIAPGQTGKIADYNYKLPDDFTGCVISWNSNNLDSKVGGNYNYLYRLFRKSNLKPFERDISTEIYQAGSTPCNGVEGFNCYFPLQSYGFQPTNGVGYQPYRVVVLSFELLHAPATVCGPKKSTNLVKNKCVNFNFNGLTGTGVLTESNKKFLPFQQFGRDIADTTDAVRDPQTLEILDITPCSFGGVSVITPGTNTSNQVAVLYQGVNCTEVPVAIHADQLTPTWRVYSTGSNVFQTRAGCLIGAEHVNNSYECDIPIGAGICASYQTQTNSPRRARSVASQSIIAYTMSLGAENSVAYSNNSIAIPTNFTISVTTEILPVSMTKTSVDCTMYICGDSTECSNLLLQYGSFCTQLNRALTGIAVEQDKNTQEVFAQVKQIYKTPPIKDFGGFNFSQILPDPSKPSKRSFIEDLLFNKVTLADAGFIKQYGDCLGDIAARDLICAQKFNGLTVLPPLLTDEMIAQYTSALLAGTITSGWTFGAGAALQIPFAMQMAYRFNGCGVTQNVLYENQKLIANQFNSAIGKIQDSLSSTASALGKLQDVVNQNAQALNTLVKQLSSNFGAISSVLNDILSRLDKVEAEVQIDRLITGRLQSLQTYVTQQLIRAAEIRASANLAATKMSECVLGQSKRVDFCGKGCHLMSFPQSAPHGVVFLHVTYVPAQEKNFTTAPAICHDGKAHFPREGVFVSNGTHWFVTQRNFYEPQIITTDNTFVSGNCDVVIGIVNNTVYDPLQPELDSFKEELDKYFKNHTSPDVDLGDISGINASVVNIQKEIDRLNEVAKNLNESLIDLQELGKYEQYIKGGSGYIPEAPRDGQAYVRKDGEWVLLSTFL

SEQ ID NO: 6268 - protein, 1241 aa, Artificial Sequence
  SARS-CoV-2/France/GE1977/2020__EPI_ISL_414632 spike protein (1-1211)(I909C_Y1047C) Foldon construct
MFVFLVLLPLVSSQCVNLTTRTQLPPAYTNSFTRGVYYPDKVFRSSVLHSTQDLFLPFFSNVTWFHAIHVSGTNGTKRFDNPVLPFNDGVYFASTEKSNIIRGWIFGTTLDSKTQSLLIVNNATNVVIKVCEFQFCNDPFLGVYYHKNNKSWMESEFRVYSSANNCTFEYVSQPFLMDLEGKQGNFKNLREFVFKNIDGYFKIYSKHTPINLVRDLPQGFSALEPLVDLPIGINITRFQTLLALHRSYLTPGDSSSGWTAGAAAYYVGYLQPRTFLLKYNENGTITDAVDCALDPLSETKCTLKSFTVEKGIYQTSNFRVQPTESIVRFPNITNLCPFGEVFNATRFASVYAWNRKRISNCVADYSVLYNSASFSTFKCYGVSPTKLNDLCFTNVYADSFVIRGDEVRQIAPGQTGKIADYNYKLPDDFTGCVIAWNSNNLDSKVGGNYNYLYRLFRKSNLKPFERDISTEIYQAGSTPCNGVEGFNCYFPLQSYGFQPTNGVGYQPYRVVVLSFELLHAPATVCGPKKSTNLVKNKCVNFNFNGLTGTGVLTESNKKFLPFQQFGRDIADTTDAVRDPQTLEILDITPCSFGGVSVITPGTNTSNQVAVLYQGVNCTEVPVAIHADQLTPTWRVYSTGSNVFQTRAGCLIGAEHVNNSYECDIPIGAGICASYQTQTNSPRRARSVASQSIIAYTMSLGAENSVAYSNNSIAIPTNFTISVTTEILPVSMTKTSVDCTMYICGDSTECSNLLLQYGSFCTQLNRALTGIAVEQDKNTQEVFAQVKQIYKTPPIKDFGGFNFSQILPDPSKPSKRSFIEDLLFNKVTLADAGFIKQYGDCLGDIAARDLICAQKFNGLTVLPPLLTDEMIAQYTSALLAGTITSGWTFGAGAALQIPFAMQMAYRFNGCGVTQNVLYENQKLIANQFNSAIGKIQDSLFSTASALGKLQDVVNQNAQALNTLVKQLSSNFGAISSVLNDILSRLDKVEAEVQIDRLITGRLQSLQTYVTQQLIRAAEIRASANLAATKMSECVLGQSKRVDFCGKGCHLMSFPQSAPHGVVFLHVTYVPAQEKNFTTAPAICHDGKAHFPREGVFVSNGTHWFVTQRNFYEPQIITTDNTFVSGNCDVVIGIVNNTVYDPLQPELDSFKEELDKYFKNHTSPDVDLGDISGINASVVNIQKEIDRLNEVAKNLNESLIDLQELGKYEQYIKGGSGYIPEAPRDGQAYVRKDGEWVLLSTFL

SEQ ID NO: 6269 - protein, 1241 aa, Artificial Sequence
  SARS-CoV-2/Finland/FIN-313/2020__EPI_ISL_414641 spike protein (1-1211)(I909C_Y1047C) Foldon construct
MFVFLVLLPLVSSQCVNLTTRTQLPPAYTNSFTRGVYYPDKVFRSSVLHSTQDLFLPFFSNVTWFHAIHVSGTNGTKRFDNPVLPFNDGVYFASTEKSNIIRGWIFGTTLDSKTQSLLIVNNATNVVIKVCEFQFCNDPFLGVYYHKNNKSWMESEFRVYSSANNCTFEYVSQPFLMDLEGKQGNFKNLREFVFKNIDGYFKIYSKHTPINLVRDLPQGFSALEPLVDLPIGINITRFKTLLALHRSYLTPGDSSSGWTAGAAAYYVGYLQPRTFLLKYNENGTITDAVDCALDPLSETKCTLKSFTVEKGIYQTSNFRVQPTESIVRFPNITNLCPFGEVFNATRFASVYAWNRKRISNCVADYSVLYNSASFSTFKCYGVSPTKLNDLCFTNVYADSFVIRGDEVRQIAPGQTGKIADYNYKLPDDFTGCVIAWNSNNLDSKVGGNYNYLYRLFRKSNLKPFERDISTEIYQAGSTPCNGVEGFNCYFPLQSYGFQPTNGVGYQPYRVVVLSFELLHAPATVCGPKKSTNLVKNKCVNFNFNGLTGTGVLTESNKKFLPFQQFGRDIADTTDAVRDPQTLEILDITPCSFGGVSVITPGTNTSNQVAVLYQGVNCTEVPVAIHADQLTPTWRVYSTGSNVFQTRAGCLIGAEHVNNSYECDIPIGAGICASYQTQTNSPRRARSVASQSIIAYTMSLGAENSVAYSNNSIAIPTNFTISVTTEILPVSMTKTSVDCTMYICGDSTECSNLLLQYGSFCTQLNRALTGIAVEQDKNTQEVFAQVKQIYKTPPIKDFGGFNFSQILPDPSKPSKRSFIEDLLFNKVTLADAGFIKQYGDCLGDIAARDLICAQKFNGLTVLPPLLTDEMIAQYTSALLAGTITSGWTFGAGAALQIPFAMQMAYRFNGCGVTQNVLYENQKLIANQFNSAIGKIQDSLSSTASALGKLQDVVNQNAQALNTLVKQLSSNFGAISSVLNDILSRLDKVEAEVQIDRLITGRLQSLQTYVTQQLIRAAEIRASANLAATKMSECVLGQSKRVDFCGKGCHLMSFPQSAPHGVVFLHVTYVPAQEKNFTTAPAICHDGKAHFPREGVFVSNGTHWFVTQRNFYEPQIITTDNTFVSGNCDVVIGIVNNTVYDPLQPELDSFKEELDKYFKNHTSPDVDLGDISGINASVVNIQKEIDRLNEVAKNLNESLIDLQELGKYEQYIKGGSGYIPEAPRDGQAYVRKDGEWVLLSTFL

SEQ ID NO: 6270 - protein, 1241 aa, Artificial Sequence
  SARS-CoV-2/Netherlands/ZuidHolland_2/2020__EPI_ISL_414556 spike protein (1-1211)(I909C_Y1047C) Foldon construct
MFVFLVLLPLVSSQCVNLTTRTQLPPAYTNSFTRGVYYPDKVFRSSVLHSTQDLFLPFFSNVTWFHAIHVSGTNGTKRFDNPVLPFNDGVYFASTEKSNIIRGWIFGTTLDSKTQSLLIVNNATNVVIKVCEFQFCNDPFLGVYYHKNNKSWMESEFRVYSSANNCTFEYVSQPFLMDLEGKQGNFKNLREFVFKNIDGYFKIYSKHTPINLVRDLPQGFSALEPLVDLPIGINITRFQTLLALHRSYLTPGDSSSGWTAGAAAYYVGYLQPRTFLLKYNENGTITDAVDCALDPLSETKCTLKSFTVEKGIYQTSNFRVQPTESIVRFPNITNLCPFGEVFNATRFASVYAWNRKRISNCVADYSVLYNSASFSTFKCYGVSPTKLNDLCFTNVYADSFVIRGDEVRQIAPGQTGKIADYNYKLPDDFTGCVIAWNSNNLDSKVGGNYNYLYRLFRKSNLKPFERDISTEIYQAGSTPCNGVEGFNCYFPLQSYGFQPTNGVGYQPYRVVVLSFELLHAPATVCGPKKSTNLVKNKCVNFNFNGLTGTGVLTESNKKFLPFQQFGRDIADTTDAVRDPQTLEILDITPCSFGGVSVITPGTNTSNQVAVLYQGVNCTEVPVAIHADQLTPTWRVYSTGSNVFQTRAGCLIGAEHVNNSYECDIPIGAGICASYQTQTNSPRRARSVASQSIIAYTMSLGAENSVAYSNNSIAIPTNFTISVTTEILPVSMTKTSVDCTMYICGDSTECSNLLLQYGSFCTQLNRALTGIALEQDKNTQEVFAQVKQIYKTPPIKDFGGFNFSQILPDPSKPSKRSFIEDLLFNKVTLADAGFIKQYGDCLGDIAARDLICAQKFNGLTVLPPLLTDEMIAQYTSALLAGTITSGWTFGAGAALQIPFAMQMAYRFNGCGVTQNVLYENQKLIANQFNSAIGKIQDSLSSTASALGKLQDVVNQNAQALNTLVKQLSSNFGAISSVLNDILSRLDKVEAEVQIDRLITGRLQSLQTYVTQQLIRAAEIRASANLAATKMSECVLGQSKRVDFCGKGCHLMSFPQSAPHGVVFLHVTYVPAQEKNFTTAPAICHDGKAHFPREGVFVSNGTHWFVTQRNFYEPQIITTDNTFVSGNCDVVIGIVNNTVYDPLQPELDSFKEELDKYFKNHTSPDVDLGDISGINASVVNIQKEIDRLNEVAKNLNESLIDLQELGKYEQYIKGGSGYIPEAPRDGQAYVRKDGEWVLLSTFL

SEQ ID NO: 6271 - protein, 1241 aa, Artificial Sequence
  SARS-CoV-2/USA/WA-UW31/2020__EPI_ISL_414618 spike protein (1-1211)(I909C_Y1047C) Foldon construct
MFVFLVLLPLVSSQCVNLTTRTQLPPAYTNSFTRGVYYPDKVFRSSVLHSTQDLFLPFFSNVTWFHAIHVSGTNGTKRFDNPVLPFNDGVYFASTEKSNIIRGWIFGTTLDSKTQSLLIVNNATNVVIKVCEFQFCNDPFLGVYYHKNNKSWMESEFRVYSSANNCTFEYVSQPFLMDLEGKQGNFKNLREFVFKNIDGYFKIYSKHTPINLVRDLPQGFSALEPLVDLPIGINITRFQTLLALHRSYLTPGDSSSGWTAGAAAYYVGYLQPRTFLLKYNENGTITDAVDCALDPLSETKCTLKSFTVEKGIYQTSNFRVQPTESIVRFPNITNLCPFGEVFNATRFASVYAWNRKRISNCVADYSVLYNSASFSTFKCYGVSPTKLNDLCFTNVYADSFVIRGDEVRQIAPGQTGKIADYNYKLPDDFTGCVIAWNSNNLDSKVGGNYNYLYRLFRKSNLKPFERDISTEIYQAGSTPCNGAEGFNCYFPLQSYGFQPTNGVGYQPYRVVVLSFELLHAPATVCGPKKSTNLVKNKCVNFNFNGLTGTGVLTESNKKFLPFQQFGRDIADTTDAVRDPQTLEILDITPCSFGGVSVITPGTNTSNQVAVLYQDVNCTEVPVAIHADQLTPTWRVYSTGSNVFQTRAGCLIGAEHVNNSYECDIPIGAGICASYQTQTNSPRRARSVASQSIIAYTMSLGAENSVAYSNNSIAIPTNFTISVTTEILPVSMTKTSVDCTMYICGDSTECSNLLLQYGSFCTQLNRALTGIAVEQDKNTQEVFAQVKQIYKTPPIKDFGGFNFSQILPDPSKPSKRSFIEDLLFNKVTLADAGFIKQYGDCLGDIAARDLICAQKFNGLTVLPPLLTDEMIAQYTSALLAGTITSGWTFGAGAALQIPFAMQMAYRFNGCGVTQNVLYENQKLIANQFNSAIGKIQDSLSSTASALGKLQDVVNQNAQALNTLVKQLSSNFGAISSVLNDILSRLDKVEAEVQIDRLITGRLQSLQTYVTQQLIRAAEIRASANLAATKMSECVLGQSKRVDFCGKGCHLMSFPQSAPHGVVFLHVTYVPAQEKNFTTAPAICHDGKAHFPREGVFVSNGTHWFVTQRNFYEPQIITTDNTFVSGNCDVVIGIVNNTVYDPLQPELDSFKEELDKYFKNHTSPDVDLGDISGINASVVNIQKEIDRLNEVAKNLNESLIDLQELGKYEQYIKGGSGYIPEAPRDGQAYVRKDGEWVLLSTFL

SEQ ID NO: 6272 - protein, 1241 aa, Artificial Sequence
  SARS-CoV-2/South Korea/SNU01/2020__EPI_ISL_411929 spike protein (1-1211)(I909C_Y1047C) Foldon construct
MFVFLVLLPLVSSQCVNLTTRTQLPPAYTNSFTRGVYYPDKVFRSSVLHSTQDLFLPFFSNVTWFHAIHVSGTNGTKRFDNPVLPFNDGVYFASTEKSNIIRGWIFGTTLDSKTQSLLIVNNATNVVIKVCEFQFCNDPFLGVYYHKNNKSWMESEFRVYSSANNCTFEYVSQPFLMDLEGKQGNFKNLREFVFKNIDGYFKIYSKHTPINLVRDLPQGFWALEPLVDLPIGINITRFQTLLALHRSYLTPGDSSSGWTAGAAAYYVGYLQPRTFLLKYNENGTITDAVDCALDPLSETKCTLKSFTVEKGIYQTSNFRVQPTESIVRFPNITNLCPFGEVFNATRFASVYAWNRKRISNCVADYSVLYNSASFSTFKCYGVSPTKLNDLCFTNVYADSFVIRGDEVRQIAPGQTGKIADYNYKLPDDFTGCVIAWNSNNLDSKVGGNYNYLYRLFRKSNLKPFERDISTEIYQAGSTPCNGVEGFNCYFPLQSYGFQPTNGVGYQPYRVVVLSFELLHAPATVCGPKKSTNLVKNKCVNFNFNGLTGTGVLTESNKKFLPFQQFGRDIADTTDAVRDPQTLEILDITPCSFGGVSVITPGTNTSNQVAVLYQDVNCTEVPVAIHADQLTPTWRVYSTGSNVFQTRAGCLIGAEHVNNSYECDIPIGAGICASYQTQTNSPRRARSVASQSIIAYTMSLGAENSVAYSNNSIAIPTNFTISVTTEILPVSMTKTSVDCTMYICGDSTECSNLLLQYGSFCTQLNRALTGIAVEQDKNTQEVFAQVKQIYKTPPIKDFGGFNFSQILPDPSKPSKRSFIEDLLFNKVTLADAGFIKQYGDCLGDIAARDLICAQKFNGLTVLPPLLTDEMIAQYTSALLAGTITSGWTFGAGAALQIPFAMQMAYRFNGCGVTQNVLYENQKLIANQFNSAIGKIQDSLSSTASALGKLQDVVNQNAQALNTLVKQLSSNFGAISSVLNDILSRLDKVEAEVQIDRLITGRLQSLQTYVTQQLIRAAEIRASANLAATKMSECVLGQSKRVDFCGKGCHLMSFPQSAPHGVVFLHVTYVPAQEKNFTTAPAICHDGKAHFPREGVFVSNGTHWFVTQRNFYEPQIITTDNTFVSGNCDVVIGIVNNTVYDPLQPELDSFKEELDKYFKNHTSPDVDLGDISGINASVVNIQKEIDRLNEVAKNLNESLIDLQELGKYEQYIKGGSGYIPEAPRDGQAYVRKDGEWVLLSTFL

SEQ ID NO: 6273 - protein, 1241 aa, Artificial Sequence
  SARS-CoV-2/China/WF0004/2020__EPI_ISL_413694 spike protein (1-1211)(I909C_Y1047C) Foldon construct
MFVFLVLLPLVSSQCVNLTTRTQLPPAYTNSFTRGVYYPDKVFRSSVLHSTQDLFLPFFSNVTWFHAIHVSGTNGTKRFDNPVLPFNDGVYFASTEKSNIIRGWIFGTTLDSKTQSLLIVNNATNVVIKVCEFQFCNDPFLGVYYHKNNKSWTESEFRVYSSANNCTFEYVSQPFLMDLEGKQGNFKNLREFVFKNIDGYFKIYSKHTPINLVRDLPQGFSALEPLVDLPIGINITRFQTLLALHRSYLTPGDSSSGWTAGAAAYYVGYLQPRTFLLKYNENGTITDAVDCALDPLSETKCTLKSFTVEKGIYQTSNFRVQPTESIVRFPNITNLCPFGEVFNATRFASVYAWNRKRISNCVADYSVLYNSASFSTFKCYGVSPTKLNDLCFTNVYADSFVIRGDEVRQIAPGQTGKIADYNYKLPDDFTGCVIAWNSNNLDSKVGGNYNYLYRLFRKSNLKPFERDISTEIYQAGSTPCNGVEGFNCYFPLQSYGFQPTNGVGYQPYRVVVLSFELLHAPATVCGPKKSTNLVKNKCVNFNFNGLTGTGVLTESNKKFLPFQQFGRDIADTTDAVRDPQTLEILDITPCSFGGVSVITPGTNTSNQVAVLYQDVNCTEVPVAIHADQLTPTWRVYSTGSNVFQTRAGCLIGAEHVNNSYECDIPIGAGICASYQTQTNSPRRARSVASQSIIAYTMSLGAENSVAYSNNSIAIPTNFTISVTTEILPVSMTKTSVDCTMYICGDSTECSNLLLQYGSFCTQLNRALTGIAVEQDKNTQEVFAQVKQIYKTPPIKDFGGFNFSQILPDPSKPSKRSFIEDLLFNKVTLADAGFIKQYGDCLGDIAARDLICAQKFNGLTVLPPLLTDEMIAQYTSALLAGTITSGWTFGAGAALQIPFAMQMAYRFNGCGVTQNVLYENQKLIANQFNSAIGKIQDSLSSTASALGKLQDVVNQNAQALNTLVKQLSSNFGAISSVLNDILSRLDKVEAEVQIDRLITGRLQSLQTYVTQQLIRAAEIRASANLAATKMSECVLGQSKRFDFCGKGCHLMSFPQSAPHGVVFLHVTYVPAQEKNFTTAPAICHDGKAHFPREGVFVSNGTHWFVTQRNFYEPQIITTDNTFVSGNCDVVIGIVNNTVYDPLQPELDSFKEELDKYFKNHTSPDVDLGDISGINASVVNIQKEIDRLNEVAKNLNESLIDLQELGKYEQYIKGGSGYIPEAPRDGQAYVRKDGEWVLLSTFL

SEQ ID NO: 6274 - protein, 1241 aa, Artificial Sequence
  SARS-CoV-2/China/WF0028/2020__EPI_ISL_413791 spike protein (1-1211)(I909C_Y1047C) Foldon construct
MFVFLVLLPLVSSQCVNLTTRTQLPPAYTNSFTRGVYYPDKVFRSSVLHSTQDLFLPFFSNVTWFHAIHVSGTNGTKRFDNPVLPFNDGVYFASTEKSNIIRGWIFGTTLDSKTQSLLIVNNATNVVIKVCEFQFCNDPFLGVYYHKNNKSWMESEFRVYSSANNCTFEYVSQPFLMDLEGKQGNFKNLREFVFKNIDGYFKIYSKHTPINLVRDLPQGFSALEPLVDLPIGINITRFQTLLALHRSYLTPGDSSSGWTAGAAAYYVGYLQPRTFLLKYNENGTITDAVDCALDPLSETKCTLKSFTVEKGIYQTSNFRVQPTESIVRFPNITNLCPFGEVFNATRFASVYAWNRKRISNCVADYSVLYNSASFSTFKCYGVSPTKLNDLCFTNVYADSFVIRGDEVRQIAPGQTGKIADYNYKLPDDFTGCVIAWNSNNLDSKVGGNYNYLYRLFRKSNLKPFERDISTEIYQAGSTPCNGVEGFNCYFPLQSYGFQPTNGVGYQPYRVVVLSFELLHAPATVCGPKKSTNLVKNKCVNFNFNGLTGTGVLTESNKKFLPFQQFGRDIADTTDAVRDPQTLEILDITPCSFGGVSVITPGTNTSNQVAVLYQDVNCTEVPVAIHADQLTPTWRVYSTGSNVFQTRAGCLIGAEHVNNSYECDIPIGAGICASYQTQTNSPRRARSVASQSIIAYTMSLGAENSVAYSNNSIAIPTNFTISVTTEILPVSMTKTSVDCTMYICGDSTECSNLLLQYGSFCTQLNRALTGIAVEQDKNTQEVFAQVKQIYKTPPIKDFGGFNFSQILPDPSKPSKRSFIEDLLFNKVTLADAGFIKQYGDCLGDIAARDLICAQKFNGLTVLPPLLTDEMIAQYTSALLAGTITSGWTFGAGAALQIPFAMQMAYRFNGCGVTQNVLYENQKLIANQFNSAIGKIQDSLSSTASALGKLQDVVNQNAQALNTLVKQLSSNFGAISSVLNDILSRLDKVEAEVQIDRLITGRLQSLQTYVTQQLIRAAEIRASANLAATKMSECVLGQSKRVDFCGKGCHLMSFPQSAPHGVVFLHVTYVPAQEKNFTTAPAICHDGKAHFPREGVFVSNGTHWFVTQRNFYEPQIITTDNTFVSGNCDVVIGIVNNTVYDPLQPELESFKEELDKYFKNHTSPDVDLGDISGINASVVNIQKEIDRLNEVAKNLNESLIDLQELGKYEQYIKGGSGYIPEAPRDGQAYVRKDGEWVLLSTFL

SEQ ID NO: 6275 - protein, 1241 aa, Artificial Sequence
  SARS-CoV-2/2019-nCoV/USA-CruiseA-18/2020__MT159716.1 spike protein (1-1211)(I909C_Y1047C) Foldon construct
MFVFLVLLPLVSSQCVNLTTRTQLPPAYTNSFTRGVYYPDKVFRSSVLHSTQDLFLPFFSNVTWFHAIHVSGTNGTKRFDNPVLPFNDGVYFASTEKSNIIRGWIFGTTLDSKTQSLLIVNNATNVVIKVCEFQFCNDPFLGVYYHKNNKSWMESELRVYSSANNCTFEYVSQPFLMDLEGKQGNFKNLREFVFKNIDGYFKIYSKHTPINLVRDLPQGFSALEPLVDLPIGINITRFQTLLALHRSYLTPGDSSSGWTAGAAAYYVGYLQPRTFLLKYNENGTITDAVDCALDPLSETKCTLKSFTVEKGIYQTSNFRVQPTESIVRFPNITNLCPFGEVFNATRFASVYAWNRKRISNCVADYSVLYNSASFSTFKCYGVSPTKLNDLCFTNVYADSFVIRGDEVRQIAPGQTGKIADYNYKLPDDFTGCVIAWNSNNLDSKVGGNYNYLYRLFRKSNLKPFERDISTEIYQAGSTPCNGVEGFNCYFPLQSYGFQPTNGVGYQPYRVVVLSFELLHAPATVCGPKKSTNLVKNKCVNFNFNGLTGTGVLTESNKKFLPFQQFGRDIADTTDAVRDPQTLEILDITPCSFGGVSVITPGTNTSNQVAVLYQDVNCTEVPVAIHADQLTPTWRVYSTGSNVFQTRAGCLIGAEHVNNSYECDIPIGAGICASYQTQTNSPRRARSVASQSIIAYTMSLGAENSVAYSNNSIAIPTNFTISVTTEILPVSMTKTSVDCTMYICGDSTECSNLLLQYGSFCTQLNRALTGIAVEQDKNTQEVFAQVKQIYKTPPIKDFGGFNFSQILPDPSKPSKRSFIEDLLFNKVTLADAGFIKQYGDCLGDIAARDLICAQKFNGLTVLPPLLTDEMIAQYTSALLAGTITSGWTFGAGAALQIPFAMQMAYRFNGCGVTQNVLYENQKLIANQFNSAIGKIQDSLSSTASALGKLQDVVNQNAQALNTLVKQLSSNFGAISSVLNDILSRLDKVEAEVQIDRLITGRLQSLQTYVTQQLIRAAEIRASANLAATKMSECVLGQSKRVDFCGKGCHLMSFPQSAPHGVVFLHVTYVPAQEKNFTTAPAICHDGKAHFPREGVFVSNGTHWFVTQRNFYEPQIITTDNTFVSGNCDVVIGIVNNTVYDPLQPELDSFKEELDKYFKNHTSPDVDLGDISGINASVVNIQKEIDRLNEVAKNLNESLIDLQELGKYEQYIKGGSGYIPEAPRDGQAYVRKDGEWVLLSTFL

SEQ ID NO: 6276 - protein, 1241 aa, Artificial Sequence
  SARS-CoV-2/SARS-CoV-2/Yunnan-01/human/2020/CHN__MT049951.1 spike protein (1-1211)(I909C_Y1047C) Foldon construct
MFVFLVLLPLVSSQCVNLTTRTQLPPANTNSFTRGVYYPDKVFRSSVLHSTQDLFLPFFSNVTWFHAIHVSGTNGTKRFDNPVLPFNDGVYFASTEKSNIIRGWIFGTTLDSKTQSLLIVNNATNVVIKVCEFQFCNDPFLGVYYHKNNKSWMESEFRVYSSANNCTFEYVSQPFLMDLEGKQGNFKNLREFVFKNIDGYFKIYSKHTPINLVRDLPQGFSALEPLVDLPIGINITRFQTLLALHRSYLTPGDSSSGWTAGAAAYYVGYLQPRTFLLKYNENGTITDAVDCALDPLSETKCTLKSFTVEKGIYQTSNFRVQPTESIVRFPNITNLCPFGEVFNATRFASVYAWNRKRISNCVADYSVLYNSASFSTFKCYGVSPTKLNDLCFTNVYADSFVIRGDEVRQIAPGQTGKIADYNYKLPDDFTGCVIAWNSNNLDSKVGGNYNYLYRLFRKSNLKPFERDISTEIYQAGSTPCNGVEGFNCYFPLQSYGFQPTNGVGYQPYRVVVLSFELLHAPATVCGPKKSTNLVKNKCVNFNFNGLTGTGVLTESNKKFLPFQQFGRDIADTTDAVRDPQTLEILDITPCSFGGVSVITPGTNTSNQVAVLYQDVNCTEVPVAIHADQLTPTWRVYSTGSNVFQTRAGCLIGAEHVNNSYECDIPIGAGICASYQTQTNSPRRARSVASQSIIAYTMSLGAENSVAYSNNSIAIPTNFTISVTTEILPVSMTKTSVDCTMYICGDSTECSNLLLQYGSFCTQLNRALTGIAVEQDKNTQEVFAQVKQIYKTPPIKDFGGFNFSQILPDPSKPSKRSFIEDLLFNKVTLADAGFIKQYGDCLGDIAARDLICAQKFNGLTVLPPLLTDEMIAQYTSALLAGTITSGWTFGAGAALQIPFAMQMAYRFNGCGVTQNVLYENQKLIANQFNSAIGKIQDSLSSTASALGKLQDVVNQNAQALNTLVKQLSSNFGAISSVLNDILSRLDKVEAEVQIDRLITGRLQSLQTYVTQQLIRAAEIRASANLAATKMSECVLGQSKRVDFCGKGCHLMSFPQSAPHGVVFLHVTYVPAQEKNFTTAPAICHDGKAHFPREGVFVSNGTHWFVTQRNFYEPQIITTDNTFVSGNCDVVIGIVNNTVYDPLQPELDSFKEELDKYFKNHTSPDVDLGDISGINASVVNIQKEIDRLNEVAKNLNESLIDLQELGKYEQYIKGGSGYIPEAPRDGQAYVRKDGEWVLLSTFL

SEQ ID NO: 6277 - protein, 1241 aa, Artificial Sequence
  SARS-CoV-2/USA/WA-UW292/2020__EPI_ISL_418077 spike protein (1-1211)(I909C_Y1047C) Foldon construct
MFVFLVLLPLVSSQCVNLTTRTQLPPAYTNSFTRGVYYPDKVFRSSVLHSTQDLFLPFFSNVTWFHAIHVSGTNGTKRFDNPVLPFNDGVYFASTEKSNIIRGWIFGTTLDSKTQSLLIVNNATNVVIKVCEFQFCNDPFLGVYYHKNNKSWMESEFRVYSSANNCTFEYVSQPFLMDLEGKQGNFKNLREFVFKNIDGYFKIYSKHTPINLVRDLPQGFSALEPLVDLPIGINITRFQTLLALHRSYLTPGDSSSGWTAGAAAYYVGYLQPRTFLLKYNENGTITDAVDCALDPLSETKCTLKSFTVEKGIYQTSNFRVQPTESIVRFPNITNLCPFGEVFNATRFASVYAWNRKRISNCVADYSVLYNSASFSTFKCYGVSPTKLNDLCFTNVYADSFVIRGDEVRQIAPGQTGKIADYNYKLPDDFTGCVIAWNSNNLDSKVGGNYNYLYRLFRKSNLKPFERDISTEIYQASSTPCNGVEGFNCYFPLQSYGFQPTNGVGYQPYRVVVLSFELLHAPATVCGPKKSTNLVKNKCVNFNFNGLTGTGVLTESNKKFLPFQQFGRDIADTTDAVRDPQTLEILDITPCSFGGVSVITPGTNTSNQVAVLYQDVNCTEVPVAIHADQLTPTWRVYSTGSNVFQTRAGCLIGAEHVNNSYECDIPIGAGICASYQTQTNSPRRARSVASQSIIAYTMSLGAENSVAYSNNSIAIPTNFTISVTTEILPVSMTKTSVDCTMYICGDSTECSNLLLQYGSFCTQLNRALTGIAVEQDKNTQEVFAQVKQIYKTPPIKDFGGFNFSQILPDPSKPSKRSFIEDLLFNKVTLADAGFIKQYGDCLGDIAARDLICAQKFNGLTVLPPLLTDEMIAQYTSALLAGTITSGWTFGAGAALQIPFAMQMAYRFNGCGVTQNVLYENQKLIANQFNSAIGKIQDSLSSTASALGKLQDVVNQNAQALNTLVKQLSSNFGAISSVLNDILSRLDKVEAEVQIDRLITGRLQSLQTYVTQQLIRAAEIRASANLAATKMSECVLGQSKRVDFCGKGCHLMSFPQSAPHGVVFLHVTYVPAQEKNFTTAPAICHDGKAHFPREGVFVSNGTHWFVTQRNFYEPQIITTDNTFVSGNCDVVIGIVNNTVYDPLQPELDSFKEELDKYFKNHTSPDVDLGDISGINASVVNIQKEIDRLNEVAKNLNESLIDLQELGKYEQYIKGGSGYIPEAPRDGQAYVRKDGEWVLLSTFL

SEQ ID NO: 6278 - protein, 1241 aa, Artificial Sequence
  SARS-CoV-2/Iceland/192/2020__EPI_ISL_417819 spike protein (1-1211)(I909C_Y1047C) Foldon construct
MFVFFVLLPLVSSQCVNLTTRTQLPPAYTNSFTRGVYYPDKVFRSSVLHSTQDLFLPFFSNVTWFHAIHVSGTNGTKRFDNPVLPFNDGVYFASTEKSNIIRGWIFGTTLDSKTQSLLIVNNATNVVIKVCEFQFCNDPFLGVYYHKNNKSWMESEFRVYSSANNCTFEYVSQPFLMDLEGKQGNFKNLREFVFKNIDGYFKIYSKHTPINLVRDLPQGFSALEPLVDLPIGINITRFQTLLALHRSYLTPGDSSSGWTAGAAAYYVGYLQPRTFLLKYNENGTITDAVDCALDPLSETKCTLKSFTVEKGIYQTSNFRVQPTESIVRFPNITNLCPFGEVFNATRFASVYAWNRKRISNCVADYSVLYNSASFSTFKCYGVSPTKLNDLCFTNVYADSFVIRGDEVRQIAPGQTGKIADYNYKLPDDFTGCVIAWNSNNLDSKVGGNYNYLYRLFRKSNLKPFERDISTEIYQAGSTPCNGVEGFNCYFPLQSYGFQPTNGVGYQPYRVVVLSFELLHAPATVCGPKKSTNLVKNKCVNFNFNGLTGTGVLTESNKKFLPFQQFGRDIADTTDAVRDPQTLEILDITPCSFGGVSVITPGTNTSNQVAVLYQGVNCTEVPVAIHADQLTPTWRVYSTGSNVFQTRAGCLIGAEHVNNSYECDIPIGAGICASYQTQTNSPRRARSVASQSIIAYTMSLGAENSVAYSNNSIAIPTNFTISVTTEILPVSMTKTSVDCTMYICGDSTECSNLLLQYGSFCTQLNRALTGIAVEQDKNTQEVFAQVKQIYKTPPIKDFGGFNFSQILPDPSKPSKRSFIEDLLFNKVTLADAGFIKQYGDCLGDIAARDLICAQKFNGLTVLPPLLTDEMIAQYTSALLAGTITSGWTFGAGAALQIPFAMQMAYRFNGCGVTQNVLYENQKLIANQFNSAIGKIQDSLSSTASALGKLQDVVNQNAQALNTLVKQLSSNFGAISSVLNDILSRLDKVEAEVQIDRLITGRLQSLQTYVTQQLIRAAEIRASANLAATKMSECVLGQSKRVDFCGKGCHLMSFPQSAPHGVVFLHVTYVPAQEKNFTTAPAICHDGKAHFPREGVFVSNGTHWFVTQRNFYEPQIITTDNTFVSGNCDVVIGIVNNTVYDPLQPELDSFKEELDKYFKNHTSPDVDLGDISGINASVVNIQKEIDRLNEVAKNLNESLIDLQELGKYEQYIKGGSGYIPEAPRDGQAYVRKDGEWVLLSTFL

SEQ ID NO: 6279 - protein, 1241 aa, Artificial Sequence
  SARS-CoV-2/Belgium/ULG-6939/2020__EPI_ISL_417020 spike protein (1-1211)(I909C_Y1047C) Foldon construct
MFVFLVLLPLVSSQCVNLTTRTQLPPAYTNSFTRGVYYPDKVFRSSVLHSTQDLFLPFFSNVTWFHAIHVSGTNGTKRFDNPVLPFNDGVYFASTEKSNIIRGWIFGTTLDSKTQSLLIVNNATNVVIKVCEFQFCNDPFLGVYYHKNNKSWMESEFRVYSSANNCTFEYVSQPFLMDLEGKQGNFKNLREFVFKNIDGYFKIYSKHTPINLVRDLPQGFSALEPLVDLPIGINITRFQTLLALHRSYLTPGDSSSGWTAGAAAYYVGYLQPRTFLLKYNENGTITDAVDCALDPLSETKCTLKSFTVEKGIYQTSNFRVQPTESIVRFPNITNLCPFGEVFNATRFASVYAWNRKRISNCVADYSVLYNSASFSTFKCYGVSPTKLNDLCFTNVYADSFVIRGDEVRQIAPGQTGKIADYNYKLPDDFTGCVIAWNSNNLDSKVGGNYNYLYRLFRKSNLKPFERDISTEIYQAGSTPCNGVEGFNCYFPLQSYGFQPTNGVGYQPYRVVVLSFELLHAPATVCGPKKSTNLVKNKCVNFNFNGLTGTGVLTESNKKFLPFQQFGRDIADTTDAVRDPQTLEILDITPCSFGGVSVITPGTNTSNQVAVLYQGVNCTEVPVAIHADQLTPTWRVYSTGSNVFQTRAGCLIGAEHVNNSYECDIPIGAGICASYQTQTNSPRRARSVASQSIIAYTMSLGAENSVVYSNNSIAIPTNFTISVTTEILPVSMTKTSVDCTMYICGDSTECSNLLLQYGSFCTQLNRALTGIAVEQDKNTQEVFAQVKQIYKTPPIKDFGGFNFSQILPDPSKPSKRSFIEDLLFNKVTLADAGFIKQYGDCLGDIAARDLICAQKFNGLTVLPPLLTDEMIAQYTSALLAGTITSGWTFGAGAALQIPFAMQMAYRFNGCGVTQNVLYENQKLIANQFNSAIGKIQDSLSSTASALGKLQDVVNQNAQALNTLVKQLSSNFGAISSVLNDILSRLDKVEAEVQIDRLITGRLQSLQTYVTQQLIRAAEIRASANLAATKMSECVLGQSKRVDFCGKGCHLMSFPQSAPHGVVFLHVTYVPAQEKNFTTAPAICHDGKAHFPREGVFVSNGTHWFVTQRNFYEPQIITTDNTFVSGNCDVVIGIVNNTVYDPLQPELDSFKEELDKYFKNHTSPDVDLGDISGINASVVNIQKEIDRLNEVAKNLNESLIDLQELGKYEQYIKGGSGYIPEAPRDGQAYVRKDGEWVLLSTFL

SEQ ID NO: 6280 - protein, 1241 aa, Artificial Sequence
  SARS-CoV-2/France/HF2496/2020__EPI_ISL_418231 spike protein (1-1211)(I909C_Y1047C) Foldon construct
MFVFLVLLPLVSSQCVNLTTRTQLPPAYTNSFTRGVYYPDKVFRSSVLHSTQDLFLPFFSNVTWFHAIHVSGTNGTKRFDNPVLPFNDGVYFASTEKSNIIRGWIFGTTLDSKTQSLLIVNNATNVVIKVCEFQFCNDPFLGVYYHKNNKSWMESEFRVYSSANNCTFEYVSQPFLMDLEGKQGNFKNLREFVFKNIDGYFKIYSKHTPINLVRDLPQGFSALEPLVDLPIGINITRFQTLLALHRSYLTPGDSSSGWTAGAAAYYVGYLQPRTFLLKYNENGTITDAVDCALDPLSETKCTLKSFTVEKGIYQTSNFRVQPTESIVRFPNITNLCPFGEVFNATRFASVYAWNRKRISNCVADYSVLYNSASFSTFKCYGVSPTKLNDLCFTNVYADSFVIRGDEVRQIAPGQTGKIADYNYKLPDDFTGCVIAWNSNNLDSKVGGNYNYLYRLFRKSNLKPFERDISTEIYQAGSTPCNGVEGFNCYFPLQSYGFQPTNGVGYQPYRVVVLSFELLHAPATVCGPKKSTNLVKNKCVNFNFNGLTGTGVLTESNKKFLPFQQFGRDIADTTDAVRDPQTLEILDITPCSFGGVSVITPGTNTSNQVAVLYQGVNCTEVPVAIHADQLTPTWRVYSTGSNVFQTRAGCLIGAEHVNNSYECDIPIGAGICASYQTQTNSPRRARSVASQSIIAYTMSLGAENSVAYSNNSIAIPTNFTISVTTEILPVSMTKTSVDCTMYICGDSTECSNLLLQYGSFCTQLNRALTGIAVEQDKNTQEVFAQVKQIYKTPPIKDFGGFNFSQILPDPSKPSKRSFIEDLLFNKVTLADAGFIKQYGDCLGDIVARDLICAQKFNGLTVLPPLLTDEMIAQYTSALLAGTITSGWTFGAGAALQIPFAMQMAYRFNGCGVTQNVLYENQKLIANQFNSAIGKIQDSLSSTASALGKLQDVVNQNAQALNTLVKQLSSNFGAISSVLNDILSRLDKVEAEVQIDRLITGRLQSLQTYVTQQLIRAAEIRASANLAATKMSECVLGQSKRVDFCGKGCHLMSFPQSAPHGVVFLHVTYVPAQEKNFTTAPAICHDGKAHFPREGVFVSNGTHWFVTQRNFYEPQIITTDNTFVSGNCDVVIGIVNNTVYDPLQPELDSFKEELDKYFKNHTSPDVDLGDISGINASVVNIQKEIDRLNEVAKNLNESLIDLQELGKYEQYIKGGSGYIPEAPRDGQAYVRKDGEWVLLSTFL

SEQ ID NO: 6281 - protein, 1241 aa, Artificial Sequence
  SARS-CoV-2/USA/WA-UW291/2020__EPI_ISL_418076 spike protein (1-1211)(I909C_Y1047C) Foldon construct
MFVFLVLLPLVSSQCVNLTTRTQLPPAYTNSFTRGVYYPDKVFRSSVLHSTQDLFLPFFSNVTWFHAIHVSGTNGTKRFDNPVLPFNDGVYFASTEKSNIIRGWIFGTTLDSKTQSLLIVNNATNVVIKVCEFQFCNDPFLGVYYHKNNKSWMESEFRVYSSANNCTFEYVSQPFLMDLEGKQGNFKNLREFVFKNIDGYFKIYSKHTPINLVRDLPQGFSALEPLVDLPIGINITRFQTLLALHRSYLTPGDSSSGWTAGAAAYYVGYLQPRTFLLKYNENGTITDAVDCALDPLSETKCTLKSFTVEKGIYQTSNFRVQPTESIVRFPNITNLCPFGEVFNATRFASVYAWNRKRISNCVADYSVLYNSASFSTFKCYGVSPTKLNDLCFTNVYADSFVIRGDEVRQIAPGQTGKIADYNYKLPDDFTGCVIAWNSNNLDSKVGGNYNYLYRLFRKSNLKPFERDISTEIYQAGSTPCNGVEGFNCYFPLQSYGFQPTNGVGYQPYRVVVLSFELLHAPATVCGPKKSTNLVKNKCVNFNFNGLTGTGVLTESNKKFLPFQQFGRDIADTTDAVRDPQTLEILDITPCSFGGVSVITPGTNTSNQVAVLYQGVNCTEVPVAIHADQLTPTWRVYSTGSNVFQTRAGCLIGAEHVNNSYECDIPIGAGICASYQTQTNSPRRARSVASQSIIAYTMSLGAENSVAYSNNSIAIPTNFTISVTTEILPVSMTKTSVDCTMYICGDSTECSNLLLQYGSFCTQLNRALTGIAVEQDKNTQEVFAQVKQIYKTPPIKDFGGFNFSQILPDPSKPSKRSFIEDLLFNKVTLADAGFIKQYGDCLGDIAARDLICAQKFNGLTVLPPLLTDEMIAQYTSALLAGTITSGWTFGAGAALQIPFAMQMAYRFNGCGVTQNVLYENQKLIANQFNSAIGKIQYSLSSTASALGKLQDVVNQNAQALNTLVKQLSSNFGAISSVLNDILSRLDKVEAEVQIDRLITGRLQSLQTYVTQQLIRAAEIRASANLAATKMSECVLGQSKRVDFCGKGCHLMSFPQSAPHGVVFLHVTYVPAQEKNFTTAPAICHDGKAHFPREGVFVSNGTHWFVTQRNFYEPQIITTDNTFVSGNCDVVIGIVNNTVYDPLQPELDSFKEELDKYFKNHTSPDVDLGDISGINASVVNIQKEIDRLNEVAKNLNESLIDLQELGKYEQYIKGGSGYIPEAPRDGQAYVRKDGEWVLLSTFL

SEQ ID NO: 6282 - protein, 1241 aa, Artificial Sequence; identical to SEQ ID NO: 6245
  SARS-CoV-2/Portugal/PT0034/2020__EPI_ISL_418019 spike protein (1-1211)(I909C_Y1047C) Foldon construct

SEQ ID NO: 6283 - protein, 1241 aa, Artificial Sequence
  SARS-CoV-2/Iceland/202/2020__EPI_ISL_417750 spike protein (1-1211)(I909C_Y1047C) Foldon construct
MFVFLVLLPLVSSQCVNLTTRTQLPPAYTNSFTRGVYYPDKVFRSSVLHSTQDLFLPFFSNVTWFHAIHVSGTNGTKRFDNPVLPFNDGVYFASTEKSNIIRGWIFGTTLDSKTQSLLIVNNATNVVIKVCEFQFCNDPFLGVYYHKNNKSWMESEFRVYSSANNCTFEYVSQPFLMDLEGKQGNFKNLREFVFKNIDGYFKIYSKHTPINLVRDLPQGFSALEPLVDLPIGINITRFQTLLALHRSYLTPGDSSSGWTAGAAAYYVGYLQPRTFLLKYNENGTITDAVDCALDPLSETKCTLKSFTVEKGIYQTSNFRVQPTESIVRFPNITNLCPFGEVFNATRFASVYAWNRKRISNCVADYSVLYNSASFSTFKCYGVSPTKLNDLCFTNVYADSFVIRGDEVRQIAPGQTGKIADYNYKLPDDFTGCVIAWNSNNLDSKVGGNYNYLYRLFRKSNLKPFERDISTEIYQAGSTPCNGVEGFNCYFPLQSYGFQPTNGVGYQPYRVVVLSFELLHAPATVCGPKKSTNLVKNKCVNFNFNGLTGTGVLTESNKKFLPFQQFGRDIADTTDAVRDPQTLEILDITPCSFGGVSVITPGTNTSNQVAVLYQDVNCTEVPVAIHADQLTPTWRVYSTGSNVFQTRAGCLIGAEHVNNSYECDIPIGAGICASYQTQTNSPRRARSVASQSIIAYTMSLGAENSVAYSNNSIAIPTNFTISVTTEILPVSMTKTSVDCTMYICGDSTECSNLLLQYGSFCTQLNRALTGIAVEQDKNTQEVFAQVKQIYKTPPIKDFGGFNFSQILPDPSKPSKRSFIEDLLFNKVTLADAGFIKQYGDCLGDIAARDLICAQKFNGLTVLPPLLTDEMIAQYTSALLAGTITSGWTFGAGAALQIPFAMQMAYRFNGCGVTQNVLYENQKLIANQFNSAIGKIQDSLSSTASALGKLQDVVNQNAQALNTLVKQLSSNFGAISSVLNDILSRLDKVEAEVQIDRLITGRLQSLQTYVTQQLIRAAEIRASANLAATKMSECVLGQSKRVDFCGKGCHLMSFPQSAPHGVVFLHVTYVPAQEKNFTTAPAICHDGKAHFPREGVFVSNGTHWFVTQRNFYEPQIITTDNTFVSGNCDVVIGIVNNTVYDPLQPELDSFKEELDKYFKNHTSPDVDLGDIPGINASVVNIQKEIDRLNEVAKNLNESLIDLQELGKYEQYIKGGSGYIPEAPRDGQAYVRKDGEWVLLSTFL

SEQ ID NO: 6284 - protein, 1241 aa, Artificial Sequence
  SARS-CoV-2/USA/WA-UW261/2020__EPI_ISL_418046 spike protein (1-1211)(I909C_Y1047C) Foldon construct
MFVFLVLLPLVSSQCVNLTTRTQLPPAYTNSFTRGVYYPDKVFRSSVLHSTQDLFLPFFSNVTWFHAIHVSGTNGTKRFDNPVLPFNDGVYFASTEKSNIIRGWIFGTTLDSKTQSLLIVNNATNVVIKVCEFQFCNDPFLGVYYHKNNKSWMESEFRVYSSANNCTFEYVSQPFLMDLEGKQGNFKNLREFVFKNIDGYFKIYSKHTPINLVRDLPQGFSALEPLVDLPIGINITRFQTLLALHRSYLTPGDSSSGWTAGAAAYYVGYLQPRTFLLKYNENGTITDAVDCALDPLSETKCTLKSFTVEKGIYQTSNFRVQPTESIVRFPNITNLCPFGEVFNATRFTSVYAWNRKRISNCVADYSVLYNSASFSTFKCYGVSPTKLNDLCFTNVYADSFVIRGDEVRQIAPGQTGKIADYNYKLPDDFTGCVIAWNSNNLDSKVGGNYNYLYRLFRKSNLKPFERDISTEIYQAGSTPCNGVEGFNCYFPLQSYGFQPTNGVGYQPYRVVVLSFELLHAPATVCGPKKSTNLVKNKCVNFNFNGLTGTGVLTESNKKFLPFQQFGRDIADTTDAVRDPQTLEILDITPCSFGGVSVITPGTNTSNQVAVLYQDVNCTEVPVAIHADQLTPTWRVYSTGSNVFQTRAGCLIGAEHVNNSYECDIPIGAGICASYQTQTNSPRRARSVASQSIIAYTMSLGAENSVAYSNNSIAIPTNFTISVTTEILPVSMTKTSVDCTMYICGDSTECSNLLLQYGSFCTQLNRALTGIAVEQDKNTQEVFAQVKQIYKTPPIKDFGGFNFSQILPDPSKPSKRSFIEDLLFNKVTLADAGFIKQYGDCLGDIAARDLICAQKFNGLTVLPPLLTDEMIAQYTSALLAGTITSGWTFGAGAALQIPFAMQMAYRFNGCGVTQNVLYENQKLIANQFNSAIGKIQDSLSSTASALGKLQDVVNQNAQALNTLVKQLSSNFGAISSVLNDILSRLDKVEAEVQIDRLITGRLQSLQTYVTQQLIRAAEIRASANLAATKMSECVLGQSKRVDFCGKGCHLMSFPQSAPHGVVFLHVTYVPAQEKNFTTAPAICHDGKAHFPREGVFVSNGTHWFVTQRNFYEPQIITTDNTFVSGNCDVVIGIVNNTVYDPLQPELDSFKEELDKYFKNHTSPDVDLGDISGINASVVNIQKEIDRLNEVAKNLNESLIDLQELGKYEQYIKGGSGYIPEAPRDGQAYVRKDGEWVLLSTFL

SEQ ID NO: 6285 - protein, 1241 aa, Artificial Sequence
  SARS-CoV-2/Portugal/PT0035/2020__EPI_ISL_418020 spike protein (1-1211)(I909C_Y1047C) Foldon construct
MFVFLVLLPLVSSQCVNLTTRTQLPPAYTNSFTRGVYYPDKVFRSSVLHSTQDLFLPFFSNVTWFHAIHVSGTNGTKRFDNPVLPFNDGVYFASTEKSNIIRGWIFGTTLDSKTQSLLIVNNATNVVIKVCEFQFCNDPFLGVYYHKNNKSWMESEFRVYSSANNCTFEYVSQPFLMDLEGKQGNFKNLREFVFKNIDGYFKIYSKHTPINLVRDLPQGFSALEPLVDLPIGINITRFQTLLALHRSYLTPGDSSSGWTAGAAAYYVGYLQPRTFLLKYNENGTITDAVDCALDPLSETKCTLKSFTVEKGIYQTSNFRVQPTESIVRFPNITNLCPFGEVFNATRFASVYAWNRKRISNCVADYSVLYNSASFSTFKCYGVSPTKLNDLCFTNVYADSFVIRGDEVRQIAPGQTGKIADYNYKLPDDFTGCVIAWNSNNLDSKVGGNYNYLYRLFRKSNLKPFERDISTEIYQAGSTPCNGVEGFNCYFPLQSYGFQPTNGVGYQPYRVVVLSFELLHAPATVCGPKKSTNLVKNKCVNFNFNGLTGTGVLTESNKKFLPFQQFGRDIADTTDAVRDPQTLEILDITPCSFGGVSVITPGTNTSNQVAVLYQDVNCTEVPVAIHADQLTPTWRVYSTGSNVFQTRAGCLIGAEHVNNSYECDIPIGAGICASYQTQTNSPRRARSVASQSIIAYTMSLGAENSVAYSNNSIAIPTNFTISVTTEILPVSMTKTSVDCTMYICGDSTECSNLLLQYGSFCTQLNRALTGIAVEQDKNTQEVFAQVKQIYKTPPIKDFGGFNFSQILPDPSKPSKRSFIEDLLFNKVTLADAGFIKQYGDCLGDISARDLICAQKFNGLTVLPPLLTDEMIAQYTSALLAGTITSGWTFGAGAALQIPFAMQMAYRFNGCGVTQNVLYENQKLIANQFNSAIGKIQDSLSSTASALGKLQDVVNQNAQALNTLVKQLSSNFGAISSVLNDILSRLDKVEAEVQIDRLITGRLQSLQTYVTQQLIRAAEIRASANLAATKMSECVLGQSKRVDFCGKGCHLMSFPQSAPHGVVFLHVTYVPAQEKNFTTAPAICHDGKAHFPREGVFVSNGTHWFVTQRNFYEPQIITTDNTFVSGNCDVVIGIVNNTVYDPLQPELDSFKEELDKYFKNHTSPDVDLGDISGINASVVNIQKEIDRLNEVAKNLNESLIDLQELGKYEQYIKGGSGYIPEAPRDGQAYVRKDGEWVLLSTFL

SEQ ID NO: 6286 - protein, 1241 aa, Artificial Sequence
  SARS-CoV-2/USA/NY-NYUMC7/2020__EPI_ISL_418192 spike protein (1-1211)(I909C_Y1047C) Foldon construct
MFVFLVLLPLVSSQCVNLTTRTQLPPAYTNSFTRGVYYPDKVFRSSVLHSTQDLFLPFFSNVTWFHAIHVSGTNGTKRFDNPVLPFNDGVYFASTEKSNIIRGWIFGTTLDSKTQSLLIVNNATNVVIKVCEFQFCNDPFLGVYHHKNNKSWMESEFRVYSSANNCTFEYVSQPFLMDLEGKQGNFKNLREFVFKNIDGYFKIYSKHTPINLVRDLPQGFSALEPLVDLPIGINITRFQTLLALHRSYLTPGDSSSGWTAGAAAYYVGYLQPRTFLLKYNENGTITDAVDCALDPLSETKCTLKSFTVEKGIYQTSNFRVQPTESIVRFPNITNLCPFGEVFNATRFASVYAWNRKRISNCVADYSVLYNSASFSTFKCYGVSPTKLNDLCFTNVYADSFVIRGDEVRQIAPGQTGKIADYNYKLPDDFTGCVIAWNSNNLDSKVGGNYNYLYRLFRKSNLKPFERDISTEIYQAGSTPCNGVEGFNCYFPLQSYGFQPTNGVGYQPYRVVVLSFELLHAPATVCGPKKSTNLVKNKCVNFNFNGLTGTGVLTESNKKFLPFQQFGRDIADTTDAVRDPQTLEILDITPCSFGGVSVITPGTNTSNQVAVLYQGVNCTEVPVAIHADQLTPTWRVYSTGSNVFQTRAGCLIGAEHVNNSYECDIPIGAGICASYQTQTNSPRRARSVASQSIIAYTMSLGAENSVAYSNNSIAIPTNFTISVTTEILPVSMTKTSVDCTMYICGDSTECSNLLLQYGSFCTQLNRALTGIAVEQDKNTQEVFAQVKQIYKTPPIKDFGGFNFSQILPDPSKPSKRSFIEDLLFNKVTLADAGFIKQYGDCLGDIAARDLICAQKFNGLTVLPPLLTDEMIAQYTSALLAGTITSGWTFGAGAALQIPFAMQMAYRFNGCGVTQNVLYENQKLIANQFNSAIGKIQDSLSSTASALGKLQDVVNQNAQALNTLVKQLSSNFGAISSVLNDILSRLDKVEAEVQIDRLITGRLQSLQTYVTQQLIRAAEIRASANLAATKMSECVLGQSKRVDFCGKGCHLMSFPQSAPHGVVFLHVTYVPAQEKNFTTAPAICHDGKAHFPREGVFVSNGTHWFVTQRNFYEPQIITTDNTFVSGNCDVVIGIVNNTVYDPLQPELDSFKEELDKYFKNHTSPDVDLGDISGINASVVNIQKEIDRLNEVAKNLNESLIDLQELGKYEQYIKGGSGYIPEAPRDGQAYVRKDGEWVLLSTFL

SEQ ID NO: 6287 - protein, 1241 aa, Artificial Sequence
  SARS-CoV-2/Iceland/189/2020__EPI_ISL_417709 spike protein (1-1211)(I909C_Y1047C) Foldon construct
MFVFLVLLPLVSSQCVNLTTRTQLPPAYTNSFTRGVYYPDKVFRSSVLHSTQDLFLPFFSNVTWFHAIHVSGTNGTKRFDNPVLPFNDGVYFASTEKSNIIRGWIFGTTLDSKTQSLLIVNNATNVVIKVCEFQFCNDPFLGVYYHKNNKSWMESEFRVYSSANNCTFEYVSQPFLMDLEGKQGNFKNLREFVFKNIDGYFKIYSKHTPINLVRDLPQGFSALEPLVDLPIGINITRFQTLLALHRSYLTPGDSSSGWTAGAAAYYVGYLQPRTFLLKYNENGTITDAVDCALDPLSETKCTLKSFTVEKGIYQTSNFRVQPTESIVRFPNITNLCPFGEVFNATRFASVYAWNRKRISNCVADYSVLYNSASFSTFKCYGVSPTKLNDLCFTNVYADSFVIRGDEVRQIAPGQTGKIADYNYKLPDDFTGCVIAWNSNNLDSKVGGNYNYLYRLFRKSNLKPFERDISTEIYQAGSTPCNGVEGFNCYFPLQSYGFQPTNGVGYQPYRVVVLSFELLHAPATVCGPKKSTNLVKNKCVNFNFNGLTGTGVLTESNKKFLPFQQFGRDIADTTDAVRDPQTLEILDITPCSFGGVSVITPGTNTSNQVAVLYQGVNCTEVPVAIHADQLTPTWRVYSTGSNVFQTRAGCLIGAEHVNNSYECDIPIGAGICASYQTQTNSPRRARSVASQSIIAYTMSLGAENSVAYSNNSIAIPTNFTISVTTEILPVSMTKTSVDCTMYICGDSTECSNLLLQYGSFCTQLNRALTGIAVEQDKNTQEVFAQVKQIYKTPPIKDFGGFNFSQILPDPSKPSKRSFIEDLLFNKVTLADAGFTKQYGDCLGDIAARDLICAQKFNGLTVLPPLLTDEMIAQYTSALLAGTITSGWTFGAGAALQIPFAMQMAYRFNGCGVTQNVLYENQKLIANQFNSAIGKIQDSLSSTASALGKLQDVVNQNAQALNTLVKQLSSNFGAISSVLNDILSRLDKVEAEVQIDRLITGRLQSLQTYVTQQLIRAAEIRASANLAATKMSECVLGQSKRVDFCGKGCHLMSFPQSAPHGVVFLHVTYVPAQEKNFTTAPAICHDGKAHFPREGVFVSNGTHWFVTQRNFYEPQIITTDNTFVSGNCDVVIGIVNNTVYDPLQPELDSFKEELDKYFKNHTSPDVDLGDISGINASVVNIQKEIDRLNEVAKNLNESLIDLQELGKYEQYIKGGSGYIPEAPRDGQAYVRKDGEWVLLSTFL

SEQ ID NO: 6288 - protein, 1241 aa, Artificial Sequence
  SARS-CoV-2/Australia/NSW56/2020__EPI_ISL_417408 spike protein (1-1211)(I909C_Y1047C) Foldon construct
MFVFLVLLPLVSSQCVNLTTRTQLPPAYTNSFTRGVYYPDKVFRSSVLHSTQDLFLPFFSNVTWFHAIHVSGTNGTKRFDNPVLPFNDGVYFASTEKSNIIRGWIFGTTLDSKTQSLLIVNNATNVVIKVCEFQFCNDPFLGVYYHKNNKSWMESEFRVYSSANNCTFEYVSQPFLMDLEGKQGNFKNLREFVFKNIDGYFKIYSKHTPINLVRDLPQGFSALEPLVDLPIGINITRFQTLLALHRSYLTPGDSSSGWTAGAAAYYVGYLQPRTFLLKYNENGTITDAVDCALDPLSETKCTLKSFTVEKGIYQTSNFRVQPTESIVRFPNITNLCPFGEVFNATRFASVYAWNRKRISNCVADYSVLYNSASFSTFKCYGVSPTKLNDLCFTNVYADSFVIRGDEVRQIAPGQTGKIADYNYKLPDDFTGCVIAWNSNNLDSKVGGNYNYLYRLFRKSNLKPFERDISTEIYQAGSTPCNGVEGFNCYFPLQSYGFQPTNGVGYQPYRVVVLSFELLHAPATVCGPKKSTNLVKNKCVNFNFNGLTGTGVLTESNKKFLPFQQFGRDIADTTDAVRDPQTLEILDITPCSFGGVSVITPGTNTSNQVAVLYQDVNCTEVPVAIHADQLTPTWRVYSTGSNVFQTRAGCLIGAEHVNNSYECDIPIGAGICASYQTQTNSPRRARSVASQSIIAYTMSLGAENSVAYSNNSIAIPTNFTISVTTEILPVSMTKTSVDCTMYICGDSTECSNLLLQYGSFCTQLNRALTGIAVEQDKNTQEVFAQVKQIYKTPPIKDFGGFNFSQILPDSSKPSKRSFIEDLLFNKVTLADAGFIKQYGDCLGDIAARDLICAQKFNGLTVLPPLLTDEMIAQYTSALLAGTITSGWTFGAGAALQIPFAMQMAYRFNGCGVTQNVLYENQKLIANQFNSAIGKIQDSLSSTASALGKLQDVVNQNAQALNTLVKQLSSNFGAISSVLNDILSRLDKVEAEVQIDRLITGRLQSLQTYVTQQLIRAAEIRASANLAATKMSECVLGQSKRVDFCGKGCHLMSFPQSAPHGVVFLHVTYVPAQEKNFTTAPAICHDGKAHFPREGVFVSNGTHWFVTQRNFYEPQIITTDNTFVSGNCDVVIGIVNNTVYDPLQPELDSFKEELDKYFKNHTSPDVDLGDISGINASVVNIQKEIDRLNEVAKNLNESLIDLQELGKYEQYIKGGSGYIPEAPRDGQAYVRKDGEWVLLSTFL

SEQ ID NO: 6289 - protein, 1241 aa, Artificial Sequence
  SARS-CoV-2/Iceland/280/2020__EPI_ISL_417608 spike protein (1-1211)(I909C_Y1047C) Foldon construct
MFVFLVLLPLVSSQCVNLTTRTQLPPAYTNSFTRGVYYPDKVFRSSVLHSTQDLFLPFFSNVTWFHAIHVSGTNGTKRFDNPVLPFNDGVYFASTEKSNIIRGWIFGTTLDSKTQSLLIVNNATNVVIKVCEFQFCNDPFLGVYYHKNNKSWMESEFRVYSSANNCTFEYVSQPFLMDLEGKQGNFKNLREFVFKNIDGYFKIYSKHTPINLVRDLPQGFSALEPLVDLPIGINITRFQTLLALHRSYLTPGDSSSGWTAGAAAYYVGYLQPRTFLLKYNENGTITDAVDCALDPLSETKCTLKSFTVEKGIYQTSNFRVQPTESIVRFPNITNLCPFGEVFNATRFASVYAWNRKRISNCVADYSVLYNSASFSTFKCYGVSPTKLNDLCFTNVYADSFVIRGDEVRQIAPGQTGKIADYNYKLPDDFTGCVIAWNSNNLDSKVGGNYNYLYRLFRKSNLKPFERDISTEIYQAGSTPCNGVEGFNCYFPLQSYGFQPTNGVGYQPYRVVVLSFELLHAPATVCGPKKSTNLVKNKCVNFNFNGLTGTGVLTESNKKFLPFQQFGRDIADTTDAVRDPQTLEILDITPCSFGGVSVITPGTNTSNQVAVLYQGVNCTEVPVAIHADQLTPTWRVYSTGSNVFQTRAGCLIGAEHVNNSYECDIPIGAGICASYHTQTNSPRRARSVASQSIIAYTMSLGAENSVAYSNNSIAIPTNFTISVTTEILPVSMTKTSVDCTMYICGDSTECSNLLLQYGSFCTQLNRALTGIAVEQDKNTQEVFAQVKQIYKTPPIKDFGGFNFSQILPDPSKPSKRSFIEDLLFNKVTLADAGFIKQYGDCLGDIAARDLICAQKFNGLTVLPPLLTDEMIAQYTSALLAGTITSGWTFGAGAALQIPFAMQMAYRFNGCGVTQNVLYENQKLIANQFNSAIGKIQDSLSSTASALGKLQDVVNQNAQALNTLVKQLSSNFGAISSVLNDILSRLDKVEAEVQIDRLITGRLQSLQTYVTQQLIRAAEIRASANLAATKMSECVLGQSKRVDFCGKGCHLMSFPQSAPHGVVFLHVTYVPAQEKNFTTAPAICHDGKAHFPREGVFVSNGTHWFVTQRNFYEPQIITTDNTFVSGNCDVVIGIVNNTVYDPLQPELDSFKEELDKYFKNHTSPDVDLGDISGINASVVNIQKEIDRLNEVAKNLNESLIDLQELGKYEQYIKGGSGYIPEAPRDGQAYVRKDGEWVLLSTFL

SEQ ID NO: 6290 - protein, 1241 aa, Artificial Sequence; identical to SEQ ID NO: 6245
  SARS-CoV-2/Iceland/247/2020__EPI_ISL_417575 spike protein (1-1211)(I909C_Y1047C) Foldon construct

SEQ ID NO: 6291 - protein, 1241 aa, Artificial Sequence
  SARS-CoV-2/Iceland/238/2020__EPI_ISL_417566 spike protein (1-1211)(I909C_Y1047C) Foldon construct
MFVFLVLLPLVSSQCVNLTTRTQLPPAYTNSFTRGVYYPDKVFRSSVLHSTQDLFLPFFSNVTWFHAIHVSGTNGTKRFDNPVLPFNDGVYFASTEKSNIIRGWIFGTTLDSKTQSLLIVNNATNVVIKVCEFQFCNDPFLGVYYHKNNKSWMESEFRVYSSANNCTFEYVSQPFLMDLEGKQGNFKNLREFVFKNIDGYFKIYSKHTPINLVRDLPQGFSALEPLVDLPIGINITRFQTLLALHRSYLTPGDSSSGWTAGAAAYYVGYLQPRTFLLKYNENGTITDAVDCALDPLSETKCTLKSFTVEKGIYQTSNFRVQPTESIVRFPNITNLCPFGEVFNATRFASVYAWNRKRISNCVADYSVLYNSASFSTFKCYGVSPTKLNDLCFTNVYADSFVIRGDEVRQIAPGQTGKIADYNYKLPDDFTGCVIAWNSNNLDSKVGGNYNYLYRLFRKSNLKPFERDISTEIYQAGSTPCNGVEGFNCYFPLQSYGFQPTNGVGYQPYRVVVLSFELLHAPATVCGPKKSTNLVKNKCVNFNFNGLTGTGVLTESNKKFLPFQQFGRDIADTTDAVRDPQTLEILDITPCSFGGVSVITPGTNTSNQVAVLYQGVNCTEVPVAIHADQLTPTWRVYSTGSNVFQTRAGCLIGAEHVNNSYECDIPIGAGICASYQTQTNSPRRARSVASQSIIAYTMSLGAENSVAYSNNSIAIPTNFTISVTTEILPVSMTKTSVDCTMYICGDSTECSNLLLQYGSFCTQLNRALTGIAVEQDKNTQEVFAQVKQIYKTPPIKDFGGFNFSQILPDPSKPSKRSFIEDLLFNKVTLADVGFIKQYGDCLGDIAARDLICAQKFNGLTVLPPLLTDEMIAQYTSALLAGTITSGWTFGAGAALQIPFAMQMAYRFNGCGVTQNVLYENQKLIANQFNSAIGKIQDSLSSTASALGKLQDVVNQNAQALNTLVKQLSSNFGAISSVLNDILSRLDKVEAEVQIDRLITGRLQSLQTYVTQQLIRAAEIRASANLAATKMSECVLGQSKRVDFCGKGCHLMSFPQSAPHGVVFLHVTYVPAQEKNFTTAPAICHDGKAHFPREGVFVSNGTHWFVTQRNFYEPQIITTDNTFVSGNCDVVIGIVNNTVYDPLQPELDSFKEELDKYFKNHTSPDVDLGDISGINASVVNIQKEIDRLNEVAKNLNESLIDLQELGKYEQYIKGGSGYIPEAPRDGQAYVRKDGEWVLLSTFL

SEQ ID NO: 6292 - protein, 1241 aa, Artificial Sequence
  SARS-CoV-2/Greece/16/2020__EPI_ISL_418265 spike protein (1-1211)(I909C_Y1047C) Foldon construct
MFVFLVLLPLVSSQCVNLTTRTQLPPAYTNSFTRGVYYPDKVFRSSVLHSTQDLFLPFFSNVTWFHAIHVSGTNGTKRFDNPVLPFNDGVYFASTEKSNIIRGWIFGTTLDSKTQSLLIVNNATNVVIKVCEFQFCNDPFLGVYYHKNNKSWMESEFRVYSSANNCTFEYVSQPFLMDLEGKQGNFKNLREFVFKNVDGYFKIYSKHTPINLVRDLPQGFSALEPLVDLPIGINITRFQTLLALHRSYLTPGDSSSGWTAGAAAYYVGYLQPRTFLLKYNENGTITDAVDCALDPLSETKCTLKSFTVEKGIYQTSNFRVQPTESIVRFPNITNLCPFGEVFNATRFASVYAWNRKRISNCVADYSVLYNSASFSTFKCYGVSPTKLNDLCFTNVYADSFVIRGDEVRQIAPGQTGKIADYNYKLPDDFTGCVIAWNSNNLDSKVGGNYNYLYRLFRKSNLKPFERDISTEIYQAGSTPCNGVEGFNCYFPLQSYGFQPTNGVGYQPYRVVVLSFELLHAPATVCGPKKSTNLVKNKCVNFNFNGLTGTGVLTESNKKFLPFQQFGRDIADTTDAVRDPQTLEILDITPCSFGGVSVITPGTNTSNQVAVLYQDVNCTEVPVAIHADQLTPTWRVYSTGSNVFQTRAGCLIGAEHVNNSYECDIPIGAGICASYQTQTNSPRRARSVASQSIIAYTMSLGAENSVAYSNNSIAIPTNFTISVTTEILPVSMTKTSVDCTMYICGDSTECSNLLLQYGSFCTQLNRALTGIAVEQDKNTQEVFAQVKQIYKTPPIKDFGGFNFSQILPDPSKPSKRSFIEDLLFNKVTLADAGFIKQYGDCLGDIAARDLICAQKFNGLTVLPPLLTDEMIAQYTSALLAGTITSGWTFGAGAALQIPFAMQMAYRFNGCGVTQNVLYENQKLIANQFNSAIGKIQDSLSSTASALGKLQDVVNQNAQALNTLVKQLSSNFGAISSVLNDILSRLDKVEAEVQIDRLITGRLQSLQTYVTQQLIRAAEIRASANLAATKMSECVLGQSKRVDFCGKGCHLMSFPQSAPHGVVFLHVTYVPAQEKNFTTAPAICHDGKAHFPREGVFVSNGTHWFVTQRNFYEPQIITTDNTFVSGNCDVVIGIVNNTVYDPLQPELDSFKEELDKYFKNHTSPDVDLGDISGINASVVNIQKEIDRLNEVAKNLNESLIDLQELGKYEQYIKGGSGYIPEAPRDGQAYVRKDGEWVLLSTFL

SEQ ID NO: 6293 - protein, 1241 aa, Artificial Sequence
  SARS-CoV-2/Iceland/319/2020__EPI_ISL_417648 spike protein (1-1211)(I909C_Y1047C) Foldon construct
MFVFLVLLPLVSSQCVNLTTRTQLPPAYTNSFTRGVYYPDKVFRSSVLHSTQDLFLPFFSNVTWFHAIHVSGTNGTKRFDNPVLPFNDGVYFASTEKSNIIRGWIFGTTLDSKTQSLLIVNNATNVVIKVCEFQFCNDPFLGVYYHKNNKSWMESEFRVYSSANNCTFEYVSQPFLIDLEGKQGNFKNLREFVFKNIDGYFKIYSKHTPINLVRDLPQGFSALEPLVDLPIGINITRFQTLLALHRSYLTPGDSSSGWTAGAAAYYVGYLQPRTFLLKYNENGTITDAVDCALDPLSETKCTLKSFTVEKGIYQTSNFRVQPTESIVRFPNITNLCPFGEVFNATRFASVYAWNRKRISNCVADYSVLYNSASFSTFKCYGVSPTKLNDLCFTNVYADSFVIRGDEVRQIAPGQTGKIADYNYKLPDDFTGCVIAWNSNNLDSKVGGNYNYLYRLFRKSNLKPFERDISTEIYQAGSTPCNGVEGFNCYFPLQSYGFQPTNGVGYQPYRVVVLSFELLHAPATVCGPKKSTNLVKNKCVNFNFNGLTGTGVLTESNKKFLPFQQFGRDIADTTDAVRDPQTLEILDITPCSFGGVSVITPGTNTSNQVAVLYQGVNCTEVPVAIHADQLTPTWRVYSTGSNVFQTRAGCLIGAEHVNNSYECDIPIGAGICASYQTQTNSPRRARSVASQSIIAYTMSLGAENSVAYSNNSIAIPTNFTISVTTEILPVSMTKTSVDCTMYICGDSTECSNLLLQYGSFCTQLNRALTGIAVEQDKNTQEVFAQVKQIYKTPPIKDFGGFNFSQILPDPSKPSKRSFIEDLLFNKVTLADAGFIKQYGDCLGDIAARDLICAQKFNGLTVLPPLLTDEMIAQYTSALLAGTITSGWTFGAGAALQIPFAMQMAYRFNGCGVTQNVLYENQKLIANQFNSAIGKIQDSLSSTASALGKLQDVVNQNAQALNTLVKQLSSNFGAISSVLNDILSRLDKVEAEVQIDRLITGRLQSLQTYVTQQLIRAAEIRASANLAATKMSECVLGQSKRVDFCGKGCHLMSFPQSAPHGVVFLHVTYVPAQEKNFTTAPAICHDGKAHFPREGVFVSNGTHWFVTQRNFYEPQIITTDNTFVSGNCDVVIGIVNNTVYDPLQPELDSFKEELDKYFKNHTSPDVDLGDISGINASVVNIQKEIDRLNEVAKNLNESLIDLQELGKYEQYIKGGSGYIPEAPRDGQAYVRKDGEWVLLSTFL

SEQ ID NO: 6294 - protein, 1241 aa, Artificial Sequence
  SARS-CoV-2/Congo/94/2020__EPI_ISL_417947 spike protein (1-1211)(I909C_Y1047C) Foldon construct
MFVFLVLLPLVSSQCVNLTTRTQLPPAYTNSFTRGVYYPDKVFRSSVLHSTQDLFLPFFSNVTWFHAIHVSGTNGTKRFDNPVLPFNDGVYFASTEKSNIIRGWIFGTTLDSKTQSLLIVNNATNVVIKVCEFQFCNDPFLGVYYHKNNKSWMESEFRVYSSANNCTFEYVSQPFLMDLEGKQGNFKNLREFVFKNIDGYFKIYSKHTPINLVRDLPQGFSALEPLVDLPIGINITRFQTLLALHRSYLTPGDSSSGWTAGAAAYYVGYLQPRTFLLKYNENGTITDAVDCALDPLSETKCTLKSFTVEKGIYQTSNFRVQPTESIVRFPNITNLCPFGEVFNATRFASVYAWNRKRISNCVADYSVLYNSASFSTFKCYGVSPTKLNDLCFTNVYADSFVIRGDEVRQIAPGQTGKIADYNYKLPDDFTGCVIAWNSNNLDSKVGGNYNYLYRLFRKSNLKPFERDISTEIYQAGSTPCNGVEGFNCYFPLQSYGFQPTNGVGYQPYRVVVLSFELLHAPATVCGPKKSTNLVKNKCVNFNFNGLTGTGVLTESNKKFLPFQQFGRDIADTTDAVRDPQTLEILDITPCSFGGVSVITPGTNTSNQVAVLYQGVNCTEVPVAIHADQLTPTWRVYSTGSNVFQTRAGCLIGAEHVNNSYECDIPIGAGICASYQTQTNSPRRARSVASQSIIAYTMSLGAENSVAYSNNSIAIPTNFTISVTTEILPVSMTKTSVDCTMYICGDSTECSNLLLQYGSFCTQLNRALTGIAVEQDKNTQEVFAQVKQIYKTPPIKDFGGFNFSQILPDPSKPSKRSFIEDILFNKVTLADAGFIKQYGDCLGDIAARDLICAQKFNGLTVLPPLLTDEMIAQYTSALLAGTITSGWTFGAGAALQIPFAMQMAYRFNGCGVTQNVLYENQKLIANQFNSAIGKIQDSLSSTASALGKLQDVVNQNAQALNTLVKQLSSNFGAISSVLNDILSRLDKVEAEVQIDRLITGRLQSLQTYVTQQLIRAAEIRASANLAATKMSECVLGQSKRVDFCGKGCHLMSFPQSAPHGVVFLHVTYVPAQEKNFTTAPAICHDGKAHFPREGVFVSNGTHWFVTQRNFYEPQIITTDNTFVSGNCDVVIGIVNNTVYDPLQPELDSFKEELDKYFKNHTSPDVDLGDISGINASVVNIQKEIDRLNEVAKNLNESLIDLQELGKYEQYIKGGSGYIPEAPRDGQAYVRKDGEWVLLSTFL

SEQ ID NO: 6295 - protein, 1241 aa, Artificial Sequence
  SARS-CoV-2/Congo/158/2020__EPI_ISL_417950 spike protein (1-1211)(I909C_Y1047C) Foldon construct
MFVFLVLLPLVSSQCVNLTTRTQLPPAYTNSFTRGVYYPDKVFRSSVLHSTQDLFLPFFSNVTWFHAIHVSGTNGTKRFDNPVLPFNDGVYFASTEKSNIIRGWIFGTTLDSKTQSLLIVNNATNVVIKVCEFQFCNDPFLGVYYHKNNKSWMESEFRVYSSANNCTFEYVSQPFLMDLEGKQGNFKNLREFVFKNIDGYFKIYSKHTPINLVRDLPQGFSALEPLVDLPIGINITRFQTLLALHRSYLTPGDSSSGWTAGAAAYYVGYLQPRTFLLKYNENGTITDAVDCALDPLSETKCTLKSFTVEKGIYQTSNFRVQPTESIVRFPNITNLCPFGEVFNATRFASVYAWNRKRISNCVADYSVLYNSASFSTFKCYGVSPTKLNDLCFTNVYADSFVIRGDEVRQIAPGQTGKIADYNYKLPDDFTGCVIAWNSNNLDSKVGGNYNYLYRLFRKSNLKPFERDISTEIYQAGSTPCNGVEGFNCYFPLQSYGFQPTNGVGYQPYRVVVLSFELLHAPATVCGPKKSTNLVKNKCVNFNFNGLTGTGVLTESNKKFLPFQQFGRDIADTTDAVRDPQTLEILDITPCSFGGVSVITPGTNTSNQVAVLYQDVNCTEVPVAIHADQLTPTWRVYSTGSNVFQTRAGCLIGAEHVNNSYECDIPIGAGICASYQTQTNSPRRARSVASQSIIAYTMSLGAENSVAYSNNSIAIPTNFTISVTTEILPVSMTKTSVDCTMYICGDSTECSNLLLQYGSFCTQLNRALTGIAVEQDKNTQEVFAQVKQIYKTPPIKDFGGFNFSQILPDPSKPSKRSFIEDLLFNKVTLADAGFIKQYGDCLGDIAARDLICAQKFNGLTVLPPLLTDEMIAQYTSALLAGTITSGWTFGAGAALQIPFAMQMAYRFNGCGVTQNVLYENQKLIANQFNSAIGKIQDSLSSTASALGKLQDVVNQNAQALNTLVKQLSSNFGAISSVLNDILSRLDKVEAEVQIDRLITGRLQSLQTYVTQQLIRAAEIRASANLAATKMSECVLGQSKRVDFCGKGCHLMSFPQSAPHGVVFLHVTYVPAQEKNFTTAPAICHDGKAHFPREGVFVSNGTHWFVTQRNFYEPQIITTDNTFLSGNCDVVIGIVNNTVYDPLQPELDSFKEELDKYFKNHTSPDVDLGDISGINASVVNIQKEIDRLNEVAKNLNESLIDLQELGKYEQYIKGGSGYIPEAPRDGQAYVRKDGEWVLLSTFL

SEQ ID NO: 6296 - protein, 1241 aa, Artificial Sequence
  SARS-CoV-2/USA/UT-00034/2020__EPI_ISL_417977 spike protein (1-1211)(I909C_Y1047C) Foldon construct
MFVFLVLLPLVSSQCVNLTTRTQLPPAYTNSFTRGVYYPDKVFRSSVLHSTQDLFLPFFSNVTWFHAIHVSGTNGTKRFDNPVLPFNDGVYFASTEKSNIIRGWIFGTTLDSKTQSLLIVNNATNVVIKVCEFQFCNDPFLGVYYYKNNKSWMESEFRVYSSANNCTFEYVSQPFLMDLEGKQGNFKNLREFVFKNIDGYFKIYSKHTPINLVRDLPQGFSALEPLVDLPIGINITRFQTLLALHRSYLTPGDSSSGWTAGAAAYYVGYLQPRTFLLKYNENGTITDAVDCALDPLSETKCTLKSFTVEKGIYQTSNFRVQPTESIVRFPNITNLCPFGEVFNATRFASVYAWNRKRISNCVADYSVLYNSASFSTFKCYGVSPTKLNDLCFTNVYADSFVIRGDEVRQIAPGQTGKIADYNYKLPDDFTGCVIAWNSNNLDSKVGGNYNYLYRLFRKSNLKPFERDISTEIYQAGSTPCNGVEGFNCYFPLQSYGFQPTNGVGYQPYRVVVLSFELLHAPATVCGPKKSTNLVKNKCVNFNFNGLTGTGVLTESNKKFLPFQQFGRDIADTTDAVRDPQTLEILDITPCSFGGVSVITPGTNTSNQVAVLYQGVNCTEVPVAIHADQLTPTWRVYSTGSNVFQTRAGCLIGAEHVNNSYECDIPIGAGICASYQTQTNSPRRARSVASQSIIAYTMSLGAENSVAYSNNSIAIPTNFTISVTTEILPVSMTKTSVDCTMYICGDSTECSNLLLQYGSFCTQLNRALTGIAVEQDKNTQEVFAQVKQIYKTPPIKDFGGFNFSQILPDPSKPSKRSFIEDLLFNKVTLADAGFIKQYGDCLGDIAARDLICAQKFNGLTVLPPLLTDEMIAQYTSALLAGTITSGWTFGAGAALQIPFAMQMAYRFNGCGVTQNVLYENQKLIANQFNSAIGKIQDSLSSTASALGKLQDVVNQNAQALNTLVKQLSSNFGAISSVLNDILSRLDKVEAEVQIDRLITGRLQSLQTYVTQQLIRAAEIRASANLAATKMSECVLGQSKRVDFCGKGCHLMSFPQSAPHGVVFLHVTYVPAQEKNFTTAPAICHDGKAHFPREGVFVSNGTHWFVTQRNFYEPQIITTDNTFVSGNCDVVIGIVNNTVYDPLQPELDSFKEELDKYFKNHTSPDVDLGDISGINASVVNIQKEIDRLNEVAKNLNESLIDLQELGKYEQYIKGGSGYIPEAPRDGQAYVRKDGEWVLLSTFL

SEQ ID NO: 6297 - protein, 1241 aa, Artificial Sequence
  SARS-CoV-2/USA/UT-00033/2020__EPI_ISL_417976 spike protein (1-1211)(I909C_Y1047C) Foldon construct
MFVFLVLLPLVSSQCVNLTTRTQLPPAYTNSFTRGVYYPDKVFRSSVLHSTQDLFLPFFSNVTWFHAIHVSGTNGTKRFDNPVLPFNDGVYFASTEKSNIIRGWIFGTTLDSKTQSLLIVNNATNVVIKVCEFQFCNDPFLGVYYHKNNKSWMESEFRVYSSANNCTFEYVSQPFLMDLEGKQGNFKNLREFVFKNIDGYFKIYSKHTPINLVRDLPQGFSALEPLVDLPIGINITRFQTLLALHRSYLTPGDSSSGLTAGAAAYYVGYLQPRTFLLKYNENGTITDAVDCALDPLSETKCTLKSFTVEKGIYQTSNFRVQPTESIVRFPNITNLCPFGEVFNATRFASVYAWNRKRISNCVADYSVLYNSASFSTFKCYGVSPTKLNDLCFTNVYADSFVIRGDEVRQIAPGQTGKIADYNYKLPDDFTGCVIAWNSNNLDSKVGGNYNYLYRLFRKSNLKPFERDISTEIYQAGSTPCNGVEGFNCYFPLQSYGFQPTNGVGYQPYRVVVLSFELLHAPATVCGPKKSTNLVKNKCVNFNFNGLTGTGVLTESNKKFLPFQQFGRDIADTTDAVRDPQTLEILDITPCSFGGVSVITPGTNTSNQVAVLYQGVNCTEVPVAIHADQLTPTWRVYSTGSNVFQTRAGCLIGAEHVNNSYECDIPIGAGICASYQTQTNSPRRARSVASQSIIAYTMSLGAENSVAYSNNSIAIPTNFTISVTTEILPVSMTKTSVDCTMYICGDSTECSNLLLQYGSFCTQLNRALTGIAVEQDKNTQEVFAQVKQIYKTPPIKDFGGFNFSQILPDPSKPSKRSFIEDLLFNKVTLADAGFIKQYGDCLGDIAARDLICAQKFNGLTVLPPLLTDEMIAQYTSALLAGTITSGWTFGAGAALQIPFAMQMAYRFNGCGVTQNVLYENQKLIANQFNSAIGKIQDSLSSTASALGKLQDVVNQNAQALNTLVKQLSSNFGAISSVLNDILSRLDKVEAEVQIDRLITGRLQSLQTYVTQQLIRAAEIRASANLAATKMSECVLGQSKRVDFCGKGCHLMSFPQSAPHGVVFLHVTYVPAQEKNFTTAPAICHDGKAHFPREGVFVSNGTHWFVTQRNFYEPQIITTDNTFVSGNCDVVIGIVNNTVYDPLQPELDSFKEELDKYFKNHTSPDVDLGDISGINASVVNIQKEIDRLNEVAKNLNESLIDLQELGKYEQYIKGGSGYIPEAPRDGQAYVRKDGEWVLLSTFL

SEQ ID NO: 6298 - protein, 1241 aa, Artificial Sequence
  SARS-CoV-2/USA/WI-13/2020__EPI_ISL_417516 spike protein (1-1211)(I909C_Y1047C) Foldon construct
MFVFLVLLPLVSSQCVNLTTRTQLPPAYTNSFTRGVYYPDKVFRSSVLHSTQDLFLPFFSNVTWFHAIHVSGTNGTKRFDNPVLPFNDGVYFASTEKSNIIRGWIFGTTLDSKTQSLLIVNNATNVVIKVCEFQFCNDPFLGVYYHKNNKSWMESEFRVYSSANNCTFEYVSQPFLMDLEGKQGNFKNLREFVFKNIDGYFKIYSKHTPINLVRDLPQGFSALEPLVDLPIGINITRFQTLLALHRSYLTPGDSSSGWTAGAAAYYVGYLQPRTFLLKYNENGTITDAVDCALDPLSETKCTLKSFTVEKGIYQTSNFRVLPTESIVRFPNITNLCPFGEVFNATRFASVYAWNRKRISNCVADYSVLYNSASFSTFKCYGVSPTKLNDLCFTNVYADSFVIRGDEVRQIAPGQTGKIADYNYKLPDDFTGCVIAWNSNNLDSKVGGNYNYLYRLFRKSNLKPFERDISTEIYQAGSTPCNGVEGFNCYFPLQSYGFQPTNGVGYQPYRVVVLSFELLHAPATVCGPKKSTNLVKNKCVNFNFNGLTGTGVLTESNKKFLPFQQFGRDIADTTDAVRDPQTLEILDITPCSFGGVSVITPGTNTSNQVAVLYQGVNCTEVPVAIHADQLTPTWRVYSTGSNVFQTRAGCLIGAEHVNNSYECDIPIGAGICASYQTQTNSPRRARSVASQSIIAYTMSLGAENSVAYSNNSIAIPTNFTISVTTEILPVSMTKTSVDCTMYICGDSTECSNLLLQYGSFCTQLNRALTGIAVEQDKNTQEVFAQVKQIYKTPPIKDFGGFNFSQILPDPSKPSKRSFIEDLLFNKVTLADAGFIKQYGDCLGDIAARDLICAQKFNGLTVLPPLLTDEMIAQYTSALLAGTITSGWTFGAGAALQIPFAMQMAYRFNGCGVTQNVLYENQKLIANQFNSAIGKIQDSLSSTASALGKLQDVVNQNAQALNTLVKQLSSNFGAISSVLNDILSRLDKVEAEVQIDRLITGRLQSLQTYVTQQLIRAAEIRASANLAATKMSECVLGQSKRVDFCGKGCHLMSFPQSAPHGVVFLHVTYVPAQEKNFTTAPAICHDGKAHFPREGVFVSNGTHWFVTQRNFYEPQIITTDNTFVSGNCDVVIGIVNNTVYDPLQPELDSFKEELDKYFKNHTSPDVDLGDISGINASVVNIQKEIDRLNEVAKNLNESLIDLQELGKYEQYIKGGSGYIPEAPRDGQAYVRKDGEWVLLSTFL

SEQ ID NO: 6299 - protein, 1240 aa, Artificial Sequence
  SARS-CoV-2/India/1-27/2020__EPI_ISL_413522 spike protein (1-1210)(I908C_Y1046C) Foldon construct
MFVFLVLLPLVSSQCVNLTTRTQLPPAYTNSFTRGVYYPDKVFRSSVLHSTQDLFLPFFSNVTWFHAIHVSGTNGTKRFDNPVLPFNDGVYFASTEKSNIIRGWIFGTTLDSKTQSLLIVNNATNVVIKVCEFQFCNDPFLGVYHKNNKSWMESEFRVYSSANNCTFEYVSQPFLMDLEGKQGNFKNLREFVFKNIDGYFKIYSKHTPINLVRDLPQGFSALEPLVDLPIGINITRFQTLLALHRSYLTPGDSSSGWTAGAAAYYVGYLQPRTFLLKYNENGTITDAVDCALDPLSETKCTLKSFTVEKGIYQTSNFRVQPTESIVRFPNITNLCPFGEVFNATRFASVYAWNRKRISNCVADYSVLYNSASFSTFKCYGVSPTKLNDLCFTNVYADSFVIRGDEVIQIAPGQTGKIADYNYKLPDDFTGCVIAWNSNNLDSKVGGNYNYLYRLFRKSNLKPFERDISTEIYQAGSTPCNGVEGFNCYFPLQSYGFQPTNGVGYQPYRVVVLSFELLHAPATVCGPKKSTNLVKNKCVNFNFNGLTGTGVLTESNKKFLPFQQFGRDIADTTDAVRDPQTLEILDITPCSFGGVSVITPGTNTSNQVAVLYQDVNCTEVPVAIHADQLTPTWRVYSTGSNVFQTRAGCLIGAEHVNNSYECDIPIGAGICASYQTQTNSPRRARSVASQSIIAYTMSLGAENSVAYSNNSIAIPTNFTISVTTEILPVSMTKTSVDCTMYICGDSTECSNLLLQYGSFCTQLNRALTGIAVEQDKNTQEVFAQVKQIYKTPPIKDFGGFNFSQILPDPSKPSKRSFIEDLLFNKVTLADAGFIKQYGDCLGDIAARDLICAQKFNGLTVLPPLLTDEMIAQYTSALLAGTITSGWTFGAGAALQIPFAMQMAYRFNGCGVTQNVLYENQKLIANQFNSAIGKIQDSLSSTASALGKLQDVVNQNAQALNTLVKQLSSNFGAISSVLNDILSRLDKVEAEVQIDRLITGRLQSLQTYVTQQLIRAAEIRASANLAATKMSECVLGQSKRVDFCGKGCHLMSFPQSAPHGVVFLHVTYVPAQEKNFTTAPAICHDGKAHFPREGVFVSNGTHWFVTQRNFYEPQIITTDNTFVSGNCDVVIGIVNNTVYDPLQPELDSFKEELDKYFKNHTSPDVDLGDISGINASVVNIQKEIDRLNEVAKNLNESLIDLQELGKYEQYIKGGSGYIPEAPRDGQAYVRKDGEWVLLSTFL

SEQ ID NO: 6300 - protein, 1235 aa, Artificial Sequence
  SARS-CoV-2/pangolin/Guangxi/P4L/2017__EPI_ISL_410538 spike protein (1-1205)(I903C_Y1041C) Foldon construct
MFVFLFVLPLVSSQCVNLTTRTGIPPGYTNSSTRGVYYPDKVFRSSILHLTQDLFLPFFSNVTWFNTINYQGGFKKFDNPVLPFNDGVYFASTEKSNIIRGWIFGTTLDARTQSLLIVNNATNVVIKVCEFQFCTDPFLGVYYHNNNKTWVENEFRVYSSANNCTFEYISQPFLMDLEGKQGNFKNLREFVFKNVDGYFKIYSKHTPIDLVRDLPRGFAALEPLVDLPIGINITRFQTLLALHRSYLTPGNLESGWTTGAAAYYVGYLQQRTFLLSYNQNGTITDAVDCSLDPLSETKCTLKSLTVEKGIYQTSNFRVQPTISIVRFPNITNLCPFGEVFNASKFASVYAWNRKRISNCVADYSVLYNSTSFSTFKCYGVSPTKLNDLCFTNVYADSFVVKGDEVRQIAPGQTGVIADYNYKLPDDFTGCVIAWNSVKQDALTGGNYGYLYRLFRKSKLKPFERDISTEIYQAGSTPCNGQVGLNCYYPLERYGFHPTTGVNYQPFRVVVLSFELLNGPATVCGPKLSTTLVKDKCVNFNFNGLTGTGVLTTSKKQFLPFQQFGRDISDTTDAVRDPQTLEILDITPCSFGGVSVITPGTNTSNQVAVLYQDVNCTEVPMAIHAEQLTPAWRVYSAGANVFQTRAGCLVGAEHVNNSYECDIPVGAGICASYHSMSSLRSVNQRSIIAYTMSLGAENSVAYSNNSIAIPTNFTISVTTEILPVSMTKTSVDCTMYICGDSIECSNLLLQYGSFCTQLNRALTGIAVEQDKNTQEVFAQVKQIYKTPPIKDFGGFNFSQILPDPSKPSKRSFIEDLLFNKVTLADAGFIKQYGDCLGDIAARDLICAQKFNGLTVLPPLLTDEMIAQYTSALLAGTITSGWTFGAGAALQIPFAMQMAYRFNGCGVTQNVLYENQKLIANQFNSAIGKIQDSLSSTASALGKLQDVVNQNAQALNTLVKQLSSNFGAISSVLNDILSRLDKVEAEVQIDRLITGRLQSLQTYVTQQLIRAAEIRASANLAATKMSECVLGQSKRVDFCGKGCHLMSFPQSAPHGVVFLHVTYVPAQEKNFTTAPAICHEGKAHFPREGVFVSNGTHWFITQRNFYEPQIITTDNTFVSGSCDVVIGIVNNTVYDPLQPELDSFKEELDKYFKNHTSPDVDLGDISGINASVVNIQKEIDRLNEVAKNLNESPIDLQELGKYEQYIKGGSGYIPEAPRDGQAYVRKDGEWVLLSTFL

SEQ ID NO: 6301 - protein, 1235 aa, Artificial Sequence
  SARS-CoV-2/pangolin/Guangxi/P5L/2017__EPI_ISL_410540 spike protein (1-1205)(I903C_Y1041C) Foldon construct
MFVFLFVLPLVSSQCVNLTTRTGIPPGYTNSSTRGVYYPDKVFRSSILHLTQDLFLPFFSNVTWFNTINYQGGFKKFDNPVLPFNDGVYFASTEKSNIIRGWIFGTTLDARTQSLLIVNNATNVVIKVCEFQFCTDPFLGVYYHNNNKTWVENEFRVYSSANNCTFEYISQPFLMDLEGKQGNFKNLREFVFKNVDGYFKIYSKHTPIDLVRDLPRGFAALEPLVDLPIGINITRFQTLLALHRSYLTPGKLESGWTTGAAAYYVGYLQQRTFLLSYNQNGTITDAVDCSLDPLSETKCTLKSLTVEKGIYQTSNFRVQPTISIVRFPNITNLCPFGEVFNASKFASVYAWNRKRISNCVADYSVLYNSTSFSTFKCYGVSPTKLNDLCFTNVYADSFVVKGDEVRQIAPGQTGVIADYNYKLPDDFTGCVIAWNSVKQDALTGGNYGYLYRLFRKSKLKPFERDISTEIYQAGSTPCNGQVGLNCYYPLERYGFHPTTGVNYQPFRVVVLSFELLNGPATVCGPKLSTTLVKDKCVNFNFNGLTGTGVLTTSKKQFLPFQQFGRDISDTTDAVRDPQTLEILDITPCSFGGVSVITPGTNTSNQVAVLYQDVNCTEVPMAIHAEQLTPAWRVYSAGANVFQTRAGCLVGAEHVNNSYECDIPVGAGICASYHSMSSFRSVNQRSIIAYTMSLGAENSVAYSNNSIAIPTNFTISVTTEILPVSMTKTSVDCTMYICGDSIECSNLLLQYGSFCTQLNRALTGIAVEQDKNTQEVFAQVKQIYKTPPIKDFGGFNFSQILPDPSKPSKRSFIEDLLFNKVTLADAGFIKQYGDCLGDIAARDLICAQKFNGLTVLPPLLTDEMIAQYTSALLAGTITSGWTFGAGAALQIPFAMQMAYRFNGCGVTQNVLYENQKLIANQFNSAIGKIQDSLSSTASALGKLQDVVNQNAQALNTLVKQLSSNFGAISSVLNDILSRLDKVEAEVQIDRLITGRLQSLQTYVTQQLIRAAEIRASANLAATKMSECVLGQSKRVDFCGKGCHLMSFPQSAPHGVVFLHVTYVPAQEKNFTTAPAICHEGKAHFPREGVFVSNGTHWFITQRNFYEPQIITTDNTFVSGSCDVVIGIVNNTVYDPLQPELDSFKEELDKYFKNHTSPDVDLGDISGINASVVNIQKEIDRLNEVAKNLNESLIDLQELGKYEQYIKGGSGYIPEAPRDGQAYVRKDGEWVLLSTFL

SEQ ID NO: 6302 - protein, 1235 aa, Artificial Sequence
  SARS-CoV-2/pangolin/Guangxi/P5E/2017__EPI_ISL_410541 spike protein (1-1205)(I903C_Y1041C) Foldon construct
MFVFLFVLPLVSSQCVNLTTRTGIPPGYTNSSTRGVYYPDKVFRSSILHLTQDLFLPFFSNVTWFNTITYQGGSKKFDNPVLPFNDGVYFASTEKSNIIRGWIFGTTLDARTQSLLIVNNATNVVIKVCEFQFCTDPFLGVYYHNNNKTWVENEFRVYSSANNCTFEYISQPFLMDLEGKQGNFKNLREFVFKNVDGYFKIYSKHTPIDLVRDLPRGFAALEPLVDLPIGINITRFQTLLALHRSYLTPGKLESGWTTGAAAYYVGYLQQRTFLLSYNQNGTITDAVDCSLDPLSETKCTLKSLTVEKGIYQTSNFRVQPTISIVRFPNITNLCPFGEVFNASKFASVYAWNRKRISNCVADYSVLYNSTSFSTFKCYGVSPTKLNDLCFTNVYADSFVVKGDEVRQIAPGQTGVIADYNYKLPDDFTGCVIAWNSVKQDALTGDNYGYLYRLFRKSKLKPFERDISTEIYQAGSTPCNGQVGLNCYYPLERYGFHPTTGVNYQPFRVVVLSFELLNGPATVCGPKLSTTLVKDKCVNFNFNGLTGTGVLTTSKKQFLPFQQFGRDISDTTDAVRDPQTLEILDITPCSFGGVSVITPGTNTSNQVAVLYQDVNCTEVPMAIHAEQLTPAWRVYSAGANVFQTRAGCLVGAEHVNNSYECDIPVGAGICASYHSMSSFRSVNQRSIIAYTMSLGAENSVAYSNNSIAIPTNFTISVTTEILPVSMTKTSVDCTMYICGDSIECSNLLLQYGSFCTQLNRALTGIAVEQDKNTQEVFAQVKQIYKTPPIKDFGGFNFSQILPDPSKPSKRSFIEDLLFNKVTLADAGFIKQYGDCLGDIAARDLICAQKFNGLTVLPPLLTDEMIAQYTSALLAGTITSGWTFGAGAALQIPFAMQMAYRFNGCGVTQNVLYENQKLIANQFNSAIGKIQDSLSSTASALGKLQDVVNQNAQALNTLVKQLSSNFGAISSVLNDILSRLDKVEAEVQIDRLITGRLQSLQTYVTQQLIRAAEIRASANLAATKMSECVLGQSKRVDFCGKGCHLMSFPQSAPHGVVFLHVTYVPAQEKNFTTAPAICHEGKAHFPREGVFVSNGTHWFITQRNFYEPQIITTDNTFVSGSCDVVIGIVNNTVYDPLQPELDSFKEELDKYFKNHTSPDVDLGDISGINASVVNIQKEIDRLNEVAKNLNESLIDLQELGKYEQYIKGGSGYIPEAPRDGQAYVRKDGEWVLLSTFL

SEQ ID NO: 6303 - protein, 1233 aa, Artificial Sequence
  SARS-CoV-2/pangolin/Guangxi/P1E/2017__EPI_ISL_410539 spike protein (1-1203)(I901C_Y1039C) Foldon construct
MFVFLFVLPLVSSQCVNLTTRTGIQPGYTNSSTRGVYYPDKVFRSSILHLTQDLFLPFFSNVTWFNTINYQGGFKKFDNPVLPFNDGVYFASTEKSNIIRGWIFGTTLDARTQSLLIVNNATNVVIKVCEFQFCTDPFLGVYYHNNNKTWVENEFRVYSSANNCTFEYISQPFLMDLEGKQGNFKNLREFVFKNVDGYFKIYSKHTPIDLVRDLPRGFAALEPLVDLPIGINITRFQTLLALHRSYLTPGKLESGWTTGAAAYYVGYLQQRTFLLSYNQNGTITDAVDCSLDPLSETKCTLKSLTVEKGIYQTSNFRVQPTISIVRFPNITNLCPFGEVFNASKFASVYAWNRKRISNCVADYSVLYNSTSFSTFKCYGVSPTKLNDLCFTNVYADSFVVKGDEVRQIAPGQTGVIADYNYKLPDDFTGCVIAWNSVKQDALTGGNYLYRLFRKSKLKPFERDISTEIYQAGSTPCNGQVGLNCYYPLERYGFHPTTGVNYQPFRVVVLSFELLNGPATVCGPKLSTTLVKDKCVNFNFNGLTGTGVLTTSKKQFLPFQQFGRDISDTTDAVRDPQTLEILDITPCSFGGVSVITPGTNTSNQVAVLYQDVNCTEVPMAIHAEQLTPAWRVYSAGANVFQTRAGCLVGAEHVNNSYECDIPVGAGICASYHSMSSLRSVNQRSIIAYTMSLGAENSVAYSNNSIAIPTNFTISVTTEILPVSMTKTSVDCTMYICGDSIECSNLLLQYGSFCTQLNRALTGIAVEQDKNTQEVFAQVKQIYKTPPIKDFGGFNFSQILPDPSKPSKRSFIEDLLFNKVTLADAGFIKQYGDCLGDIAARDLICAQKFNGLTVLPPLLTDEMIAQYTSALLAGTITSGWTFGAGAALQIPFAMQMAYRFNGCGVTQNVLYENQKLIANQFNSAIGKIQDSLSSTASALGKLQDVVNQNAQALNTLVKQLSSNFGAISSVLNDILSRLDKVEAEVQIDRLITGRLQSLQTYVTQQLIRAAEIRASANLAATKMSECVLGQSKRVDFCGKGCHLMSFPQSAPHGVVFLHVTYVPAQEKNFTTAPAICHEGKAHFPREGVFVSNGTHWFITQRNFYEPQIITTDNTFVSGSCDVVIGIVNNTVYDPLQPELDSFKEELDKYFKNHTSPDVDLGDISGINASVVNIQKEIDRLNEVAKNLNESLIDLQELGKYEQYIKGGSGYIPEAPRDGQAYVRKDGEWVLLSTFL

SEQ ID NO: 6304 - protein, 1241 aa, Artificial Sequence
  SARS-CoV-2/Wuhan/WIV05/2019__EPI_ISL_402128 spike protein (1-1211)(Q965C_S1003C) Foldon construct
MFVFLVLLPLVSSQCVNLTTRTQLPPAYTNSFTRGVYYPDKVFRSSVLHSTQDLFLPFFSNVTWFHAIHVSGTNGTKRFDNPVLPFNDGVYFASTEKSNIIRGWIFGTTLDSKTQSLLIVNNATNVVIKVCEFQFCNDPFLGVYYHKNNKSWMESEFRVYSSANNCTFEYVSQPFLMDLEGKQGNFKNLREFVFKNIDGYFKIYSKHTPINLVRDLPQGFSALEPLVDLPIGINITRFQTLLALHRSYLTPGDSSSGWTAGAAAYYVGYLQPRTFLLKYNENGTITDAVDCALDPLSETKCTLKSFTVEKGIYQTSNFRVQPTESIVRFPNITNLCPFGEVFNATRFASVYAWNRKRISNCVADYSVLYNSASFSTFKCYGVSPTKLNDLCFTNVYADSFVIRGDEVRQIAPGQTGKIADYNYKLPDDFTGCVIAWNSNNLDSKVGGNYNYLYRLFRKSNLKPFERDISTEIYQAGSTPCNGVEGFNCYFPLQSYGFQPTNGVGYQPYRVVVLSFELLHAPATVCGPKKSTNLVKNKCVNFNFNGLTGTGVLTESNKKFLPFQQFGRDIADTTDAVRDPQTLEILDITPCSFGGVSVITPGTNTSNQVAVLYQDVNCTEVPVAIHADQLTPTWRVYSTGSNVFQTRAGCLIGAEHVNNSYECDIPIGAGICASYQTQTNSPRRARSVASQSIIAYTMSLGAENSVAYSNNSIAIPTNFTISVTTEILPVSMTKTSVDCTMYICGDSTECSNLLLQYGSFCTQLNRALTGIAVEQDKNTQEVFAQVKQIYKTPPIKDFGGFNFSQILPDPSKPSKRSFIEDLLFNKVTLADAGFIKQYGDCLGDIAARDLICAQKFNGLTVLPPLLTDEMIAQYTSALLAGTITSGWTFGAGAALQIPFAMQMAYRFNGIGVTQNVLYENQKLIANQFNSAIGKIQDSLSSTASALGKLQDVVNQNAQALNTLVKCLSSNFGAISSVLNDILSRLDKVEAEVQIDRLITGRLQCLQTYVTQQLIRAAEIRASANLAATKMSECVLGQSKRVDFCGKGYHLMSFPQSAPHGVVFLHVTYVPAQEKNFTTAPAICHDGKAHFPREGVFVSNGTHWFVTQRNFYEPQIITTDNTFVSGNCDVVIGIVNNTVYDPLQPELDSFKEELDKYFKNHTSPDVDLGDISGINASVVNIQKEIDRLNEVAKNLNESLIDLQELGKYEQYIKGGSGYIPEAPRDGQAYVRKDGEWVLLSTFL

SEQ ID NO: 6305 - protein, 1237 aa, Artificial Sequence
  SARS-CoV-2/bat/Yunnan/RaTG13/2013__EPI_ISL_402131 spike protein (1-1207)(Q961C_S999C) Foldon construct
MFVFLVLLPLVSSQCVNLTTRTQLPPAYTNSSTRGVYYPDKVFRSSVLHLTQDLFLPFFSNVTWFHAIHVSGTNGIKRFDNPVLPFNDGVYFASTEKSNIIRGWIFGTTLDSKTQSLLIVNNATNVVIKVCEFQFCNDPFLGVYYHKNNKSWMESEFRVYSSANNCTFEYVSQPFLMDLEGKQGNFKNLREFVFKNIDGYFKIYSKHTPINLVRDLPPGFSALEPLVDLPIGINITRFQTLLALHRSYLTPGDSSSGWTAGAAAYYVGYLQPRTFLLKYNENGTITDAVDCALDPLSETKCTLKSFTVEKGIYQTSNFRVQPTDSIVRFPNITNLCPFGEVFNATTFASVYAWNRKRISNCVADYSVLYNSTSFSTFKCYGVSPTKLNDLCFTNVYADSFVITGDEVRQIAPGQTGKIADYNYKLPDDFTGCVIAWNSKHIDAKEGGNFNYLYRLFRKANLKPFERDISTEIYQAGSKPCNGQTGLNCYYPLYRYGFYPTDGVGHQPYRVVVLSFELLNAPATVCGPKKSTNLVKNKCVNFNFNGLTGTGVLTESNKKFLPFQQFGRDIADTTDAVRDPQTLEILDITPCSFGGVSVITPGTNASNQVAVLYQDVNCTEVPVAIHADQLTPTWRVYSTGSNVFQTRAGCLIGAEHVNNSYECDIPIGAGICASYQTQTNSRSVASQSIIAYTMSLGAENSVAYSNNSIAIPTNFTISVTTEILPVSMTKTSVDCTMYICGDSTECSNLLLQYGSFCTQLNRALTGIAVEQDKNTQEVFAQVKQIYKTPPIKDFGGFNFSQILPDPSKPSKRSFIEDLLFNKVTLADAGFIKQYGDCLGDIAARDLICAQKFNGLTVLPPLLTDEMIAQYTSALLAGTITSGWTFGAGAALQIPFAMQMAYRFNGIGVTQNVLYENQKLIANQFNSAIGKIQDSLSSTASALGKLQDVVNQNAQALNTLVKCLSSNFGAISSVLNDILSRLDKVEAEVQIDRLITGRLQCLQTYVTQQLIRAAEIRASANLAATKMSECVLGQSKRVDFCGKGYHLMSFPQSAPHGVVFLHVTYVPAQEKNFTTAPAICHDGKAHFPREGVFVSNGTHWFVTQRNFYEPQIITTDNTFVSGSCDVVIGIVNNTVYDPLQPELDSFKEELDKYFKNHTSPDVDLGDISGINASVVNIQKEIDRLNEVAKNLNESLIDLQELGKYEQYIKGGSGYIPEAPRDGQAYVRKDGEWVLLSTFL

SEQ ID NO: 6306 - protein, 1241 aa, Artificial Sequence
  SARS-CoV-2/Wuhan/HBCDC-HB-01/2019__EPI_ISL_402132 spike protein (1-1211)(Q965C_S1003C) Foldon construct
MFVFLVLLPLVSSQCVNLTTRTQLPPAYTNSITRGVYYPDKVFRSSVLHSTQDLFLPFFSNVTWFHAIHVSGTNGTKRFDNPVLPFNDGVYFASTEKSNIIRGWIFGTTLDSKTQSLLIVNNATNVVIKVCEFQFCNDPFLGVYYHKNNKSWMESEFRVYSSANNCTFEYVSQPFLMDLEGKQGNFKNLREFVFKNIDGYFKIYSKHTPINLVRDLPQGFSALEPLVDLPIGINITRFQTLLALHRSYLTPGDSSSGWTAGAAAYYVGYLQPRTFLLKYNENGTITDAVDCALDPLSETKCTLKSFTVEKGIYQTSNFRVQPTESIVRFPNITNLCPFGEVFNATRFASVYAWNRKRISNCVADYSVLYNSASFSTFKCYGVSPTKLNDLCFTNVYADSFVIRGDEVRQIAPGQTGKIADYNYKLPDDFTGCVIAWNSNNLDSKVGGNYNYLYRLFRKSNLKPFERDISTEIYQAGSTPCNGVEGFNCYFPLQSYGFQPTNGVGYQPYRVVVLSFELLHAPATVCGPKKSTNLVKNKCVNFNFNGLTGTGVLTESNKKFLPFQQFGRDIADTTDAVRDPQTLEILDITPCSFGGVSVITPGTNTSNQVAVLYQDVNCTEVPVAIHADQLTPTWRVYSTGSNVFQTRAGCLIGAEHVNNSYECDIPIGAGICASYQTQTNSPRRARSVASQSIIAYTMSLGAENSVAYSNNSIAIPTNFTISVTTEILPVSMTKTSVDCTMYICGDSTECSNLLLQYGSFCTQLNRALTGIAVEQDKNTQEVFAQVKQIYKTPPIKDFGGFNFSQILPDPSKPSKRSFIEDLLFNKVTLADAGFIKQYGDCLGDIAARDLICAQKFNGLTVLPPLLTDEMIAQYTSALLAGTITSGWTFGAGAALQIPFAMQMAYRFNGIGVTQNVLYENQKLIANQFNSAIGKIQDSLSSTASALGKLQDVVNQNAQALNTLVKCLSSNFGAISSVLNDILSRLDKVEAEVQIDRLITGRLQCLQTYVTQQLIRAAEIRASANLAATKMSECVLGQSKRVDFCGKGYHLMSFPQSAPHGVVFLHVTYVPAQEKNFTTAPAICHDGKAHFPREGVFVSNGTHWFVTQRNFYEPQIITTDNTFVSGNCDVVIGIVNNTVYDPLQPELDSFKEELDKYFKNHTSPDVDLGDISGINASVVNIQKEIDRLNEVAKNLNESLIDLQELGKYEQYIKGGSGYIPEAPRDGQAYVRKDGEWVLLSTFL

SEQ ID NO: 6307 - protein, 1241 aa, Artificial Sequence
  SARS-CoV-2/Guangdong/20SF028/2020__EPI_ISL_403936 spike protein (1-1211)(Q965C_S1003C) Foldon construct
MFVFLVLLPLVSSQCVNLTTRTQLPPAYTNSFTRGVYYPDKVFRSSVLYSTQDLFLPFFSNVTWFHAIHVSGTNGTKRFDNPVLPFNDGVYFASTEKSNIIRGWIFGTTLDSKTQSLLIVNNATNVVIKVCEFQFCNDPFLGVYYHKNNKSWMESEFRVYSSANNCTFEYVSQPFLMDLEGKQGNFKNLREFVFKNIDGYFKIYSKHTPINLVRDLPQGFSALEPLVDLPIGINITRFQTLLALHRSYLTPGDSSSGWTAGAAAYYVGYLQPRTFLLKYNENGTITDAVDCALDPLSETKCTLKSFTVEKGIYQTSNFRVQPTESIVRFPNITNLCPFGEVFNATRFASVYAWNRKRISNCVADYSVLYNSASFSTFKCYGVSPTKLNDLCFTNVYADSFVIRGDEVRQIAPGQTGKIADYNYKLPDDFTGCVIAWNSNNLDSKVGGNYNYLYRLFRKSNLKPFERDISTEIYQAGSTPCNGVEGFNCYFPLQSYGFQPTNGVGYQPYRVVVLSFELLHAPATVCGPKKSTNLVKNKCVNFNFNGLTGTGVLTESNKKFLPFQQFGRDIADTTDAVRDPQTLEILDITPCSFGGVSVITPGTNTSNQVAVLYQDVNCTEVPVAIHADQLTPTWRVYSTGSNVFQTRAGCLIGAEHVNNSYECDIPIGAGICASYQTQTNSPRRARSVASQSIIAYTMSLGAENSVAYSNNSIAIPTNFTISVTTEILPVSMTKTSVDCTMYICGDSTECSNLLLQYGSFCTQLNRALTGIAVEQDKNTQEVFAQVKQIYKTPPIKDFGGFNFSQILPDPSKPSKRSFIEDLLFNKVTLADAGFIKQYGDCLGDIAARDLICAQKFNGLTVLPPLLTDEMIAQYTSALLAGTITSGWTFGAGAALQIPFAMQMAYRFNGIGVTQNVLYENQKLIANQFNSAIGKIQDSLSSTASALGKLQDVVNQNAQALNTLVKCLSSNFGAISSVLNDILSRLDKVEAEVQIDRLITGRLQCLQTYVTQQLIRAAEIRASANLAATKMSECVLGQSKRVDFCGKGYHLMSFPQSAPHGVVFLHVTYVPAQEKNFTTAPAICHDGKAHFPREGVFVSNGTHWFVTQRNFYEPQIITTDNTFVSGNCDVVIGIVNNTVYDPLQPELDSFKEELDKYFKNHTSPDVDLGDISGINASVVNIQKEIDRLNEVAKNLNESLIDLQELGKYEQYIKGGSGYIPEAPRDGQAYVRKDGEWVLLSTFL

SEQ ID NO: 6308 - protein, 1241 aa, Artificial Sequence
  SARS-CoV-2/Shenzhen/SZTH-001/2020__EPI_ISL_406592 spike protein (1-1211)(Q965C_S1003C) Foldon construct
MFVFLVLLPLVSSQCVNLTTRTQLPPAYTNSFTRGVYYPDKVFRSSVLHSTQDLFLPFFSNVTWFHAIHVSGTNGTKRFDNPVLPFNDGVYFASTEKSNIIRGWIFGTTLDSKTQSLLIVNNATNVVIKVCEFQFCNDPFLGVYYHKNNKSWMESEFRVYSSANNCTFEYVSQPFLMDLEGKQGNFKNLREFVFKNIDGYFKIYSKHTPINLVRDLPQGFSALEPLVDLPIGINITRFQTLLALHRSYLTPGDSSSGWTAGAAAYYVGYLQPRTFLLKYNENGTITDAVDCALDPLSETKCTLKSFTVEKGIYQTSNFRVQPTESIVRFPNITNLCPFGEVFNATRFASVYAWNRKRISNCVADYSVLYNSASFSTFKCYGVSPTKLNDLCFTNVYADSFVIRGDEVRQIAPGQTGKIADYNYKLPDDFTGCVIAWNSNNLDSKVGGNYNYLYRLFRKSNLKPFERDISTEIYQAGSTPCNGVEGFNCYFPLQSYGFQPTNGVGYQPYRVVVLSFELLHAPATVCGPKKSTNLVKNKCVNFNFNGLTGTGVLTESNKKFLPFQQFGRDIADTTDAVRDPQTLEILDITPCSFGGVSVITPGTNTSNQVAVLYQDVNCTEVPVAIHADQLTPTWRVYSTGSNVFQTRAGCLIGAEHVNNSYECDIPIGAGICASYQTQTNSPRRARSVASQSIIAYTMSLGAENSVAYSNNSIAIPTNFTISVTTEILPVSMTKTSVDCTMYICGDSTECSNLLLQYGSFCTQLNRALTGIAVEQDKNTQEVFAQVKQIYKTPPIKDFGGFNFSQILPDPSKPSKRSFIEDLLFNKVTLADAGFIKQYGDCLGDIAARDLICAQKFNGLTVLPPLLTDEMIAQYTSALLAGTITSGWTFGAGAALQIPFAMQMAYRFNGIGVTQNVLYENQKLIANQFNSAIGKIQDSLSSTASALGKLQDVVNQNAQALNTLVKCLSSNFGAISSVLNDILSRLDKVEAEVQIDRLITGRLQCLQTYVTQQLIRAAEIRASANLAATKMSECVLGQSKRVDFCGKGYHLMSFPQSAPHGVVFLHVTYVPAQEKNFTTAPAICHDGKAHFPREGVFVSNGTHWFVTQRNFYEPQIITTDNTFVSGNCDVLIGIVNNTVYDPLQPELDSFKEELDKYFKNHTSPDVDLGDISGINASVVNIQKEIDRLNEVAKNLNESLIDLQELGKYEQYIKGGSGYIPEAPRDGQAYVRKDGEWVLLSTFL

SEQ ID NO: 6309 - protein, 1241 aa, Artificial Sequence
  SARS-CoV-2/Shenzhen/SZTH-004/2020__EPI_ISL_406595 spike protein (1-1211)(Q965C_S1003C) Foldon construct
MFVFLVLLPLVSSQCVNLTTRTQLPPAYTNSFTRGVYYPDKVFRSSVLHSTQDLFLPFFSNVTWFHAIHVSGTNGTKRFDNPVLPFNDGVYFASTEKSNIIRGWIFGTTLDSKTQSLLIVNNATNVVIKVCEFQFCNDPFLGVYYHKNNKSWMESEFRVYSSANNCTFEYVSQPFLMDLEGKQGNFKNLREFVFKNIDGYFKIYSKHTPINLVRDLPQGFSALEPLVDLPIGINITRFQTLLALHRSYLTPGDSSSGWTAGAAAYYVGYLQPRTFLLKYNENGTITDAVDCALDPLSETKCTLKSFTVEKGIYQTSNFRVQPTESIVRFPNITNLCPFGEVFNATRFASVYAWDRKRISNCVAYYSVLYNSASFSTFKCYGVSPTKLNDLCFTNVYADSFVIRGDEVRQIAPGQTGKIADYNYKLPDDFTGCVIAWNSNNLDSKVGGNYNYLYRLFRKSNLKPFERDISTEIYQAGSTPCNGVEGFNCYFPLQSYGFQPTNGVGYQPYRVVVLSFELLHAPATVCGPKKSTNLVKNKCVNFNFNGLTGTGVLTESNKKFLPFQQFGRDIADTTDAVRDPQTLEILDITPCSFGGVSVITPGTNTSNQVAVLYQDVNCTEVPVAIHADQLTPTWRVYSTGSNVFQTRAGCLIGAEHVNNSYECDIPIGAGICASYQTQTNSPRRARSVASQSIIAYTMSLGAENSVAYSNNSIAIPTNFTISVTTEILPVSMTKTSVDCTMYICGDSTECSNLLLQYGSFCTQLNRALTGIAVEQDKNTQEVFAQVKQIYKTPPIKDFGGFNFSQILPDPSKPSKRSFIEDLLFNKVTLADAGFIKQYGDCLGDIAARDLICAQKFNGLTVLPPLLTDEMIAQYTSALLAGTITSGWTFGAGAALQIPFAMQMAYRFNGIGVTQNVLYENQKLIANQFNSAIGKIQDSLSSTASALGKLQDVVNQNAQALNTLVKCLSSNFGAISSVLNDILSRLDKVEAEVQIDRLITGRLQCLQTYVTQQLIRAAEIRASANLAATKMSECVLGQSKRVDFCGKGYHLMSFPQSAPHGVVFLHVTYVPAQEKNFTTAPAICHDGKAHFPREGVFVSNGTHWFVTQRNFYEPQIITTDNTFVSGNCDVVIGIVNNTVYDPLQPELDSFKEELDKYFKNHTSPDVDLGDISGINASVVNIQKEIDRLNEVAKNLNESLIDLQELGKYEQYIKGGSGYIPEAPRDGQAYVRKDGEWVLLSTFL

SEQ ID NO: 6310 - protein, 1241 aa, Artificial Sequence
  SARS-CoV-2/France/IDF0372/2020__EPI_ISL_406596 spike protein (1-1211)(Q965C_S1003C) Foldon construct
MFVFLVLLPLVSSQCVNLTTRTQLPPAYTNSFTRGVYYPDKVFRSSVLHSTQDLFLPFFSNVTWFHAIHVSGTNGTKRFDNPVLPFNDGVYFASTEKSNIIRGWIFGTTLDSKTQSLLIVNNATNVVIKVCEFQFCNDPFLGVYYHKNNKSWMESEFRVYSSANNCTFEYVSQPFLMDLEGKQGNFKNLREFVFKNIDGYFKIYSKHTPINLVRDLPQGFSALEPLVDLPIGINITRFQTLLALHRSYLTPGDSSSGWTAGAAAYYVGYLQPRTFLLKYNENGTITDAVDCALDPLSETKCTLKSFTVEKGIYQTSNFRVQPTESIVRFPNITNLCPFGEVFNATRFASVYAWNRKRISNCVADYSFLYNSASFSTFKCYGVSPTKLNDLCFTNVYADSFVIRGDEVRQIAPGQTGKIADYNYKLPDDFTGCVIAWNSNNLDSKVGGNYNYLYRLFRKSNLKPFERDISTEIYQAGSTPCNGVEGFNCYFPLQSYGFQPTNGVGYQPYRVVVLSFELLHAPATVCGPKKSTNLVKNKCVNFNFNGLTGTGVLTESNKKFLPFQQFGRDIADTTDAVRDPQTLEILDITPCSFGGVSVITPGTNTSNQVAVLYQDVNCTEVPVAIHADQLTPTWRVYSTGSNVFQTRAGCLIGAEHVNNSYECDIPIGAGICASYQTQTNSPRRARSVASQSIIAYTMSLGAENSVAYSNNSIAIPTNFTISVTTEILPVSMTKTSVDCTMYICGDSTECSNLLLQYGSFCTQLNRALTGIAVEQDKNTQEVFAQVKQIYKTPPIKDFGGFNFSQILPDPSKPSKRSFIEDLLFNKVTLADAGFIKQYGDCLGDIAARDLICAQKFNGLTVLPPLLTDEMIAQYTSALLAGTITSGWTFGAGAALQIPFAMQMAYRFNGIGVTQNVLYENQKLIANQFNSAIGKIQDSLSSTASALGKLQDVVNQNAQALNTLVKCLSSNFGAISSVLNDILSRLDKVEAEVQIDRLITGRLQCLQTYVTQQLIRAAEIRASANLAATKMSECVLGQSKRVDFCGKGYHLMSFPQSAPHGVVFLHVTYVPAQEKNFTTAPAICHDGKAHFPREGVFVSNGTHWFVTQRNFYEPQIITTDNTFVSGNCDVVIGIVNNTVYDPLQPELDSFKEELDKYFKNHTSPDVDLGDISGINASVVNIQKEIDRLNEVAKNLNESLIDLQELGKYEQYIKGGSGYIPEAPRDGQAYVRKDGEWVLLSTFL

SEQ ID NO: 6311 - protein, 1241 aa, Artificial Sequence
  SARS-CoV-2/Australia/VIC01/2020__EPI_ISL_406844 spike protein (1-1211)(Q965C_S1003C) Foldon construct
MFVFLVLLPLVSSQCVNLTTRTQLPPAYTNSFTRGVYYPDKVFRSSVLHSTQDLFLPFFSNVTWFHAIHVSGTNGTKRFDNPVLPFNDGVYFASTEKSNIIRGWIFGTTLDSKTQSLLIVNNATNVVIKVCEFQFCNDPFLGVYYHKNNKSWMESEFRVYSSANNCTFEYVSQPFLMDLEGKQGNFKNLREFVFKNIDGYFKIYSKHTPINLVRDLPQGFSALEPLVDLPIGINITRFQTLLALHRRYLTPGDSSSGWTAGAAAYYVGYLQPRTFLLKYNENGTITDAVDCALDPLSETKCTLKSFTVEKGIYQTSNFRVQPTESIVRFPNITNLCPFGEVFNATRFASVYAWNRKRISNCVADYSVLYNSASFSTFKCYGVSPTKLNDLCFTNVYADSFVIRGDEVRQIAPGQTGKIADYNYKLPDDFTGCVIAWNSNNLDSKVGGNYNYLYRLFRKSNLKPFERDISTEIYQAGSTPCNGVEGFNCYFPLQSYGFQPTNGVGYQPYRVVVLSFELLHAPATVCGPKKSTNLVKNKCVNFNFNGLTGTGVLTESNKKFLPFQQFGRDIADTTDAVRDPQTLEILDITPCSFGGVSVITPGTNTSNQVAVLYQDVNCTEVPVAIHADQLTPTWRVYSTGSNVFQTRAGCLIGAEHVNNSYECDIPIGAGICASYQTQTNSPRRARSVASQSIIAYTMSLGAENSVAYSNNSIAIPTNFTISVTTEILPVSMTKTSVDCTMYICGDSTECSNLLLQYGSFCTQLNRALTGIAVEQDKNTQEVFAQVKQIYKTPPIKDFGGFNFSQILPDPSKPSKRSFIEDLLFNKVTLADAGFIKQYGDCLGDIAARDLICAQKFNGLTVLPPLLTDEMIAQYTSALLAGTITSGWTFGAGAALQIPFAMQMAYRFNGIGVTQNVLYENQKLIANQFNSAIGKIQDSLSSTASALGKLQDVVNQNAQALNTLVKCLSSNFGAISSVLNDILSRLDKVEAEVQIDRLITGRLQCLQTYVTQQLIRAAEIRASANLAATKMSECVLGQSKRVDFCGKGYHLMSFPQSAPHGVVFLHVTYVPAQEKNFTTAPAICHDGKAHFPREGVFVSNGTHWFVTQRNFYEPQIITTDNTFVSGNCDVVIGIVNNTVYDPLQPELDSFKEELDKYFKNHTSPDVDLGDISGINASVVNIQKEIDRLNEVAKNLNESLIDLQELGKYEQYIKGGSGYIPEAPRDGQAYVRKDGEWVLLSTFL

SEQ ID NO: 6312 - protein, 1241 aa, Artificial Sequence
  SARS-CoV-2/Germany/BavPat1/2020__EPI_ISL_406862 spike protein (1-1211)(Q965C_S1003C) Foldon construct
MFVFLVLLPLVSSQCVNLTTRTQLPPAYTNSFTRGVYYPDKVFRSSVLHSTQDLFLPFFSNVTWFHAIHVSGTNGTKRFDNPVLPFNDGVYFASTEKSNIIRGWIFGTTLDSKTQSLLIVNNATNVVIKVCEFQFCNDPFLGVYYHKNNKSWMESEFRVYSSANNCTFEYVSQPFLMDLEGKQGNFKNLREFVFKNIDGYFKIYSKHTPINLVRDLPQGFSALEPLVDLPIGINITRFQTLLALHRSYLTPGDSSSGWTAGAAAYYVGYLQPRTFLLKYNENGTITDAVDCALDPLSETKCTLKSFTVEKGIYQTSNFRVQPTESIVRFPNITNLCPFGEVFNATRFASVYAWNRKRISNCVADYSVLYNSASFSTFKCYGVSPTKLNDLCFTNVYADSFVIRGDEVRQIAPGQTGKIADYNYKLPDDFTGCVIAWNSNNLDSKVGGNYNYLYRLFRKSNLKPFERDISTEIYQAGSTPCNGVEGFNCYFPLQSYGFQPTNGVGYQPYRVVVLSFELLHAPATVCGPKKSTNLVKNKCVNFNFNGLTGTGVLTESNKKFLPFQQFGRDIADTTDAVRDPQTLEILDITPCSFGGVSVITPGTNTSNQVAVLYQGVNCTEVPVAIHADQLTPTWRVYSTGSNVFQTRAGCLIGAEHVNNSYECDIPIGAGICASYQTQTNSPRRARSVASQSIIAYTMSLGAENSVAYSNNSIAIPTNFTISVTTEILPVSMTKTSVDCTMYICGDSTECSNLLLQYGSFCTQLNRALTGIAVEQDKNTQEVFAQVKQIYKTPPIKDFGGFNFSQILPDPSKPSKRSFIEDLLFNKVTLADAGFIKQYGDCLGDIAARDLICAQKFNGLTVLPPLLTDEMIAQYTSALLAGTITSGWTFGAGAALQIPFAMQMAYRFNGIGVTQNVLYENQKLIANQFNSAIGKIQDSLSSTASALGKLQDVVNQNAQALNTLVKCLSSNFGAISSVLNDILSRLDKVEAEVQIDRLITGRLQCLQTYVTQQLIRAAEIRASANLAATKMSECVLGQSKRVDFCGKGYHLMSFPQSAPHGVVFLHVTYVPAQEKNFTTAPAICHDGKAHFPREGVFVSNGTHWFVTQRNFYEPQIITTDNTFVSGNCDVVIGIVNNTVYDPLQPELDSFKEELDKYFKNHTSPDVDLGDISGINASVVNIQKEIDRLNEVAKNLNESLIDLQELGKYEQYIKGGSGYIPEAPRDGQAYVRKDGEWVLLSTFL

SEQ ID NO: 6313 - protein, 1241 aa, Artificial Sequence
  SARS-CoV-2/Wuhan/HBCDC-HB-02/2020__EPI_ISL_412978 spike protein (1-1211)(Q965C_S1003C) Foldon construct
MFVFLVLLPLVSSQCVNLTTRTQLPPAYTNSFTRGVYYPDKVFRSSVLHSTQDLFLPFFSNVTWFHAIHVSGTNGTKRFDNPVLPFNDGVYFASTEKSNIIRGWIFGTTLDSKTQSLLIVNNATNVVIKVCEFQFCNDPFLGVYYHKNNKSWMESEFRVYSSANNCTFEYVSQPFLMDLEGKQGNFKNLREFVFKNIDGYFKIYSKHTPINLVRDLPQGFSALEPLVDLPIGINITRFQTLLALHRSYLTPGDSSSGWTAGAAAYYVGYLQPRTFLLKYNENGTITDAVDCALDPLSETKCTLKSFTVEKGIYQTSNFRVQPTESIVRFPNITNLCPFGEVFNATRFASVYAWNRKRISNCVADYSVLYNSASFSTFKCYGVSPTKLNDLCFTNVYADSFVIRGDEVRQIAPGQTGKIADYNYKLPDDFTGCVIAWNSNNLDSKVGGNYNYLYRLFRKSNLKPFERDISTEIYQAGSTPCNGVEGFNCYFPLQSYGFQPTNGVGYQPYRVVVLSFELLHAPATVCGPKKSTNLVKNKCVNFNFNGLTGTGVLTESNKKFLPFQQFGRDIADTTDAVRDPQTLEILDITPCSFGGVSVITPGTNTSNQVAVLYQDVNCTEVPVAIHADQLTPTWRVYSTGSNVFQTRAGCLIGAEHVNNSYECDIPIGAGICASYQTQTNSPRRARSVASQSIIAYTMSLGAENSVAYSNNSIAIPTNFTISVTTEILPVSMTKTSVDCTMYICGDSTECSNFLLQYGSFCTQLNRALTGIAVEQDKNTQEVFAQVKQIYKTPPIKDFGGFNFSQILPDPSKPSKRSFIEDLLFNKVTLADAGFIKQYGDCLGDIAARDLICAQKFNGLTVLPPLLTDEMIAQYTSALLAGTITSGWTFGAGAALQIPFAMQMAYRFNGIGVTQNVLYENQKLIANQFNSAIGKIQDSLSSTASALGKLQDVVNQNAQALNTLVKCLSSNFGAISSVLNDILSRLDKVEAEVQIDRLITGRLQCLQTYVTQQLIRAAEIRASANLAATKMSECVLGQSKRVDFCGKGYHLMSFPQSAPHGVVFLHVTYVPAQEKNFTTAPAICHDGKAHFPREGVFVSNGTHWFVTQRNFYEPQIITTDNTFVSGNCDVVIGIVNNTVYDPLQPELDSFKEELDKYFKNHTSPDVDLGDISGINASVVNIQKEIDRLNEVAKNLNESLIDLQELGKYEQYIKGGSGYIPEAPRDGQAYVRKDGEWVLLSTFL

SEQ ID NO: 6314 - protein, 1241 aa, Artificial Sequence
  SARS-CoV-2/Australia/QLD02/2020__EPI_ISL_407896 spike protein (1-1211)(Q965C_S1003C) Foldon construct
MFVFLVLLPLVSSQCVNLTTRTQLPPAYTNSFTRGVYYPDKVFRSSVLHSTQDLFLPFFSNVTWFHAIHVSGTNGTKRFDNPVLPFNDGVYFASTEKSNIIRGWIFGTTLDSKTQSLLIVNNATNVVIKVCEFQFCNDPFLGVYYHKNNKSWMESEFRVYSSANNCTFEYVSQPFLMDLEGKQGNFKNLREFVFKNIDGYFKIYSKHTPINLVRDLPQGFSALEPLVDLPIGINITRFQTLLALHRSYLTPGDSSSGWTAGAAAYYVGYLQPRTFLLKYNENGTITDAVDCALDPLSETKCTLKSFTVEKGIYQTSNFRVQPTESIVRFPNITNLCPFGEVFNATRFASVYAWNRKRISNCVADYSVLYNSASFSTFKCYGVSPTKLNDLCFTNVYADSFVIRGDEVRQIAPGQTGKIADYNYKLPDDFTGCVIAWNSNNLDSKVGGNYNYLYRLFRKSNLKPFERDISTEIYQAGSTPCNGVEGFNCYFPLQSYGFQPTNGVGYQPYRVVVLSFELLHAPATVCGPKKSTNLVKNKCVNFNFNGLTGTGVLTESNKKFLPFQQFGRDIADTTDAVRDPQTLEILDITPCSFGGVSVITPGTNTSNQVAVLYQDVNCTEVPVAIHADQLTPTWRVYSTGSNVFQTRAGCLIGAEHVNNSYECDIPIGAGICASYQTQTNSPRRARSVASQSIIAYTMSLGAENSVAYSNNSIAIPTNFTISVTTEILPVSMTKTSVDCTMYICGDSTECSNLLLQYGSFCTQLNRALTGIAVEQDKNTQEVFAQVKQIYKTPPIKDFGGFNFSQILPDPSKPSKRSFIEDLLFNKVTLADAGFIKQYGDCLGDIAARDLICAQKFNGLTVLPPLLTDEMIAQYTSALLAGTITSGWTFGAGAALQIPFAMQMAYRFNGIGVTQNVLYENQKLIANQFNSAIGKIQDSLSSTASALGKLQDVVNQNAQALNTLVKCLSSNFGAISSVLNDILSRLDKVEAEVQIDRLITGRLQCLQTYVTQQLIRAAEIRASANLAATKMSECVLGQSKRVDFCGKGYHLMSFPQSAPHGVVFLHVTYVPAQEKNFTTAPAICHDGKAHFPREGVFVSNGTHWFVTQRNFYEPQIITTDNTFVSGNCDVVIGIVNNTVYDPLQLELDSFKEELDKYFKNHTSPDVDLGDISGINASVVNIQKEIDRLNEVAKNLNESLIDLQELGKYEQYIKGGSGYIPEAPRDGQAYVRKDGEWVLLSTFL

SEQ ID NO: 6315 - protein, 1241 aa, Artificial Sequence
  SARS-CoV-2/India/1-31/2020__EPI_ISL_413523 spike protein (1-1211)(Q965C_S1003C) Foldon construct
MFVFLVLLPLVSSQCVNLTTRTQLPPAYTNSFTRGVYYPDKVFRSSVLHSTQDLFLPFFSNVTWFHAIHVSGTNGTKRFDNPVLPFNDGVYFASTEKSNIIRGWIFGTTLDSKTQSLLIVNNATNVVIKVCEFQFCNDPFLGVYYHKNNKSWMESEFRVYSSANNCTFEYVSQPFLMDLEGKQGNFKNLREFVFKNIDGYFKIYSKHTPINLVRDLPQGFSALEPLVDLPIGINITRFQTLLALHRSYLTPGDSSSGWTAGAAAYYVGYLQPRTFLLKYNENGTITDAVDCALDPLSETKCTLKSFTVEKGIYQTSNFRVQPTESIVRFPNITNLCPFGEVFNATRFASVYAWNRKRISNCVADYSVLYNSASFSTFKCYGVSPTKLNDLCFTNVYADSFVIRGDEVRQIAPGQTGKIADYNYKLPDDFTGCVIAWNSNNLDSKVGGNYNYLYRLFRKSNLKPFERDISTEIYQAGSTPCNGVEGFNCYFPLQSYGFQPTNGVGYQPYRVVVLSFELLHAPATVCGPKKSTNLVKNKCVNFNFNGLTGTGVLTESNKKFLPFQQFGRDIADTTDAVRDPQTLEILDITPCSFGGVSVITPGTNTSNQVAVLYQDVNCTEVPVAIHADQLTPTWRVYSTGSNVFQTRAGCLIGAEHVNNSYECDIPIGAGICASYQTQTNSPRRARSVASQSIIAYTMSLGAENSVAYSNNSIAIPTNFTISVTTEILPVSMTKTSVDCTMYICGDSTECSNLLLQYGSFCTQLNRALTGIAVEQDKNTQEVFAQVKQIYKTPPIKDFGGFNFSQILPDPSKPSKRSFIEDLLFNKVTLADAGFIKQYGDCLGDIAARDLICAQKFNGLTVLPPLLTDEMIAQYTSALLAGTITSGWTFGAGAALQIPFAMQMAYRFNGIGVTQNVLYENQKLIANQFNSVIGKIQDSLSSTASALGKLQDVVNQNAQALNTLVKCLSSNFGAISSVLNDILSRLDKVEAEVQIDRLITGRLQCLQTYVTQQLIRAAEIRASANLAATKMSECVLGQSKRVDFCGKGYHLMSFPQSAPHGVVFLHVTYVPAQEKNFTTAPAICHDGKAHFPREGVFVSNGTHWFVTQRNFYEPQIITTDNTFVSGNCDVVIGIVNNTVYDPLQPELDSFKEELDKYFKNHTSPDVDLGDISGINASVVNIQKEIDRLNEVAKNLNESLIDLQELGKYEQYIKGGSGYIPEAPRDGQAYVRKDGEWVLLSTFL

SEQ ID NO: 6316 - protein, 1241 aa, Artificial Sequence
  SARS-CoV-2/Guangdong/GD2020087-P0008/2020__EPI_ISL_413863 spike protein (1-1211)(Q965C_S1003C) Foldon construct
MFVFLVLLPLVSSQCVNLTTRTQLPPAYTNSFTRGVYYPDKVFRSSVLHSTQDLFLPFFSNVTWFHAIHVSGTNGTKRFDNPVLPFNDGVYFASTEKSNIIRGWIFGTTLDSKTQSLLIVNNATNVVIKVCEFQFCNDPFLGVYYHKNNKSWMESEFRVYSSANNCTFEYVSQPFLMDLEGKQGNFKNLREFVFKNIDGYFKIYSKHTPINLVRDLPQGFSALEPLVDLPIGINITRFQTLLALHRSYLTPGDSSSGWTAGAAAYYVGYLQPRTFLLKYNENGTITDAVDCALDPLSETKCTLKSFTVEKGIYQTSNFRVQPTESIVRFPNITNLCPFGEVFNATRFASVYAWNRKRISNCVADYSVLYNSASFSTFKCYGVSPTKLNDLCFTNVYADSFVIRGDEVREIAPGQTGKIADYNYKLPDDFTGCVIAWNSNNLDSKVGGNYNYLYRLFRKSNLKPFERDISTEIYQAGSTPCNGVEGFNCYFPLQSYGFQPTNGVGYQPYRVVVLSFELLHAPATVCGPKKSTNLVKNKCVNFNFNGLTGTGVLTESNKKFLPFQQFGRDIADTTDAVRDPQTLEILDITPCSFGGVSVITPGTNTSNQVAVLYQDVNCTEVPVAIHADQLTPTWRVYSTGSNVFQTRAGCLIGAEHVNNSYECDIPIGAGICASYQTQTNSPRRARSVASQSIIAYTMSLGAENSVAYSNNSIAIPTNFTISVTTEILPVSMTKTSVDCTMYICGDSTECSNLLLQYGSFCTQLNRALTGIAVEQDKNTQEVFAQVKQIYKTPPIKDFGGFNFSQILPDPSKPSKRSFIEDLLFNKVTLADAGFIKQYGDCLGDIAARDLICAQKFNGLTVLPPLLTDEMIAQYTSALLAGTITSGWTFGAGAALQIPFAMQMAYRFNGIGVTQNVLYENQKLIANQFNSAIGKIQDSLSSTASALGKLQDVVNQNAQALNTLVKCLSSNFGAISSVLNDILSRLDKVEAEVQIDRLITGRLQCLQTYVTQQLIRAAEIRASANLAATKMSECVLGQSKRVDFCGKGYHLMSFPQSAPHGVVFLHVTYVPAQEKNFTTAPAICHDGKAHFPREGVFVSNGTHWFVTQRNFYEPQIITTDNTFVSGNCDVVIGIVNNTVYDPLQPELDSFKEELDKYFKNHTSPDVDLGDISGINASVVNIQKEIDRLNEVAKNLNESLIDLQELGKYEQYIKGGSGYIPEAPRDGQAYVRKDGEWVLLSTFL

SEQ ID NO: 6317 - protein, 1241 aa, Artificial Sequence
  SARS-CoV-2/Sweden/01/2020__EPI_ISL_411951 spike protein (1-1211)(Q965C_S1003C) Foldon construct
MFVFLVLLPLVSSQCVNLTTRTQLPPAYTNSFTRGVYYPDKVFRSSVLHSTQDLFLPFFSNVTWFHAIHVSGTNGTKRFDNPVLPFNDGVYFASTEKSNIIRGWIFGTTLDSKTQSLLIVNNATNVVIKVCEFQFCNDPFLGVYYHKNNKSWMESEFRVYSSANNCTFEYVSQPFLMDLEGKQGNFKNLREFVFKNIDGYFKIYSKHTPINLVRDLPQGFSALEPLVDLPIGINITRFQTLLALHRSYLTPGDSSSGWTAGAAAYYVGYLQPRTFLLKYNENGTITDAVDCALDPLSETKCTLKSFTVEKGIYQTSNFRVQPTESIVRFPNITNLCPFGEVFNATRFASVYAWNRKRISNCVADYSVLYNSASFSTFKCYGVSPTKLNDLCFTNVYADSFVIRGDEVRQIAPGQTGKIADYNYKLPDDFTGCVIAWNSNNLDSKVGGNYNYLYRLFRKSNLKPFERDISTEIYQAGSTPCNGVEGFNCYFPLQSYGFQPTNGVGYQPYRVVVLSFELLHAPATVCGPKKSTNLVKNKCVNFNFNGLTGTGVLTESNKKFLPFQQFGRDIADTTDAVRDPQTLEILDITPCSFGGVSVITPGTNTSNQVAVLYQDVNCTEVPVAIHADQLTPTWRVYSTGSNVFQTRAGCLIGAEHVNNSYECDIPIGAGICASYQTQTNSPRRARSVASQSIIAYTMSLGAENSVAYSNNSIAIPTNFTISVTTEILPVSMTKTSVDCTMYICGDSTECSNLLLQYGSFCTQLNRALTGIAVEQDKNTQEVFAQVKQIYKTPPIKDCGGFNFSQILPDPSKPSKRSFIEDLLFNKVTLADAGFIKQYGDCLGDIAARDLICAQKFNGLTVLPPLLTDEMIAQYTSALLAGTITSGWTFGAGAALQIPFAMQMAYRFNGIGVTQNVLYENQKLIANQFNSAIGKIQDSLSSTASALGKLQDVVNQNAQALNTLVKCLSSNFGAISSVLNDILSRLDKVEAEVQIDRLITGRLQCLQTYVTQQLIRAAEIRASANLAATKMSECVLGQSKRVDFCGKGYHLMSFPQSAPHGVVFLHVTYVPAQEKNFTTAPAICHDGKAHFPREGVFVSNGTHWFVTQRNFYEPQIITTDNTFVSGNCDVVIGIVNNTVYDPLQPELDSFKEELDKYFKNHTSPDVDLGDISGINASVVNIQKEIDRLNEVAKNLNESLIDLQELGKYEQYIKGGSGYIPEAPRDGQAYVRKDGEWVLLSTFL

SEQ ID NO: 6318 - protein, 1241 aa, Artificial Sequence
  SARS-CoV-2/Tianmen/HBCDC-HB-07/2020__EPI_ISL_412983 spike protein (1-1211)(Q965C_S1003C) Foldon construct
MFVFLVLLPLVSSQCVNLTTRTQLPPAYTNSFTRGVYYPDKVFRSSVLHSTQDLFLPFFSNVTWFHAIHVSGTNGTKRFDNPVLPFNDGVYFASTEKSNIIRGWIFGTTLDSKTQSLLIVNNATNVVIKVCEFQFCNDPFLGVYYHKNNKSWMESEFRVYSSANNCTFEYVSQPFLMDLEGKQGNFKNLREFVFKNIDGYFKIYSKHTPINLVRDLPQGFSALEPLVDLPIGINITRFQTLLALHRSYLTPGDSSSGWTAGAAAYYVGYLQPRTFLLKYNENGTITDAVDCALDPLSETKCTLKSFTVEKGIYQTSNFRVQPTESIVRFPNITNLCPFGEVFNATRFASVYAWNRKRISNCVADYSVLYNSASFSTFKCYGVSPTKLNDLCFTNVYADSFVIRGDEVRQIAPGQTGKIADYNYKLPDDFTGCVIAWNSNNLDSKVGGNYNYLYRLFRKSNLKPFERDISTEIYQAGSTPCNGVEGFNCYFPLQSYGFQPTNGVGYQPYRVVVLSFELLHAPATVCGPKKSTNLVKNKCVNFNFNGLTGTGVLTESNKKFLPFQQFGRDIADTTDAVRDPQTLEILDITPCSFGGVSVITPGTNTSNQVAVLYQDLNCTEVPVAIHADQLTPTWRVYSTGSNVFQTRAGCLIGAEHVNNSYECDIPIGAGICASYQTQTNSPRRARSVASQSIIAYTMSLGAENSVAYSNNSIAIPTNFTISVTTEILPVSMTKTSVDCTMYICGDSTECSNLLLQYGSFCTQLNRALTGIAVEQDKNTQEVFAQVKQIYKTPPIKDFGGFNFSQILPDPSKPSKRSFIEDLLFNKVTLADAGFIKQYGDCLGDIAARDLICAQKFNGLTVLPPLLTDEMIAQYTSALLAGTITSGWTFGAGAALQIPFAMQMAYRFNGIGVTQNVLYENQKLIANQFNSAIGKIQDSLSSTASALGKLQDVVNQNAQALNTLVKCLSSNFGAISSVLNDILSRLDKVEAEVQIDRLITGRLQCLQTYVTQQLIRAAEIRASANLAATKMSECVLGQSKRVDFCGKGYHLMSFPQSAPHGVVFLHVTYVPAQEKNFTTAPAICHDGKAHFPREGVFVSNGTHWFVTQRNFYEPQIITTDNTFVSGNCDVVIGIVNNTVYDPLQPELDSFKEELDKYFKNHTSPDVDLGDISGINASVVNIQKEIDRLNEVAKNLNESLIDLQELGKYEQYIKGGSGYIPEAPRDGQAYVRKDGEWVLLSTFL

SEQ ID NO: 6319 - protein, 1241 aa, Artificial Sequence
  SARS-CoV-2/Hong Kong/case42_VM20002493/2020__EPI_ISL_414527 spike protein (1-1211)(Q965C_S1003C) Foldon construct
MFVFLVLLPLVSSQCVNLTTRTQLPPAYTNSFTRGVYYPDKVFRSSVLHSTQDLFLPFFSNVTWFHAIHVSGTNGTKRFDNPVLPFNDGVYFASTEKSNIIRGWIFGTTLDSKTQSLLIVNNATNVVIKVCEFQFCNDPFLGVYYHKNNKSWMESEFRVYSSANNCTFEYVSQPFLMDLEGKQGNFKNLREFVFKNIDGYFKIYSKHTPINLVRDLPQGFSALEPLVDLPIGINITRFQTLLALHRSYLTPGDSSSGWTAGAAAYYVGYLQPRTFLLKYNENGTITDAVDCALDPLSETKCTLKSFTVEKGIYQTSNFRVQPTESIVRFPNITNLCPFGEVFNATRFASVYAWNRKRISNCVADYSVLYNSASFSTFKCYGVSPTKLNDLCFTNVYADSFVIRGDEVRQIAPGQTGKIADYNYKLPDDFTGCVIAWNSNNLDSKVGGNYNYLYRLFRKSNLKPFERDISTEIYQAGSTPCNGVEGFNCYFPLQSYGFQPTNGVGYQPYRVVVLSFELLHAPATVCGPKKSTNLVKNKCVNFNFNGLTGTGVLTESNKKFLPFQQFGRDIADTTDAVRDPQTLEILDITPCSFGGVSVITPGTNTSNQVAVLYQDVNCTEVPVAIHADQLTPTWRVYSTGSNVFQTRAGCLIGAEHVNNSYECDIPIGAGICASYQTQTNSPRRARSVASQSIIAYTMSLGAENSVAYSNNSIAIPTNFAISVTTEILPVSMTKTSVDCTMYICGDSTECSNLLLQYGSFCTQLNRALTGIAVEQDKNTQEVFAQVKQIYKTPPIKDFGGFNFSQILPDPSKPSKRSFIEDLLFNKVTLADAGFIKQYGDCLGDIAARDLICAQKFNGLTVLPPLLTDEMIAQYTSALLAGTITSGWTFGAGAALQIPFAMQMAYRFNGIGVTQNVLYENQKLIANQFNSAIGKIQDSLSSTASALGKLQDVVNQNAQALNTLVKCLSSNFGAISSVLNDILSRLDKVEAEVQIDRLITGRLQCLQTYVTQQLIRAAEIRASANLAATKMSECVLGQSKRVDFCGKGYHLMSFPQSAPHGVVFLHVTYVPAQEKNFTTAPAICHDGKAHFPREGVFVSNGTHWFVTQRNFYEPQIITTDNTFVSGNCDVVIGIVNNTVYDPLQPELDSFKEELDKYFKNHTSPDVDLGDISGINASVVNIQKEIDRLNEVAKNLNESLIDLQELGKYEQYIKGGSGYIPEAPRDGQAYVRKDGEWVLLSTFL

SEQ ID NO: 6320 - protein, 1241 aa, Artificial Sequence
  SARS-CoV-2/USA/CruiseA-23/2020__EPI_ISL_414482 spike protein (1-1211)(Q965C_S1003C) Foldon construct
MFVFLVLLPLVSSQCVNLTTRTQLPPAYTNSFTRGVYYPDKVFRSSVLHSTQDLFLPFFSNVTWFHAIHVSGTNGTKRFDNPVLPFNDGVYFASTEKSNIIRGWIFGTTLDSKTQSLLIVNNATNVVIKVCEFQFCNDPFLGVYYHKNNKSWMESEFRVYSSANNCTFEYVSQPFLMDLEVKQGNFKNLREFVFKNIDGYFKIYSKHTPINLVRDLPQGFSALEPLVDLPIGINITRFQTLLALHRSYLTPGDSSSGWTAGAAAYYVGYLQPRTFLLKYNENGTITDAVDCALDPLSETKCTLKSFTVEKGIYQTSNFRVQPTESIVRFPNITNLCPFGEVFNATRFASVYAWNRKRISNCVADYSVLYNSASFSTFKCYGVSPTKLNDLCFTNVYADSFVIRGDEVRQIAPGQTGKIADYNYKLPDDFTGCVIAWNSNNLDSKVGGNYNYLYRLFRKSNLKPFERDISTEIYQAGSTPCNGVEGFNCYFPLQSYGFQPTNGVGYQPYRVVVLSFELLHAPATVCGPKKSTNLVKNKCVNFNFNGLTGTGVLTESNKKFLPFQQFGRDIADTTDAVRDPQTLEILDITPCSFGGVSVITPGTNTSNQVAVLYQDVNCTEVPVAIHADQLTPTWRVYSTGSNVFQTRAGCLIGAEHVNNSYECDIPIGAGICASYQTQTNSPRRARSVASQSIIAYTMSLGAENSVAYSNNSIAIPTNFTISVTTEILPVSMTKTSVDCTMYICGDSTECSNLLLQYGSFCTQLNRALTGIAVEQDKNTQEVFAQVKQIYKTPPIKDFGGFNFSQILPDPSKPSKRSFIEDLLFNKVTLADAGFIKQYGDCLGDIAARDLICAQKFNGLTVLPPLLTDEMIAQYTSALLAGTITSGWTFGAGAALQIPFAMQMAYRFNGIGVTQNVLYENQKLIANQFNSAIGKIQDSLSSTASALGKLQDVVNQNAQALNTLVKCLSSNFGAISSVLNDILSRLDKVEAEVQIDRLITGRLQCLQTYVTQQLIRAAEIRASANLAATKMSECVLGQSKRVDFCGKGYHLMSFPQSAPHGVVFLHVTYVPAQEKNFTTAPAICHDGKAHFPREGVFVSNGTHWFVTQRNFYEPQIITTDNTFVSGNCDVVIGIVNNTVYDPLQPELDSFKEELDKYFKNHTSPDVDLGDISGINASVVNIQKEIDRLNEVAKNLNESLIDLQELGKYEQYIKGGSGYIPEAPRDGQAYVRKDGEWVLLSTFL

SEQ ID NO: 6321 - protein, 1241 aa, Artificial Sequence
  SARS-CoV-2/Hong Kong/case85_VM20002868/2020__EPI_ISL_414519 spike protein (1-1211)(Q965C_S1003C) Foldon construct
MFVFLVLVPLVSSQCVNLTTRTQLPPAYTNSFTRGVYYPDKVFRSSVLHSTQDLFLPFFSNVTWFHAIHVSGTNGTKRFDNPVLPFNDGVYFASTEKSNIIRGWIFGTTLDSKTQSLLIVNNATNVVIKVCEFQFCNDPFLGVYYHKNNKSWMESEFRVYSSANNCTFEYVSQPFLMDLEGKQGNFKNLREFVFKNIDGYFKIYSKHTPINLVRDLPQGFSALEPLVDLPIGINITRFQTLLALHRSYLTPGDSSSGWTAGAAAYYVGYLQPRTFLLKYNENGTITDAVDCALDPLSETKCTLKSFTVEKGIYQTSNFRVQPTESIVRFPNITNLCPFGEVFNATRFASVYAWNRKRISNCVADYSVLYNSASFSTFKCYGVSPTKLNDLCFTNVYADSFVIRGDEVRQIAPGQTGKIADYNYKLPDDFTGCVIAWNSNNLDSKVGGNYNYLYRLFRKSNLKPFERDISTEIYQAGSTPCNGVEGFNCYFPLQSYGFQPTNGVGYQPYRVVVLSFELLHAPATVCGPKKSTNLVKNKCVNFNFNGLTGTGVLTESNKKFLPFQQFGRDIADTTDAVRDPQTLEILDITPCSFGGVSVITPGTNTSNQVAVLYQDVNCTEVPVAIHADQLTPTWRVYSTGSNVFQTRAGCLIGAEHVNNSYECDIPIGAGICASYQTQTNSPRRARSVASQSIIAYTMSLGAENSVAYSNNSIAIPTNFTISVTTEILPVSMTKTSVDCTMYICGDSTECSNLLLQYGSFCTQLNRALTGIAVEQDKNTQEVFAQVKQIYKTPPIKDFGGFNFSQILPDPSKPSKRSFIEDLLFNKVTLADAGFIKQYGDCLGDIAARDLICAQKFNGLTVLPPLLTDEMIAQYTSALLAGTITSGWTFGAGAALQIPFAMQMAYRFNGIGVTQNVLYENQKLIANQFNSAIGKIQDSLSSTASALGKLQDVVNQNAQALNTLVKCLSSNFGAISSVLNDILSRLDKVEAEVQIDRLITGRLQCLQTYVTQQLIRAAEIRASANLAATKMSECVLGQSKRVDFCGKGYHLMSFPQSAPHGVVFLHVTYVPAQEKNFTTAPAICHDGKAHFPREGVFVSNGTHWFVTQRNFYEPQIITTDNTFVSGNCDVVIGIVNNTVYDPLQPELDSFKEELDKYFKNHTSPDVDLGDISGINASVVNIQKEIDRLNEVAKNLNESLIDLQELGKYEQYIKGGSGYIPEAPRDGQAYVRKDGEWVLLSTFL

SEQ ID NO: 6322 - protein, 1241 aa, Artificial Sequence; identical to SEQ ID NO: 6312
  SARS-CoV-2/England/200990660/2020__EPI_ISL_414523 spike protein (1-1211)(Q965C_S1003C) Foldon construct

SEQ ID NO: 6323 - protein, 1241 aa, Artificial Sequence
  SARS-CoV-2/Australia/NSW09/2020__EPI_ISL_413595 spike protein (1-1211)(Q965C_S1003C) Foldon construct
MFVFLVLLPLVSSQCVNLTTRTQLPPAYTNSFTRGVYYPDKVFRSSVLHSTQDLFLPFFSNVTWFHAIHVSGTNGTKRFDNPVLPFNDGVYFASTEKSNIIRGWIFGTTLDSKTQSLLIVNNATNVVIKVCEFQFCNDPFLGVYYHKNNKSWMESEFRVYSSANNCTFEYVSQPFLMDLEGKQGNFKNLREFVFKNIDGYFKIYSKHTPINLVRDLPQGFSALEPLVDLPIGINITRFQTLLALHRSYLTPGDSSSGWTAGAAAYYVGYLQPRTFLLKYNENGTITDAVDCALDPLSETKCTLKSFTVEKGIYQTSNFRVQPTESIVRFPNITNLCPFGEVFNATRFASVYAWNRKRISNCVADYSVLYNSASFSTFKCYGVSPTKLNDLCFTNVYADSFVIRGDEVRQIAPGQTGKIADYNYKLPDDFTGCVIAWNSNNLDSKVGGNYNYLYRLFRKSNLKPFERDISTEIYQAGSTPCNGVEGFNCYFPLQSYGFQPTNGVGYQPYRVVVLSFELLHAPATVCGPKKSTNLVKNKCVNFNFNGLTGTGVLTESNKKFLPFQQFGRDIADTTDAVRDPQTLEILDITPCSFGGVSVITPGTNTSNQVAVLYQDVNCTEVPVAIHADQLTPTWRVYSTGSNVFQTRAGCLIGAEHVNNSYECDIPIGAGICASYQTQTNSPRRARSVASQSIIAYTMSLGAENSVAYSNNSIAIPTNFTISVTTEILPVSMTKTSVDCTMYICGDSTECSNLLLQYGSFCTQLNRALTGIAVEQDKNTQEVFAQVKQIYKTPPIKDFGGFNFSQILPDPSKPSKRSFIEDLLFNKVTLADAGFIKQYGDCLGDIAARDLICAQKFNGLTVLPPLLTDEMIAQYTSALLAGTITSGWTFGAGAALQIPFAMQMAYRFNGIGVTQNVLYENQKLIANQFNSAIGKIQDSLSFTASALGKLQDVVNQNAQALNTLVKCLSSNFGAISSVLNDILSRLDKVEAEVQIDRLITGRLQCLQTYVTQQLIRAAEIRASANLAATKMSECVLGQSKRVDFCGKGYHLMSFPQSAPHGVVFLHVTYVPAQEKNFTTAPAICHDGKAHFPREGVFVSNGTHWFVTQRNFYEPQIITTDNTFVSGNCDVVIGIVNNTVYDPLQPELDSFKEELDKYFKNHTSPDVDLGDISGINASVVNIQKEIDRLNEVAKNLNESLIDLQELGKYEQYIKGGSGYIPEAPRDGQAYVRKDGEWVLLSTFL

SEQ ID NO: 6324 - protein, 1241 aa, Artificial Sequence; identical to SEQ ID NO: 6304
  SARS-CoV-2/Australia/NSW10/2020__EPI_ISL_413596 spike protein (1-1211)(Q965C_S1003C) Foldon construct

SEQ ID NO: 6325 - protein, 1241 aa, Artificial Sequence
  SARS-CoV-2/Switzerland/1000477797/2020__EPI_ISL_413023 spike protein (1-1211)(Q965C_S1003C) Foldon construct
MFVFLVLLPLVSSQCVNLTTRTQLPPAYTNSFTRGVYYPDKVFRSSVLHSTQDLFLPFFSNVTWFHAIHVSGTNGTKRFDNPVLPFNDGVYFASTEKSNIIRGWIFGTTLDSKTQSLLIVNNATNVVIKVCEFQFCNDPFLGVYYHKNNKSWMESEFRVYSSANNCTFEYVSQPFLMDLEGKQGNFKNLREFVFKNIDGYFNIYSKHTPINLVRDLPQGFSALEPLVDLPIGINITRFQTLLALHRSYLTPGDSSSGWTAGAAAYYVGYLQPRTFLLKYNENGTITDAVDCALDPLSETKCTLKSFTVEKGIYQTSNFRVQPTESIVRFPNITNLCPFGEVFNATRFASVYAWNRKRISNCVADYSVLYNSASFSTFKCYGVSPTKLNDLCFTNVYADSFVIRGDEVRQIAPGQTGKIADYNYKLPDDFTGCVIAWNSNNLDSKVGGNYNYLYRLFRKSNLKPFERDISTEIYQAGSTPCNGVEGFNCYFPLQSYGFQPTNGVGYQPYRVVVLSFELLHAPATVCGPKKSTNLVKNKCVNFNFNGLTGTGVLTESNKKFLPFQQFGRDIADTTDAVRDPQTLEILDITPCSFGGVSVITPGTNTSNQVAVLYQGVNCTEVPVAIHADQLTPTWRVYSTGSNVFQTRAGCLIGAEHVNNSYECDIPIGAGICASYQTQTNSPRRARSVASQSIIAYTMSLGAENSVAYSNNSIAIPTNFTISVTTEILPVSMTKTSVDCTMYICGDSTECSNLLLQYGSFCTQLNRALTGIAVEQDKNTQEVFAQVKQIYKTPPIKDFGGFNFSQILPDPSKPSKRSFIEDLLFNKVTLADAGFIKQYGDCLGDIAARDLICAQKFNGLTVLPPLLTDEMIAQYTSALLAGTITSGWTFGAGAALQIPFAMQMAYRFNGIGVTQNVLYENQKLIANQFNSAIGKIQDSLSSTASALGKLQDVVNQNAQALNTLVKCLSSNFGAISSVLNDILSRLDKVEAEVQIDRLITGRLQCLQTYVTQQLIRAAEIRASANLAATKMSECVLGQSKRVDFCGKGYHLMSFPQSAPHGVVFLHVTYVPAQEKNFTTAPAICHDGKAHFPREGVFVSNGTHWFVTQRNFYEPQIITTDNTFVSGNCDVVIGIVNNTVYDPLQPELDSFKEELDKYFKNHTSPDVDLGDISGINASVVNIQKEIDRLNEVAKNLNESLIDLQELGKYEQYIKGGSGYIPEAPRDGQAYVRKDGEWVLLSTFL

SEQ ID NO: 6326 - protein, 1241 aa, Artificial Sequence
  SARS-CoV-2/Belgium/BA-02291/2020__EPI_ISL_415159 spike protein (1-1211)(Q965C_S1003C) Foldon construct
MFVFLVLLPLVSSQCVNLTTRTQLPPAYTNSFTRGVYYPDKVFRSSVLHSTQDLFLPFFSNVTWFHAIHVSGTNGTKRFDNPVLPFNDGVYFASTEKSNIIRGWIFGTTLDSKTQSLLIVNNATNVVIKVCEFQFCNDPFLGVYYHKNNKSWMESEFRVYSSANNCTFEYVSQPFLMDLEGKQGNFKNLREFVFKNIDGYFKIYSKHTPINLVRDLPQGFSALEPLVDLPIGINITRFQTLLALHRSYLTPGDSSSGWTAGAAAYYVGYLQPRTFLLKYNENGTITDAVDCALDPLSETKCTLKSFTVEKGIYQTSNFRVQPTESIVRFPNITNLCPFGEVFNATRFASVYAWNRKRISNCVADYSVLYNSASFSTFKCYGVSPTKLNDLCFTNVYADSFVIRGDEVRQIAPGQTGKIADYNYKLPDDFTGCVIAWNSNNLDSKVGGNYNYLYRLFRRSNLKPFERDISTEIYQAGSTPCNGVEGFNCYFPLQSYGFQPTNGVGYQPYRVVVLSFELLPAPATVCGPKKSTNLVKNKCVNFNFNGLTGTGVLTESNKKFLPFQQFGRDIADTTDAVRDPQTLEILDITPCSFGGVSVITPGTNTSNQVAVLYQGVNCTEVPVAIHADQLTPTWRVYSTGSNVFQTRAGCLIGAEHVNNSYECDIPIGAGICASYQTQTNSPRRARSVASQSIIAYTMSLGAENSVAYSNNSIAIPTNFTISVTTEILPVSMTKTSVDCTMYICGDSTECSNLLLQYGSFCTQLNRALTGIAVEQDKNTQEVFAQVKQIYKTPPIKDFGGFNFSQILPDPSKPSKRSFIEDLLFNKVTLADAGFIKQYGDCLGDIAARDLICAQKFNGLTVLPPLLTDEMIAQYTSALLAGTITSGWTFGAGAALQIPFAMQMAYRFNGIGVTQNVLYENQKLIANQFNSAIGKIQDSLSSAAPALGKLQDVVNQNAQALNTLVKCLSSNFGAISSVLNDILSRLDKVEAEVQIDRLITGRLQCLQTYVTQQLIRAAEIRASANLAATKMSECVLGQSKRVDFCGKGYHLMSFPQSAPHGVVFLHVTYVPAQEKNFTTAPAICHDGKAHFPREGVFVSNGTHWFVTQRNFYEPQIITTDNTFVSGNCDVVIGIVNNTVYDPLQPELDSFKEELDKYFKNHTSPDVDLGDISGINASVVNIQKEIDRLNEVAKNLNESLIDLQELGKYEQYIKGGSGYIPEAPRDGQAYVRKDGEWVLLSTFL

SEQ ID NO: 6327 - protein, 1241 aa, Artificial Sequence
  SARS-CoV-2/USA/WA8-UW5/2020__EPI_ISL_413486 spike protein (1-1211)(Q965C_S1003C) Foldon construct
MFVFLVLLPLVSSQCVNLTTRTQLPPAYTNSFTRGVYYPDKVFRSSVLHSTQDLFLPFFSNVTWFHAIHVSGTNGTKRFDNPVLPFNDGVYFASTEKSNIIRGWIFGTTLDSKTQSLLIVNNATNVVIKVCEFQFCNDPFLGVYYHKNNKSWMESEFRVYSSANNCTFEYVSQPFLMDLEGKQGNFKNLREFVFKNIDGYFKIYSKHTPINLVRDLPQGFSALEPLVDLPIGINITRFQTLLALHRSYLTPGDSSSGWTAGAAAYYVGYLQPRTFLLKYNENGTITDAVDCALDPLSETKCTLKSFTVEKGIYQTSNFRVQPTESIVRFPNITNLCPFGEVFNATRFASVYAWNRKRISNCVADYSVLYNSASFSTFKCYGVSPTKLNDLCFTNVYADSFVIRGDEVRQIAPGQTGKIADYNYKLPDDFTGCVIAWNSNNLDSKVGGNYNYLYRLFRKSNLKPFERDISTEIYQAGSTPCNGVEGFNCYFPLQSYGFQPTNGVGYQPYRVVVLSFELLHAPATVCGPKKSTNLVKNKCVNFNFNGLTGTGVLTESNKKFLPFQQFGRDIADTTDAVRDPQTLEILDITPCSFGGVSVITPGTNTSNQVAVLYQDVNCTEVPVAIHADQLTPTWRVYSTGSNVFQTRAGCLIGAEYVNNSYECDIPIGAGICASYQTQTNSPRRARSVASQSIIAYTMSLGAENSVAYSNNSIAIPTNFTISVTTEILPVSMTKTSVDCTMYICGDSTECSNLLLQYGSFCTQLNRALTGIAVEQDKNTQEVFAQVKQIYKTPPIKDFGGFNFSQILPDPSKPSKRSFIEDLLFNKVTLADAGFIKQYGDCLGDIAARDLICAQKFNGLTVLPPLLTDEMIAQYTSALLAGTITSGWTFGAGAALQIPFAMQMAYRFNGIGVTQNVLYENQKLIANQFNSAIGKIQDSLSSTASALGKLQDVVNQNAQALNTLVKCLSSNFGAISSVLNDILSRLDKVEAEVQIDRLITGRLQCLQTYVTQQLIRAAEIRASANLAATKMSECVLGQSKRVDFCGKGYHLMSFPQSAPHGVVFLHVTYVPAQEKNFTTAPAICHDGKAHFPREGVFVSNGTHWFVTQRNFYEPQIITTDNTFVSGNCDVVIGIVNNTVYDPLQPELDSFKEELDKYFKNHTSPDVDLGDISGINASVVNIQKEIDRLNEVAKNLNESLIDLQELGKYEQYIKGGSGYIPEAPRDGQAYVRKDGEWVLLSTFL

SEQ ID NO: 6328 - protein, 1241 aa, Artificial Sequence
  SARS-CoV-2/England/20102000506/2020__EPI_ISL_415147 spike protein (1-1211)(Q965C_S1003C) Foldon construct
MFVFLVLLPLVSSQCVNLTTRTQLPPAYTNSFTRGVYYPDKVFRSSVLHSTQDLFLPFFSNVTWFHAIHVSGTNGTKRFDNPVLPFNDGVYFASTEKSNIIRGWIFGTTLDSKTQSLLIVNNATNVVIKVCEFQFCNDPFLGVYYHKNNKSWMESEFRVYSSANNCTFEYVSQPFLMDLEGKQGNFKNLREFVFKNIDGYFKIYSKHTPINLVRDLPQGFSALEPLVDLPIGINITRFQTLLALHRSYLTPGDSSSGWTAGAAAYYVGYLQPRTFLLKYNENGTITDAVDCALDPLSETKCTLKSFTVEKGIYQTSNFRVQPTESIVRFPNITNLCPFGEVFNATRFASVYAWNRKRISNCVADYSVLYNSASFSTFKCYGVSPTKLNDLCFTNVYADSFVIRGDEVRQIAPGQTGKIADYNYKLPDDFTGCVIAWNSNNLDSKVGGNYNYLYRLFRKSNLKPFERDISTEIYQAGSTPCNGVEGFNCYFPLQSYGFQPTNGVGYQPYRVVVLSFELLHAPATVCGPKKSTNLVKNKCVNFNFNGLTGTGVLTESNKKFLPFQQFGRDIADTTDAVRDPQTLEILDITPCSFGGVSVITPGTNTSNQVAVLYQGVNCTEVPVAIHADQLTPTWRVYSTGSNVFQTRAGCLIGAEHVNNSYECDIPIGAGICASYQTQTNSPRRARSVASQSIIAYTMSLGAENSVAYSNNSIAIPTNFTISVTTEILPVSMTKTSVDCTMYICGDSTECSNLLLQYGSFCTQLNRALTGIAVEQDKNTQEVFAQVKQIYKTPPIKDFGGFNFSQILPDPSKPSKRSFIEDLLFNKVTLADAGFIKQYGYCLGDIAARDLICAQKFNGLTVLPPLLTDEMIAQYTSALLAGTITSGWTFGAGAALQIPFAMQMAYRFNGIGVTQNVLYENQKLIANQFNSAIGKIQDSLSSTASALGKLQDVVNQNAQALNTLVKCLSSNFGAISSVLNDILSRLDKVEAEVQIDRLITGRLQCLQTYVTQQLIRAAEIRASANLAATKMSECVLGQSKRVDFCGKGYHLMSFPQSAPHGVVFLHVTYVPAQEKNFTTAPAICHDGKAHFPREGVFVSNGTHWFVTQRNFYEPQIITTDNTFVSGNCDVVIGIVNNTVYDPLQPELDSFKEELDKYFKNHTSPDVDLGDISGINASVVNIQKEIDRLNEVAKNLNESLIDLQELGKYEQYIKGGSGYIPEAPRDGQAYVRKDGEWVLLSTFL

SEQ ID NO: 6329 - protein, 1241 aa, Artificial Sequence
  SARS-CoV-2/Belgium/VAG-03013/2020__EPI_ISL_415155 spike protein (1-1211)(Q965C_S1003C) Foldon construct
MFVFLVLLPLVSSQCVNLTTRTQLPPAYTNSFTRGVYYPDKVFRSSVLHSTQDLFLPFFSNVTWFHAIHVSGTNGTKRFDNPVLPFNDGVYFASTEKSNIIRGWIFGTTLDSKTQSLLIVNNATNVVIKVCEFQFCNDPFLGVYYHKNNKSWMESEFRVYSSANNCTFEYVSQPFLMDLEGKQGNFKNLREFVFKNIDGYFKIYSKHTPINLVRDLPQGFSALEPLVDLPIGINITRFQTLLALHRSYLTPGDSSSGWTAGAAAYYVGYLQPRTFLLKYNENGTITDAVDCALDPLSETKCTLKSFTVEKGIYQTSNFRVQPTESIVRFPNITNLCPFGEVFNATRFASVYAWNRKRISNCVADYSVLYNSASFSTFKCYGVSPTKLNDLCFTNVYADSFVIRGDEVRQIAPGQTGKIADYNYKLPDDFTGCVIAWNSNNLDSKVGGNYNYLYRLFRKSNLKPFERDISTEIYQAGSTPCNGVEGFNCYFPLQSYGFQPTNGVGYQPYRVVVLSFELLHAPATVCGPKKSTNLVKNKCVNFNFNGLTGTGVLTESNKKFLPFQQFGRDIADTTDAVRDPQTLEILDITPCSFGGVSVITPGTNTSNQVAVLYQGVNCTEVPVAIHADQLTPTWRVYSTGSNVFQTRAGCLIGAEHVNNSYECDIPIGAGICASYQTQTNSPRRARSVASQSIIAYTMSLGAENSVAYSNNSIAIPTNFTISVTTEILPVSMTKTSVDCTMYICGDSTECSNLLLQYGSFCTQLNRALTGIAVEQDKNTQEVFAQVKQIYKTPPIKDFGGFNFSQILPDPSKPSKRSFIEDLLFNKVTLADAGFIKQYGDCLGDIAARDLICAQKFNGLTVLPPLLTDEMIAQYTSALLAGTITSGWTFGAGAALQIPFAMQMAYRFNGIGVTQNVLYENQKLIANQFNSAIGKIQDSLSSTATALGKLQDVVNQNAQALNTLVKCLSSNFGAISSVLNDILSRLDKVEAEVQIDRLITGRLQCLQTYVTQQLIRAAEIRASANLAATKMSECVLGQSKRVDFCGKGYHLMSFPQSAPHGVVFLHVTYVPAQEKNFTTAPAICHDGKAHFPREGVFVSNGTHWFVTQRNFYEPQIITTDNTFVSGNCDVVIGIVNNTVYDPLQPELDSFKEELDKYFKNHTSPDVDLGDISGINASVVNIQKEIDRLNEVAKNLNESLIDLQELGKYEQYIKGGSGYIPEAPRDGQAYVRKDGEWVLLSTFL

SEQ ID NO: 6330 - protein, 1241 aa, Artificial Sequence
  SARS-CoV-2/Belgium/BC-03016/2020__EPI_ISL_415157 spike protein (1-1211)(Q965C_S1003C) Foldon construct
MFVFLVLLPLVSSQCVNLTTRTQLPPAYTNSFTRGVYYPDKVFRSSVLHSTQDLFLPFFSNVTWFHAIHVSGTNGTKRFDNPVLPFNDGVYFASTEKSNIIRGWIFGTTLDSKTQSLLIVNNATNVVIKVCEFQFCNDPFLGVYYHKNNKSWMESEFRVYSSANNCTFEYVSQPFLMDLEGKQGNFKNLREFVFKNIDGYFKIYSKHTPINLVRDLPQGFSALEPLVDLPIGINITRFQTLLALHRSYLTPGDSSSGWTAGAAAYYVGYLQPRTFLLKYNENGTITDAVDCALDPLSETKCTLKSFTVEKGIYQTSNFRVQPTESIVRFPNITNLCPFGEVFNATRFASVYAWNRKRISNCVADYSVLYNSASFSTFKCYGVSPTKLNDLCFTNVYADSFVIRGDEVRQIAPGQTGKIADYNYKLPDDFTGCVIAWNSNNLDSKVGGNYNYLYRLFRKSNLKPFERDISTEIYQAGSTPCNGVEGFNCYFPLQSYGFQPTNGVGYQPYRVVVLSFELLHAPATVCGPKKSTNLVKNKCVNFNFNGLTGTGVLTESNKKFLPFQQFGRDIADTTDAVRDPQTLEILDITPCSFGGVSVITPGTNTSNQVAVLYQGVNCTEVPVAIHADQLTPTWRVYSTGSNVFQTRAGCLIGAEHVNNSYECDIPIGAGICASYQTQTNSPRRARSVASQSIIAYTMSLGAENSVAYSNNSIAIPTNFTISVTTEILPVSMTKTSVDCTMYICGDSTECSNLLLQYGSFCTQLNRALTGIAVEQDKNTQEVFAQVKQIYKTPPIKDFGGFNFSQILPDPSKPSKRSFIEDLLFNKVTLADAGFIKQYGDCLGDIAARDLICAQKFNGLTVLPPLLTDEMIAQYTSALLAGTITSGWTFGAGAALQIPFAMQMAYRFNGIGVTQNVLYENQKLIANQFNSAIGKIQDSLSSTAPALGKLQDVVNQNAQALNTLVKCLSSNFGAISSVLNDILSRLDKVEAEVQIDRLITGRLQCLQTYVTQQLIRAAEIRASANLAATKMSECVLGQSKRVDFCGKGYHLMSFPQSAPHGVVFLHVTYVPAQEKNFTTAPAICHDGKAHFPREGVFVSNGTHWFVTQRNFYEPQIITTDNTFVSGNCDVVIGIVNNTVYDPLQPELDSFKEELDKYFKNHTSPDVDLGDISGINASVVNIQKEIDRLNEVAKNLNESLIDLQELGKYEQYIKGGSGYIPEAPRDGQAYVRKDGEWVLLSTFL

SEQ ID NO: 6331 - protein, 1241 aa, Artificial Sequence
  SARS-CoV-2/Germany/BavPat3/2020__EPI_ISL_414521 spike protein (1-1211)(Q965C_S1003C) Foldon construct
MFVFLVLLPLVSSQCVNLTTRTQLPPAYTNSFTRGVYYPDKVFRSSVLHSTQDLFLPFFSNVTWFHAIHVSGTNGTKRFDNPVLPFNDGVYFASTEKSNIIRGWIFGTTLDSKTQSLLIVNNATNVVIKVCEFQFCNDPFLGVYYHKNNKSWMESEFRVYSSANNCTFEYVSQPFLMDLEGKQGNFKNLREFVFKNIDGYFKIYSKHTPINLVRDLPQGFSALEPLVDLPIGINITRFQTLLALHRSYLTPGDSSSGWTAGAAAYYVGYLQPRTFLLKYNENGTITDAVDCALDPLSETKCTLKSFTVEKGIYQTSNFRVQPTESIVRFPNITNLCPFGEVFNATRFASVYAWNRKRISNCVADYSVLYNSASFSTFKCYGVSPTKLNDLCFTNVYADSFVIRGDEVRQIAPGQTGKIADYNYKLPDDFTGCVIAWNSNNLDSKVGGNYNYLYRLFRKSNLKPFERDISTEIYQAGSTPCNGVEGFNCYFPLQSYGFQPTNGVGYQPYRVVVLSFELLHAPATVCGPKKSTNLVKNKCVNFNFNGLTGTGVLTESNKKFLPFQQFGRDIADTTDAVRDPQTLEILDITPCSFGGVSVITPGTNTSNQVAVLYQDVNCTEVPVAIHADQLTPTWRVYSTGSNVFQTRAGCLIGAEHVNNSYECDIPIGAGICASYQTQTNSPRRARSVASQSIIAYTMSLGAENSVAYSNNSIAIPTNFTISVTTEILPVSMTKTSVDCTMYICGDSTECSNLLLQYGSFCTQLNRALTGIAVEQDKNTQQVFAQVKQIYKTPPIKDFGGFNFSQILPDPSKPSKRSFIEDLLFNKVTLADAGFIKQYGDCLGDIAARDLICAQKFNGLTVLPPLLTDEMIAQYTSALLAGTITSGWTFGAGAALQIPFAMQMAYRFNGIGVTQNVLYENQKLIANQFNSAIGKIQDSLSSTASALGKLQDVVNQNAQALNTLVKCLSSNFGAISSVLNDILSRLDKVEAEVQIDRLITGRLQCLQTYVTQQLIRAAEIRASANLAATKMSECVLGQSKRVDFCGKGYHLMSFPQSAPHGVVFLHVTYVPAQEKNFTTAPAICHDGKAHFPREGVFVSNGTHWFVTQRNFYEPQIITTDNTFVSGNCDVVIGIVNNTVYDPLQPELDSFKEELDKYFKNHTSPDVDLGDISGINASVVNIQKEIDRLNEVAKNLNESLIDLQELGKYEQYIKGGSGYIPEAPRDGQAYVRKDGEWVLLSTFL

SEQ ID NO: 6332 - protein, 1241 aa, Artificial Sequence
  SARS-CoV-2/France/HF1805/2020__EPI_ISL_414628 spike protein (1-1211)(Q965C_S1003C) Foldon construct
MFVFLVLLPLVSSQCVNLTTRTQLPPAYTNSFTRGVYYPDKVFRSSVLHSTQDLFLPFFSNVTWFHAIHVSGTNGTKRFDNPVLPFNDGVYFASTEKSNIIRGWIFGTTLDSKTQSLLIVNNATNVVIKVCEFQFCNDPFLGVYYHKNNKSWMESEFRVYSSANNCTFEYVSQPFLMDLEGKQGNFKNLREFVFKNIDGYFKIYSKHTPINLVRDLPQGFSALEPLVDLPIGINITRFQTLLALHRSYLTPGDSSSGWTAGAAAYYVGYLQPRTFLLKYNENGTITDAVDCALDPLSETKCTLKSFTVEKGIYQTSNFRVQPTESIVRFPNITNLCPFGEVFNATRFASVYAWNRKRISNCVADYSVLYNSASFSTFKCYGVSPTKLNDLCFTNVYADSFVIRGDEVRQIAPGQTGKIADYNYKLPDDFTGCVIAWNSNNLDSKVGGNYNYLYRLFRKSNLKPFERDISTEIYQAGSTPCNGVEGFNCYFPLQSYGFQPTNGVGYQPYRVVVLSFELLHAPATVCGPKKSTNLVKNKCVNFNFNGLTGTGVLTESNKKFLPFQQFGRDIADTTDAVRDPQTLEILDITPCSFGGVSVITPGTNTSNQVAVLYQGVNCTEVPVAIHADQLTPTWRVYSTGSNVFQTRAGCLIGAEHVNNSYECDIPIGAGICASYQTQTNSPRRARSVASQSIIAYTMSLGAENSVAYSNNSIAIPTNFTISVTTEILPVSMTKTSVDCTMYICGDSTECSNLLLQYGSFCTQLNRALTGIAVEQDKNTQEVFAQVKQIYKTPPIKDFGGFNFSQILPDPSKPSKRSFIEDLLFNKVTLADAGFIKQYGDCLGDIAARDLICAQKFNGLTVLPPLLTDEMIAQYTSALLAGTITSGWTFGAGAALQIPFAMQMAYRFNGIGVTQNVLYENQKLIANQFNSAIGKIQDSLSSTASALGKLQDVVNQNAQALNTLVKCLSSNFGAISSVLNDILSRLDKVEAEVQIDRLITGRLQCLQTYVTQQLIRAAEIRASANLAATKMSECVLGQSKRVDFCGKGYHLMSFPQSAPHGVVFLHVTYVPAQEKNFTTAPAICHDGKAHFPREGVFVSNGTHWFVTQRNFYEPQIITTDNTFVSGNCDVVIGVVNNTVYDPLQPELDSFKEELDKYFKNHTSPDVDLGDISGINASVVNIQKEIDRLNEVAKNLNESLIDLQELGKYEQYIKGGSGYIPEAPRDGQAYVRKDGEWVLLSTFL

SEQ ID NO: 6333 - protein, 1241 aa, Artificial Sequence
  SARS-CoV-2/Netherlands/ZuidHolland_9/2020__EPI_ISL_414445 spike protein (1-1211)(Q965C_S1003C) Foldon construct
MFVFLVLLPLVSSQCVNLTTRTQLPPAYTNSFTRGVYYPDKVFRSSVLHSTQDLFLPFFSNVTWFHAIHVSGTNGTKRFDNPVLPFNDGVYFASTEKSNIIRGWIFGTTLDSKTQSLLIVNNATNVVIKVCEFQFCNDPFLGVYYHKNNKSWMESEFRVYSSANNCTFEYVSQPFLMDLEGKQGNFKNLREFVFKNIDGYFKIYSKHTPINLVRDLPQGFSALEPLVDLPIGINITRFQTLLALHRSYLTPGDSSSGWTAGAAAYYVGYLQPRTFLLKYNENGTITDAVDCALDPLSETKCTLKSFTVEKGIYQTSNFRVQPTESIVRFPNITNLCPFGEVFNATRFASVYAWNRKRISNCVADYSVLYNSASFSTFKCYGVSPTKLNDLCFTNVYADSFVIRGDEVRQIAPGQTGKIADYNYKLPDDFTGCVIAWNSNNLDSKVGGNYNYLYRLFRKSNLKPFERDISTEIYQAGSTPCNGVEGFNCYFPLQSYGFQPTNGVGYQPYRVVVLSFELLHAPATVCGPKKSTNLVKNKCVNFNFNGLTGTGVLTESNKKFLPFQQFGRDIADTTDAVRDPQTLEILDITPCSFGGVSVITPGTNTSNQVAVLYQGVNCTEVPVAIHADQLTPTWRVYSTGSNVFQTRAGCLIGAEHVNNSYECDIPIGAGICASYQTQTNSPRRARSVASQSIIAYTMSLGAENSVAYSNNSIAIPTNFTISVTTEILPVSMTKTSVDCTMYICGDSTECSNLLLQYGSFCTQLNRALTGIAVEQDKNTQEVFAQVKQIYKTPPIKDFGGFNFSQILPDPSKPSKRSFIEDLLFNKVTLADAGFIKQYGDCLGDIAARDLICVQKFNGLTVLPPLLTDEMIAQYTSALLAGTITSGWTFGAGAALQIPFAMQMAYRFNGIGVTQNVLYENQKLIANQFNSAIGKIQDSLSSTASALGKLQDVVNQNAQALNTLVKCLSSNFGAISSVLNDILSRLDKVEAEVQIDRLITGRLQCLQTYVTQQLIRAAEIRASANLAATKMSECVLGQSKRVDFCGKGYHLMSFPQSAPHGVVFLHVTYVPAQEKNFTTAPAICHDGKAHFPREGVFVSNGTHWFVTQRNFYEPQIITTDNTFVSGNCDVVIGIVNNTVYDPLQPELDSFKEELDKYFKNHTSPDVDLGDISGINASVVNIQKEIDRLNEVAKNLNESLIDLQELGKYEQYIKGGSGYIPEAPRDGQAYVRKDGEWVLLSTFL

SEQ ID NO: 6334 - protein, 1241 aa, Artificial Sequence
  SARS-CoV-2/Finland/FIN03032020A/2020__EPI_ISL_413602 spike protein (1-1211)(Q965C_S1003C) Foldon construct
MFVFLVLLPLVSSQCVNLTTRTQLPPAYTNSFTRGVYYPDKVFRSSVLHSTQDLFLPFFSNVTWFHAIHVSGTNGTKRFDNPVLPFNDGVYFASTEKSNIIRGWIFGTTLDSKTQSLLIVNNATNVVIKVCEFQFCNDPFLGVYYHKNNKSWMESEFRVYSSANNCTFEYVSQPFLMDLEGKQGNFKNLREFVFKNIDGYFKIYSKHTPINLVRDLPQGFSALEPLVDLPIGINITRFQTLLALHRSYLTPGDSSSGWTAGAAAYYVGYLQPRTFLLKYNENGTITDAVDCALDPLSETKCTLKSFTVEKGIYQTSNFRVQPTESIVRFPNITNLCPFGEVFNATRFASVYAWNRKRISNCVADYSVLYNSASFSTFKCYGVSPTKLNDLCFTNVYADSFVIRGDEVRQIAPGQTGKIADYNYKLPDDFTGCVISWNSNNLDSKVGGNYNYLYRLFRKSNLKPFERDISTEIYQAGSTPCNGVEGFNCYFPLQSYGFQPTNGVGYQPYRVVVLSFELLHAPATVCGPKKSTNLVKNKCVNFNFNGLTGTGVLTESNKKFLPFQQFGRDIADTTDAVRDPQTLEILDITPCSFGGVSVITPGTNTSNQVAVLYQGVNCTEVPVAIHADQLTPTWRVYSTGSNVFQTRAGCLIGAEHVNNSYECDIPIGAGICASYQTQTNSPRRARSVASQSIIAYTMSLGAENSVAYSNNSIAIPTNFTISVTTEILPVSMTKTSVDCTMYICGDSTECSNLLLQYGSFCTQLNRALTGIAVEQDKNTQEVFAQVKQIYKTPPIKDFGGFNFSQILPDPSKPSKRSFIEDLLFNKVTLADAGFIKQYGDCLGDIAARDLICAQKFNGLTVLPPLLTDEMIAQYTSALLAGTITSGWTFGAGAALQIPFAMQMAYRFNGIGVTQNVLYENQKLIANQFNSAIGKIQDSLSSTASALGKLQDVVNQNAQALNTLVKCLSSNFGAISSVLNDILSRLDKVEAEVQIDRLITGRLQCLQTYVTQQLIRAAEIRASANLAATKMSECVLGQSKRVDFCGKGYHLMSFPQSAPHGVVFLHVTYVPAQEKNFTTAPAICHDGKAHFPREGVFVSNGTHWFVTQRNFYEPQIITTDNTFVSGNCDVVIGIVNNTVYDPLQPELDSFKEELDKYFKNHTSPDVDLGDISGINASVVNIQKEIDRLNEVAKNLNESLIDLQELGKYEQYIKGGSGYIPEAPRDGQAYVRKDGEWVLLSTFL

SEQ ID NO: 6335 - protein, 1241 aa, Artificial Sequence
  SARS-CoV-2/France/GE1977/2020__EPI_ISL_414632 spike protein (1-1211)(Q965C_S1003C) Foldon construct
MFVFLVLLPLVSSQCVNLTTRTQLPPAYTNSFTRGVYYPDKVFRSSVLHSTQDLFLPFFSNVTWFHAIHVSGTNGTKRFDNPVLPFNDGVYFASTEKSNIIRGWIFGTTLDSKTQSLLIVNNATNVVIKVCEFQFCNDPFLGVYYHKNNKSWMESEFRVYSSANNCTFEYVSQPFLMDLEGKQGNFKNLREFVFKNIDGYFKIYSKHTPINLVRDLPQGFSALEPLVDLPIGINITRFQTLLALHRSYLTPGDSSSGWTAGAAAYYVGYLQPRTFLLKYNENGTITDAVDCALDPLSETKCTLKSFTVEKGIYQTSNFRVQPTESIVRFPNITNLCPFGEVFNATRFASVYAWNRKRISNCVADYSVLYNSASFSTFKCYGVSPTKLNDLCFTNVYADSFVIRGDEVRQIAPGQTGKIADYNYKLPDDFTGCVIAWNSNNLDSKVGGNYNYLYRLFRKSNLKPFERDISTEIYQAGSTPCNGVEGFNCYFPLQSYGFQPTNGVGYQPYRVVVLSFELLHAPATVCGPKKSTNLVKNKCVNFNFNGLTGTGVLTESNKKFLPFQQFGRDIADTTDAVRDPQTLEILDITPCSFGGVSVITPGTNTSNQVAVLYQGVNCTEVPVAIHADQLTPTWRVYSTGSNVFQTRAGCLIGAEHVNNSYECDIPIGAGICASYQTQTNSPRRARSVASQSIIAYTMSLGAENSVAYSNNSIAIPTNFTISVTTEILPVSMTKTSVDCTMYICGDSTECSNLLLQYGSFCTQLNRALTGIAVEQDKNTQEVFAQVKQIYKTPPIKDFGGFNFSQILPDPSKPSKRSFIEDLLFNKVTLADAGFIKQYGDCLGDIAARDLICAQKFNGLTVLPPLLTDEMIAQYTSALLAGTITSGWTFGAGAALQIPFAMQMAYRFNGIGVTQNVLYENQKLIANQFNSAIGKIQDSLFSTASALGKLQDVVNQNAQALNTLVKCLSSNFGAISSVLNDILSRLDKVEAEVQIDRLITGRLQCLQTYVTQQLIRAAEIRASANLAATKMSECVLGQSKRVDFCGKGYHLMSFPQSAPHGVVFLHVTYVPAQEKNFTTAPAICHDGKAHFPREGVFVSNGTHWFVTQRNFYEPQIITTDNTFVSGNCDVVIGIVNNTVYDPLQPELDSFKEELDKYFKNHTSPDVDLGDISGINASVVNIQKEIDRLNEVAKNLNESLIDLQELGKYEQYIKGGSGYIPEAPRDGQAYVRKDGEWVLLSTFL

SEQ ID NO: 6336 - protein, 1241 aa, Artificial Sequence
  SARS-CoV-2/Finland/FIN-313/2020__EPI_ISL_414641 spike protein (1-1211)(Q965C_S1003C) Foldon construct
MFVFLVLLPLVSSQCVNLTTRTQLPPAYTNSFTRGVYYPDKVFRSSVLHSTQDLFLPFFSNVTWFHAIHVSGTNGTKRFDNPVLPFNDGVYFASTEKSNIIRGWIFGTTLDSKTQSLLIVNNATNVVIKVCEFQFCNDPFLGVYYHKNNKSWMESEFRVYSSANNCTFEYVSQPFLMDLEGKQGNFKNLREFVFKNIDGYFKIYSKHTPINLVRDLPQGFSALEPLVDLPIGINITRFKTLLALHRSYLTPGDSSSGWTAGAAAYYVGYLQPRTFLLKYNENGTITDAVDCALDPLSETKCTLKSFTVEKGIYQTSNFRVQPTESIVRFPNITNLCPFGEVFNATRFASVYAWNRKRISNCVADYSVLYNSASFSTFKCYGVSPTKLNDLCFTNVYADSFVIRGDEVRQIAPGQTGKIADYNYKLPDDFTGCVIAWNSNNLDSKVGGNYNYLYRLFRKSNLKPFERDISTEIYQAGSTPCNGVEGFNCYFPLQSYGFQPTNGVGYQPYRVVVLSFELLHAPATVCGPKKSTNLVKNKCVNFNFNGLTGTGVLTESNKKFLPFQQFGRDIADTTDAVRDPQTLEILDITPCSFGGVSVITPGTNTSNQVAVLYQGVNCTEVPVAIHADQLTPTWRVYSTGSNVFQTRAGCLIGAEHVNNSYECDIPIGAGICASYQTQTNSPRRARSVASQSIIAYTMSLGAENSVAYSNNSIAIPTNFTISVTTEILPVSMTKTSVDCTMYICGDSTECSNLLLQYGSFCTQLNRALTGIAVEQDKNTQEVFAQVKQIYKTPPIKDFGGFNFSQILPDPSKPSKRSFIEDLLFNKVTLADAGFIKQYGDCLGDIAARDLICAQKFNGLTVLPPLLTDEMIAQYTSALLAGTITSGWTFGAGAALQIPFAMQMAYRFNGIGVTQNVLYENQKLIANQFNSAIGKIQDSLSSTASALGKLQDVVNQNAQALNTLVKCLSSNFGAISSVLNDILSRLDKVEAEVQIDRLITGRLQCLQTYVTQQLIRAAEIRASANLAATKMSECVLGQSKRVDFCGKGYHLMSFPQSAPHGVVFLHVTYVPAQEKNFTTAPAICHDGKAHFPREGVFVSNGTHWFVTQRNFYEPQIITTDNTFVSGNCDVVIGIVNNTVYDPLQPELDSFKEELDKYFKNHTSPDVDLGDISGINASVVNIQKEIDRLNEVAKNLNESLIDLQELGKYEQYIKGGSGYIPEAPRDGQAYVRKDGEWVLLSTFL

SEQ ID NO: 6337 - protein, 1241 aa, Artificial Sequence
  SARS-CoV-2/Netherlands/ZuidHolland_2/2020__EPI_ISL_414556 spike protein (1-1211)(Q965C_S1003C) Foldon construct
MFVFLVLLPLVSSQCVNLTTRTQLPPAYTNSFTRGVYYPDKVFRSSVLHSTQDLFLPFFSNVTWFHAIHVSGTNGTKRFDNPVLPFNDGVYFASTEKSNIIRGWIFGTTLDSKTQSLLIVNNATNVVIKVCEFQFCNDPFLGVYYHKNNKSWMESEFRVYSSANNCTFEYVSQPFLMDLEGKQGNFKNLREFVFKNIDGYFKIYSKHTPINLVRDLPQGFSALEPLVDLPIGINITRFQTLLALHRSYLTPGDSSSGWTAGAAAYYVGYLQPRTFLLKYNENGTITDAVDCALDPLSETKCTLKSFTVEKGIYQTSNFRVQPTESIVRFPNITNLCPFGEVFNATRFASVYAWNRKRISNCVADYSVLYNSASFSTFKCYGVSPTKLNDLCFTNVYADSFVIRGDEVRQIAPGQTGKIADYNYKLPDDFTGCVIAWNSNNLDSKVGGNYNYLYRLFRKSNLKPFERDISTEIYQAGSTPCNGVEGFNCYFPLQSYGFQPTNGVGYQPYRVVVLSFELLHAPATVCGPKKSTNLVKNKCVNFNFNGLTGTGVLTESNKKFLPFQQFGRDIADTTDAVRDPQTLEILDITPCSFGGVSVITPGTNTSNQVAVLYQGVNCTEVPVAIHADQLTPTWRVYSTGSNVFQTRAGCLIGAEHVNNSYECDIPIGAGICASYQTQTNSPRRARSVASQSIIAYTMSLGAENSVAYSNNSIAIPTNFTISVTTEILPVSMTKTSVDCTMYICGDSTECSNLLLQYGSFCTQLNRALTGIALEQDKNTQEVFAQVKQIYKTPPIKDFGGFNFSQILPDPSKPSKRSFIEDLLFNKVTLADAGFIKQYGDCLGDIAARDLICAQKFNGLTVLPPLLTDEMIAQYTSALLAGTITSGWTFGAGAALQIPFAMQMAYRFNGIGVTQNVLYENQKLIANQFNSAIGKIQDSLSSTASALGKLQDVVNQNAQALNTLVKCLSSNFGAISSVLNDILSRLDKVEAEVQIDRLITGRLQCLQTYVTQQLIRAAEIRASANLAATKMSECVLGQSKRVDFCGKGYHLMSFPQSAPHGVVFLHVTYVPAQEKNFTTAPAICHDGKAHFPREGVFVSNGTHWFVTQRNFYEPQIITTDNTFVSGNCDVVIGIVNNTVYDPLQPELDSFKEELDKYFKNHTSPDVDLGDISGINASVVNIQKEIDRLNEVAKNLNESLIDLQELGKYEQYIKGGSGYIPEAPRDGQAYVRKDGEWVLLSTFL

SEQ ID NO: 6338 - protein, 1241 aa, Artificial Sequence
  SARS-CoV-2/USA/WA-UW31/2020__EPI_ISL_414618 spike protein (1-1211)(Q965C_S1003C) Foldon construct
MFVFLVLLPLVSSQCVNLTTRTQLPPAYTNSFTRGVYYPDKVFRSSVLHSTQDLFLPFFSNVTWFHAIHVSGTNGTKRFDNPVLPFNDGVYFASTEKSNIIRGWIFGTTLDSKTQSLLIVNNATNVVIKVCEFQFCNDPFLGVYYHKNNKSWMESEFRVYSSANNCTFEYVSQPFLMDLEGKQGNFKNLREFVFKNIDGYFKIYSKHTPINLVRDLPQGFSALEPLVDLPIGINITRFQTLLALHRSYLTPGDSSSGWTAGAAAYYVGYLQPRTFLLKYNENGTITDAVDCALDPLSETKCTLKSFTVEKGIYQTSNFRVQPTESIVRFPNITNLCPFGEVFNATRFASVYAWNRKRISNCVADYSVLYNSASFSTFKCYGVSPTKLNDLCFTNVYADSFVIRGDEVRQIAPGQTGKIADYNYKLPDDFTGCVIAWNSNNLDSKVGGNYNYLYRLFRKSNLKPFERDISTEIYQAGSTPCNGAEGFNCYFPLQSYGFQPTNGVGYQPYRVVVLSFELLHAPATVCGPKKSTNLVKNKCVNFNFNGLTGTGVLTESNKKFLPFQQFGRDIADTTDAVRDPQTLEILDITPCSFGGVSVITPGTNTSNQVAVLYQDVNCTEVPVAIHADQLTPTWRVYSTGSNVFQTRAGCLIGAEHVNNSYECDIPIGAGICASYQTQTNSPRRARSVASQSIIAYTMSLGAENSVAYSNNSIAIPTNFTISVTTEILPVSMTKTSVDCTMYICGDSTECSNLLLQYGSFCTQLNRALTGIAVEQDKNTQEVFAQVKQIYKTPPIKDFGGFNFSQILPDPSKPSKRSFIEDLLFNKVTLADAGFIKQYGDCLGDIAARDLICAQKFNGLTVLPPLLTDEMIAQYTSALLAGTITSGWTFGAGAALQIPFAMQMAYRFNGIGVTQNVLYENQKLIANQFNSAIGKIQDSLSSTASALGKLQDVVNQNAQALNTLVKCLSSNFGAISSVLNDILSRLDKVEAEVQIDRLITGRLQCLQTYVTQQLIRAAEIRASANLAATKMSECVLGQSKRVDFCGKGYHLMSFPQSAPHGVVFLHVTYVPAQEKNFTTAPAICHDGKAHFPREGVFVSNGTHWFVTQRNFYEPQIITTDNTFVSGNCDVVIGIVNNTVYDPLQPELDSFKEELDKYFKNHTSPDVDLGDISGINASVVNIQKEIDRLNEVAKNLNESLIDLQELGKYEQYIKGGSGYIPEAPRDGQAYVRKDGEWVLLSTFL

SEQ ID NO: 6339 - protein, 1241 aa, Artificial Sequence
  SARS-CoV-2/South Korea/SNU01/2020__EPI_ISL_411929 spike protein (1-1211)(Q965C_S1003C) Foldon construct
MFVFLVLLPLVSSQCVNLTTRTQLPPAYTNSFTRGVYYPDKVFRSSVLHSTQDLFLPFFSNVTWFHAIHVSGTNGTKRFDNPVLPFNDGVYFASTEKSNIIRGWIFGTTLDSKTQSLLIVNNATNVVIKVCEFQFCNDPFLGVYYHKNNKSWMESEFRVYSSANNCTFEYVSQPFLMDLEGKQGNFKNLREFVFKNIDGYFKIYSKHTPINLVRDLPQGFWALEPLVDLPIGINITRFQTLLALHRSYLTPGDSSSGWTAGAAAYYVGYLQPRTFLLKYNENGTITDAVDCALDPLSETKCTLKSFTVEKGIYQTSNFRVQPTESIVRFPNITNLCPFGEVFNATRFASVYAWNRKRISNCVADYSVLYNSASFSTFKCYGVSPTKLNDLCFTNVYADSFVIRGDEVRQIAPGQTGKIADYNYKLPDDFTGCVIAWNSNNLDSKVGGNYNYLYRLFRKSNLKPFERDISTEIYQAGSTPCNGVEGFNCYFPLQSYGFQPTNGVGYQPYRVVVLSFELLHAPATVCGPKKSTNLVKNKCVNFNFNGLTGTGVLTESNKKFLPFQQFGRDIADTTDAVRDPQTLEILDITPCSFGGVSVITPGTNTSNQVAVLYQDVNCTEVPVAIHADQLTPTWRVYSTGSNVFQTRAGCLIGAEHVNNSYECDIPIGAGICASYQTQTNSPRRARSVASQSIIAYTMSLGAENSVAYSNNSIAIPTNFTISVTTEILPVSMTKTSVDCTMYICGDSTECSNLLLQYGSFCTQLNRALTGIAVEQDKNTQEVFAQVKQIYKTPPIKDFGGFNFSQILPDPSKPSKRSFIEDLLFNKVTLADAGFIKQYGDCLGDIAARDLICAQKFNGLTVLPPLLTDEMIAQYTSALLAGTITSGWTFGAGAALQIPFAMQMAYRFNGIGVTQNVLYENQKLIANQFNSAIGKIQDSLSSTASALGKLQDVVNQNAQALNTLVKCLSSNFGAISSVLNDILSRLDKVEAEVQIDRLITGRLQCLQTYVTQQLIRAAEIRASANLAATKMSECVLGQSKRVDFCGKGYHLMSFPQSAPHGVVFLHVTYVPAQEKNFTTAPAICHDGKAHFPREGVFVSNGTHWFVTQRNFYEPQIITTDNTFVSGNCDVVIGIVNNTVYDPLQPELDSFKEELDKYFKNHTSPDVDLGDISGINASVVNIQKEIDRLNEVAKNLNESLIDLQELGKYEQYIKGGSGYIPEAPRDGQAYVRKDGEWVLLSTFL

SEQ ID NO: 6340 - protein, 1241 aa, Artificial Sequence
  SARS-CoV-2/China/WF0004/2020__EPI_ISL_413694 spike protein (1-1211)(Q965C_S1003C) Foldon construct
MFVFLVLLPLVSSQCVNLTTRTQLPPAYTNSFTRGVYYPDKVFRSSVLHSTQDLFLPFFSNVTWFHAIHVSGTNGTKRFDNPVLPFNDGVYFASTEKSNIIRGWIFGTTLDSKTQSLLIVNNATNVVIKVCEFQFCNDPFLGVYYHKNNKSWTESEFRVYSSANNCTFEYVSQPFLMDLEGKQGNFKNLREFVFKNIDGYFKIYSKHTPINLVRDLPQGFSALEPLVDLPIGINITRFQTLLALHRSYLTPGDSSSGWTAGAAAYYVGYLQPRTFLLKYNENGTITDAVDCALDPLSETKCTLKSFTVEKGIYQTSNFRVQPTESIVRFPNITNLCPFGEVFNATRFASVYAWNRKRISNCVADYSVLYNSASFSTFKCYGVSPTKLNDLCFTNVYADSFVIRGDEVRQIAPGQTGKIADYNYKLPDDFTGCVIAWNSNNLDSKVGGNYNYLYRLFRKSNLKPFERDISTEIYQAGSTPCNGVEGFNCYFPLQSYGFQPTNGVGYQPYRVVVLSFELLHAPATVCGPKKSTNLVKNKCVNFNFNGLTGTGVLTESNKKFLPFQQFGRDIADTTDAVRDPQTLEILDITPCSFGGVSVITPGTNTSNQVAVLYQDVNCTEVPVAIHADQLTPTWRVYSTGSNVFQTRAGCLIGAEHVNNSYECDIPIGAGICASYQTQTNSPRRARSVASQSIIAYTMSLGAENSVAYSNNSIAIPTNFTISVTTEILPVSMTKTSVDCTMYICGDSTECSNLLLQYGSFCTQLNRALTGIAVEQDKNTQEVFAQVKQIYKTPPIKDFGGFNFSQILPDPSKPSKRSFIEDLLFNKVTLADAGFIKQYGDCLGDIAARDLICAQKFNGLTVLPPLLTDEMIAQYTSALLAGTITSGWTFGAGAALQIPFAMQMAYRFNGIGVTQNVLYENQKLIANQFNSAIGKIQDSLSSTASALGKLQDVVNQNAQALNTLVKCLSSNFGAISSVLNDILSRLDKVEAEVQIDRLITGRLQCLQTYVTQQLIRAAEIRASANLAATKMSECVLGQSKRFDFCGKGYHLMSFPQSAPHGVVFLHVTYVPAQEKNFTTAPAICHDGKAHFPREGVFVSNGTHWFVTQRNFYEPQIITTDNTFVSGNCDVVIGIVNNTVYDPLQPELDSFKEELDKYFKNHTSPDVDLGDISGINASVVNIQKEIDRLNEVAKNLNESLIDLQELGKYEQYIKGGSGYIPEAPRDGQAYVRKDGEWVLLSTFL

SEQ ID NO: 6341 - protein, 1241 aa, Artificial Sequence
  SARS-CoV-2/China/WF0028/2020__EPI_ISL_413791 spike protein (1-1211)(Q965C_S1003C) Foldon construct
MFVFLVLLPLVSSQCVNLTTRTQLPPAYTNSFTRGVYYPDKVFRSSVLHSTQDLFLPFFSNVTWFHAIHVSGTNGTKRFDNPVLPFNDGVYFASTEKSNIIRGWIFGTTLDSKTQSLLIVNNATNVVIKVCEFQFCNDPFLGVYYHKNNKSWMESEFRVYSSANNCTFEYVSQPFLMDLEGKQGNFKNLREFVFKNIDGYFKIYSKHTPINLVRDLPQGFSALEPLVDLPIGINITRFQTLLALHRSYLTPGDSSSGWTAGAAAYYVGYLQPRTFLLKYNENGTITDAVDCALDPLSETKCTLKSFTVEKGIYQTSNFRVQPTESIVRFPNITNLCPFGEVFNATRFASVYAWNRKRISNCVADYSVLYNSASFSTFKCYGVSPTKLNDLCFTNVYADSFVIRGDEVRQIAPGQTGKIADYNYKLPDDFTGCVIAWNSNNLDSKVGGNYNYLYRLFRKSNLKPFERDISTEIYQAGSTPCNGVEGFNCYFPLQSYGFQPTNGVGYQPYRVVVLSFELLHAPATVCGPKKSTNLVKNKCVNFNFNGLTGTGVLTESNKKFLPFQQFGRDIADTTDAVRDPQTLEILDITPCSFGGVSVITPGTNTSNQVAVLYQDVNCTEVPVAIHADQLTPTWRVYSTGSNVFQTRAGCLIGAEHVNNSYECDIPIGAGICASYQTQTNSPRRARSVASQSIIAYTMSLGAENSVAYSNNSIAIPTNFTISVTTEILPVSMTKTSVDCTMYICGDSTECSNLLLQYGSFCTQLNRALTGIAVEQDKNTQEVFAQVKQIYKTPPIKDFGGFNFSQILPDPSKPSKRSFIEDLLFNKVTLADAGFIKQYGDCLGDIAARDLICAQKFNGLTVLPPLLTDEMIAQYTSALLAGTITSGWTFGAGAALQIPFAMQMAYRFNGIGVTQNVLYENQKLIANQFNSAIGKIQDSLSSTASALGKLQDVVNQNAQALNTLVKCLSSNFGAISSVLNDILSRLDKVEAEVQIDRLITGRLQCLQTYVTQQLIRAAEIRASANLAATKMSECVLGQSKRVDFCGKGYHLMSFPQSAPHGVVFLHVTYVPAQEKNFTTAPAICHDGKAHFPREGVFVSNGTHWFVTQRNFYEPQIITTDNTFVSGNCDVVIGIVNNTVYDPLQPELESFKEELDKYFKNHTSPDVDLGDISGINASVVNIQKEIDRLNEVAKNLNESLIDLQELGKYEQYIKGGSGYIPEAPRDGQAYVRKDGEWVLLSTFL

SEQ ID NO: 6342 - protein, 1241 aa, Artificial Sequence
  SARS-CoV-2/2019-nCoV/USA-CruiseA-18/2020__MT159716.1 spike protein (1-1211)(Q965C_S1003C) Foldon construct
MFVFLVLLPLVSSQCVNLTTRTQLPPAYTNSFTRGVYYPDKVFRSSVLHSTQDLFLPFFSNVTWFHAIHVSGTNGTKRFDNPVLPFNDGVYFASTEKSNIIRGWIFGTTLDSKTQSLLIVNNATNVVIKVCEFQFCNDPFLGVYYHKNNKSWMESELRVYSSANNCTFEYVSQPFLMDLEGKQGNFKNLREFVFKNIDGYFKIYSKHTPINLVRDLPQGFSALEPLVDLPIGINITRFQTLLALHRSYLTPGDSSSGWTAGAAAYYVGYLQPRTFLLKYNENGTITDAVDCALDPLSETKCTLKSFTVEKGIYQTSNFRVQPTESIVRFPNITNLCPFGEVFNATRFASVYAWNRKRISNCVADYSVLYNSASFSTFKCYGVSPTKLNDLCFTNVYADSFVIRGDEVRQIAPGQTGKIADYNYKLPDDFTGCVIAWNSNNLDSKVGGNYNYLYRLFRKSNLKPFERDISTEIYQAGSTPCNGVEGFNCYFPLQSYGFQPTNGVGYQPYRVVVLSFELLHAPATVCGPKKSTNLVKNKCVNFNFNGLTGTGVLTESNKKFLPFQQFGRDIADTTDAVRDPQTLEILDITPCSFGGVSVITPGTNTSNQVAVLYQDVNCTEVPVAIHADQLTPTWRVYSTGSNVFQTRAGCLIGAEHVNNSYECDIPIGAGICASYQTQTNSPRRARSVASQSIIAYTMSLGAENSVAYSNNSIAIPTNFTISVTTEILPVSMTKTSVDCTMYICGDSTECSNLLLQYGSFCTQLNRALTGIAVEQDKNTQEVFAQVKQIYKTPPIKDFGGFNFSQILPDPSKPSKRSFIEDLLFNKVTLADAGFIKQYGDCLGDIAARDLICAQKFNGLTVLPPLLTDEMIAQYTSALLAGTITSGWTFGAGAALQIPFAMQMAYRFNGIGVTQNVLYENQKLIANQFNSAIGKIQDSLSSTASALGKLQDVVNQNAQALNTLVKCLSSNFGAISSVLNDILSRLDKVEAEVQIDRLITGRLQCLQTYVTQQLIRAAEIRASANLAATKMSECVLGQSKRVDFCGKGYHLMSFPQSAPHGVVFLHVTYVPAQEKNFTTAPAICHDGKAHFPREGVFVSNGTHWFVTQRNFYEPQIITTDNTFVSGNCDVVIGIVNNTVYDPLQPELDSFKEELDKYFKNHTSPDVDLGDISGINASVVNIQKEIDRLNEVAKNLNESLIDLQELGKYEQYIKGGSGYIPEAPRDGQAYVRKDGEWVLLSTFL

SEQ ID NO: 6343 - protein, 1241 aa, Artificial Sequence
  SARS-CoV-2/SARS-CoV-2/Yunnan-01/human/2020/CHN__MT049951.1 spike protein (1-1211)(Q965C_S1003C) Foldon construct
MFVFLVLLPLVSSQCVNLTTRTQLPPANTNSFTRGVYYPDKVFRSSVLHSTQDLFLPFFSNVTWFHAIHVSGTNGTKRFDNPVLPFNDGVYFASTEKSNIIRGWIFGTTLDSKTQSLLIVNNATNVVIKVCEFQFCNDPFLGVYYHKNNKSWMESEFRVYSSANNCTFEYVSQPFLMDLEGKQGNFKNLREFVFKNIDGYFKIYSKHTPINLVRDLPQGFSALEPLVDLPIGINITRFQTLLALHRSYLTPGDSSSGWTAGAAAYYVGYLQPRTFLLKYNENGTITDAVDCALDPLSETKCTLKSFTVEKGIYQTSNFRVQPTESIVRFPNITNLCPFGEVFNATRFASVYAWNRKRISNCVADYSVLYNSASFSTFKCYGVSPTKLNDLCFTNVYADSFVIRGDEVRQIAPGQTGKIADYNYKLPDDFTGCVIAWNSNNLDSKVGGNYNYLYRLFRKSNLKPFERDISTEIYQAGSTPCNGVEGFNCYFPLQSYGFQPTNGVGYQPYRVVVLSFELLHAPATVCGPKKSTNLVKNKCVNFNFNGLTGTGVLTESNKKFLPFQQFGRDIADTTDAVRDPQTLEILDITPCSFGGVSVITPGTNTSNQVAVLYQDVNCTEVPVAIHADQLTPTWRVYSTGSNVFQTRAGCLIGAEHVNNSYECDIPIGAGICASYQTQTNSPRRARSVASQSIIAYTMSLGAENSVAYSNNSIAIPTNFTISVTTEILPVSMTKTSVDCTMYICGDSTECSNLLLQYGSFCTQLNRALTGIAVEQDKNTQEVFAQVKQIYKTPPIKDFGGFNFSQILPDPSKPSKRSFIEDLLFNKVTLADAGFIKQYGDCLGDIAARDLICAQKFNGLTVLPPLLTDEMIAQYTSALLAGTITSGWTFGAGAALQIPFAMQMAYRFNGIGVTQNVLYENQKLIANQFNSAIGKIQDSLSSTASALGKLQDVVNQNAQALNTLVKCLSSNFGAISSVLNDILSRLDKVEAEVQIDRLITGRLQCLQTYVTQQLIRAAEIRASANLAATKMSECVLGQSKRVDFCGKGYHLMSFPQSAPHGVVFLHVTYVPAQEKNFTTAPAICHDGKAHFPREGVFVSNGTHWFVTQRNFYEPQIITTDNTFVSGNCDVVIGIVNNTVYDPLQPELDSFKEELDKYFKNHTSPDVDLGDISGINASVVNIQKEIDRLNEVAKNLNESLIDLQELGKYEQYIKGGSGYIPEAPRDGQAYVRKDGEWVLLSTFL

SEQ ID NO: 6344 - protein, 1241 aa, Artificial Sequence
  SARS-CoV-2/USA/WA-UW292/2020__EPI_ISL_418077 spike protein (1-1211)(Q965C_S1003C) Foldon construct
MFVFLVLLPLVSSQCVNLTTRTQLPPAYTNSFTRGVYYPDKVFRSSVLHSTQDLFLPFFSNVTWFHAIHVSGTNGTKRFDNPVLPFNDGVYFASTEKSNIIRGWIFGTTLDSKTQSLLIVNNATNVVIKVCEFQFCNDPFLGVYYHKNNKSWMESEFRVYSSANNCTFEYVSQPFLMDLEGKQGNFKNLREFVFKNIDGYFKIYSKHTPINLVRDLPQGFSALEPLVDLPIGINITRFQTLLALHRSYLTPGDSSSGWTAGAAAYYVGYLQPRTFLLKYNENGTITDAVDCALDPLSETKCTLKSFTVEKGIYQTSNFRVQPTESIVRFPNITNLCPFGEVFNATRFASVYAWNRKRISNCVADYSVLYNSASFSTFKCYGVSPTKLNDLCFTNVYADSFVIRGDEVRQIAPGQTGKIADYNYKLPDDFTGCVIAWNSNNLDSKVGGNYNYLYRLFRKSNLKPFERDISTEIYQASSTPCNGVEGFNCYFPLQSYGFQPTNGVGYQPYRVVVLSFELLHAPATVCGPKKSTNLVKNKCVNFNFNGLTGTGVLTESNKKFLPFQQFGRDIADTTDAVRDPQTLEILDITPCSFGGVSVITPGTNTSNQVAVLYQDVNCTEVPVAIHADQLTPTWRVYSTGSNVFQTRAGCLIGAEHVNNSYECDIPIGAGICASYQTQTNSPRRARSVASQSIIAYTMSLGAENSVAYSNNSIAIPTNFTISVTTEILPVSMTKTSVDCTMYICGDSTECSNLLLQYGSFCTQLNRALTGIAVEQDKNTQEVFAQVKQIYKTPPIKDFGGFNFSQILPDPSKPSKRSFIEDLLFNKVTLADAGFIKQYGDCLGDIAARDLICAQKFNGLTVLPPLLTDEMIAQYTSALLAGTITSGWTFGAGAALQIPFAMQMAYRFNGIGVTQNVLYENQKLIANQFNSAIGKIQDSLSSTASALGKLQDVVNQNAQALNTLVKCLSSNFGAISSVLNDILSRLDKVEAEVQIDRLITGRLQCLQTYVTQQLIRAAEIRASANLAATKMSECVLGQSKRVDFCGKGYHLMSFPQSAPHGVVFLHVTYVPAQEKNFTTAPAICHDGKAHFPREGVFVSNGTHWFVTQRNFYEPQIITTDNTFVSGNCDVVIGIVNNTVYDPLQPELDSFKEELDKYFKNHTSPDVDLGDISGINASVVNIQKEIDRLNEVAKNLNESLIDLQELGKYEQYIKGGSGYIPEAPRDGQAYVRKDGEWVLLSTFL

SEQ ID NO: 6345 - protein, 1241 aa, Artificial Sequence
  SARS-CoV-2/Iceland/192/2020__EPI_ISL_417819 spike protein (1-1211)(Q965C_S1003C) Foldon construct
MFVFFVLLPLVSSQCVNLTTRTQLPPAYTNSFTRGVYYPDKVFRSSVLHSTQDLFLPFFSNVTWFHAIHVSGTNGTKRFDNPVLPFNDGVYFASTEKSNIIRGWIFGTTLDSKTQSLLIVNNATNVVIKVCEFQFCNDPFLGVYYHKNNKSWMESEFRVYSSANNCTFEYVSQPFLMDLEGKQGNFKNLREFVFKNIDGYFKIYSKHTPINLVRDLPQGFSALEPLVDLPIGINITRFQTLLALHRSYLTPGDSSSGWTAGAAAYYVGYLQPRTFLLKYNENGTITDAVDCALDPLSETKCTLKSFTVEKGIYQTSNFRVQPTESIVRFPNITNLCPFGEVFNATRFASVYAWNRKRISNCVADYSVLYNSASFSTFKCYGVSPTKLNDLCFTNVYADSFVIRGDEVRQIAPGQTGKIADYNYKLPDDFTGCVIAWNSNNLDSKVGGNYNYLYRLFRKSNLKPFERDISTEIYQAGSTPCNGVEGFNCYFPLQSYGFQPTNGVGYQPYRVVVLSFELLHAPATVCGPKKSTNLVKNKCVNFNFNGLTGTGVLTESNKKFLPFQQFGRDIADTTDAVRDPQTLEILDITPCSFGGVSVITPGTNTSNQVAVLYQGVNCTEVPVAIHADQLTPTWRVYSTGSNVFQTRAGCLIGAEHVNNSYECDIPIGAGICASYQTQTNSPRRARSVASQSIIAYTMSLGAENSVAYSNNSIAIPTNFTISVTTEILPVSMTKTSVDCTMYICGDSTECSNLLLQYGSFCTQLNRALTGIAVEQDKNTQEVFAQVKQIYKTPPIKDFGGFNFSQILPDPSKPSKRSFIEDLLFNKVTLADAGFIKQYGDCLGDIAARDLICAQKFNGLTVLPPLLTDEMIAQYTSALLAGTITSGWTFGAGAALQIPFAMQMAYRFNGIGVTQNVLYENQKLIANQFNSAIGKIQDSLSSTASALGKLQDVVNQNAQALNTLVKCLSSNFGAISSVLNDILSRLDKVEAEVQIDRLITGRLQCLQTYVTQQLIRAAEIRASANLAATKMSECVLGQSKRVDFCGKGYHLMSFPQSAPHGVVFLHVTYVPAQEKNFTTAPAICHDGKAHFPREGVFVSNGTHWFVTQRNFYEPQIITTDNTFVSGNCDVVIGIVNNTVYDPLQPELDSFKEELDKYFKNHTSPDVDLGDISGINASVVNIQKEIDRLNEVAKNLNESLIDLQELGKYEQYIKGGSGYIPEAPRDGQAYVRKDGEWVLLSTFL

SEQ ID NO: 6346 - protein, 1241 aa, Artificial Sequence
  SARS-CoV-2/Belgium/ULG-6939/2020__EPI_ISL_417020 spike protein (1-1211)(Q965C_S1003C) Foldon construct
MFVFLVLLPLVSSQCVNLTTRTQLPPAYTNSFTRGVYYPDKVFRSSVLHSTQDLFLPFFSNVTWFHAIHVSGTNGTKRFDNPVLPFNDGVYFASTEKSNIIRGWIFGTTLDSKTQSLLIVNNATNVVIKVCEFQFCNDPFLGVYYHKNNKSWMESEFRVYSSANNCTFEYVSQPFLMDLEGKQGNFKNLREFVFKNIDGYFKIYSKHTPINLVRDLPQGFSALEPLVDLPIGINITRFQTLLALHRSYLTPGDSSSGWTAGAAAYYVGYLQPRTFLLKYNENGTITDAVDCALDPLSETKCTLKSFTVEKGIYQTSNFRVQPTESIVRFPNITNLCPFGEVFNATRFASVYAWNRKRISNCVADYSVLYNSASFSTFKCYGVSPTKLNDLCFTNVYADSFVIRGDEVRQIAPGQTGKIADYNYKLPDDFTGCVIAWNSNNLDSKVGGNYNYLYRLFRKSNLKPFERDISTEIYQAGSTPCNGVEGFNCYFPLQSYGFQPTNGVGYQPYRVVVLSFELLHAPATVCGPKKSTNLVKNKCVNFNFNGLTGTGVLTESNKKFLPFQQFGRDIADTTDAVRDPQTLEILDITPCSFGGVSVITPGTNTSNQVAVLYQGVNCTEVPVAIHADQLTPTWRVYSTGSNVFQTRAGCLIGAEHVNNSYECDIPIGAGICASYQTQTNSPRRARSVASQSIIAYTMSLGAENSVVYSNNSIAIPTNFTISVTTEILPVSMTKTSVDCTMYICGDSTECSNLLLQYGSFCTQLNRALTGIAVEQDKNTQEVFAQVKQIYKTPPIKDFGGFNFSQILPDPSKPSKRSFIEDLLFNKVTLADAGFIKQYGDCLGDIAARDLICAQKFNGLTVLPPLLTDEMIAQYTSALLAGTITSGWTFGAGAALQIPFAMQMAYRFNGIGVTQNVLYENQKLIANQFNSAIGKIQDSLSSTASALGKLQDVVNQNAQALNTLVKCLSSNFGAISSVLNDILSRLDKVEAEVQIDRLITGRLQCLQTYVTQQLIRAAEIRASANLAATKMSECVLGQSKRVDFCGKGYHLMSFPQSAPHGVVFLHVTYVPAQEKNFTTAPAICHDGKAHFPREGVFVSNGTHWFVTQRNFYEPQIITTDNTFVSGNCDVVIGIVNNTVYDPLQPELDSFKEELDKYFKNHTSPDVDLGDISGINASVVNIQKEIDRLNEVAKNLNESLIDLQELGKYEQYIKGGSGYIPEAPRDGQAYVRKDGEWVLLSTFL

SEQ ID NO: 6347 - protein, 1241 aa, Artificial Sequence
  SARS-CoV-2/France/HF2496/2020__EPI_ISL_418231 spike protein (1-1211)(Q965C_S1003C) Foldon construct
MFVFLVLLPLVSSQCVNLTTRTQLPPAYTNSFTRGVYYPDKVFRSSVLHSTQDLFLPFFSNVTWFHAIHVSGTNGTKRFDNPVLPFNDGVYFASTEKSNIIRGWIFGTTLDSKTQSLLIVNNATNVVIKVCEFQFCNDPFLGVYYHKNNKSWMESEFRVYSSANNCTFEYVSQPFLMDLEGKQGNFKNLREFVFKNIDGYFKIYSKHTPINLVRDLPQGFSALEPLVDLPIGINITRFQTLLALHRSYLTPGDSSSGWTAGAAAYYVGYLQPRTFLLKYNENGTITDAVDCALDPLSETKCTLKSFTVEKGIYQTSNFRVQPTESIVRFPNITNLCPFGEVFNATRFASVYAWNRKRISNCVADYSVLYNSASFSTFKCYGVSPTKLNDLCFTNVYADSFVIRGDEVRQIAPGQTGKIADYNYKLPDDFTGCVIAWNSNNLDSKVGGNYNYLYRLFRKSNLKPFERDISTEIYQAGSTPCNGVEGFNCYFPLQSYGFQPTNGVGYQPYRVVVLSFELLHAPATVCGPKKSTNLVKNKCVNFNFNGLTGTGVLTESNKKFLPFQQFGRDIADTTDAVRDPQTLEILDITPCSFGGVSVITPGTNTSNQVAVLYQGVNCTEVPVAIHADQLTPTWRVYSTGSNVFQTRAGCLIGAEHVNNSYECDIPIGAGICASYQTQTNSPRRARSVASQSIIAYTMSLGAENSVAYSNNSIAIPTNFTISVTTEILPVSMTKTSVDCTMYICGDSTECSNLLLQYGSFCTQLNRALTGIAVEQDKNTQEVFAQVKQIYKTPPIKDFGGFNFSQILPDPSKPSKRSFIEDLLFNKVTLADAGFIKQYGDCLGDIVARDLICAQKFNGLTVLPPLLTDEMIAQYTSALLAGTITSGWTFGAGAALQIPFAMQMAYRFNGIGVTQNVLYENQKLIANQFNSAIGKIQDSLSSTASALGKLQDVVNQNAQALNTLVKCLSSNFGAISSVLNDILSRLDKVEAEVQIDRLITGRLQCLQTYVTQQLIRAAEIRASANLAATKMSECVLGQSKRVDFCGKGYHLMSFPQSAPHGVVFLHVTYVPAQEKNFTTAPAICHDGKAHFPREGVFVSNGTHWFVTQRNFYEPQIITTDNTFVSGNCDVVIGIVNNTVYDPLQPELDSFKEELDKYFKNHTSPDVDLGDISGINASVVNIQKEIDRLNEVAKNLNESLIDLQELGKYEQYIKGGSGYIPEAPRDGQAYVRKDGEWVLLSTFL

SEQ ID NO: 6348 - protein, 1241 aa, Artificial Sequence
  SARS-CoV-2/USA/WA-UW291/2020__EPI_ISL_418076 spike protein (1-1211)(Q965C_S1003C) Foldon construct
MFVFLVLLPLVSSQCVNLTTRTQLPPAYTNSFTRGVYYPDKVFRSSVLHSTQDLFLPFFSNVTWFHAIHVSGTNGTKRFDNPVLPFNDGVYFASTEKSNIIRGWIFGTTLDSKTQSLLIVNNATNVVIKVCEFQFCNDPFLGVYYHKNNKSWMESEFRVYSSANNCTFEYVSQPFLMDLEGKQGNFKNLREFVFKNIDGYFKIYSKHTPINLVRDLPQGFSALEPLVDLPIGINITRFQTLLALHRSYLTPGDSSSGWTAGAAAYYVGYLQPRTFLLKYNENGTITDAVDCALDPLSETKCTLKSFTVEKGIYQTSNFRVQPTESIVRFPNITNLCPFGEVFNATRFASVYAWNRKRISNCVADYSVLYNSASFSTFKCYGVSPTKLNDLCFTNVYADSFVIRGDEVRQIAPGQTGKIADYNYKLPDDFTGCVIAWNSNNLDSKVGGNYNYLYRLFRKSNLKPFERDISTEIYQAGSTPCNGVEGFNCYFPLQSYGFQPTNGVGYQPYRVVVLSFELLHAPATVCGPKKSTNLVKNKCVNFNFNGLTGTGVLTESNKKFLPFQQFGRDIADTTDAVRDPQTLEILDITPCSFGGVSVITPGTNTSNQVAVLYQGVNCTEVPVAIHADQLTPTWRVYSTGSNVFQTRAGCLIGAEHVNNSYECDIPIGAGICASYQTQTNSPRRARSVASQSIIAYTMSLGAENSVAYSNNSIAIPTNFTISVTTEILPVSMTKTSVDCTMYICGDSTECSNLLLQYGSFCTQLNRALTGIAVEQDKNTQEVFAQVKQIYKTPPIKDFGGFNFSQILPDPSKPSKRSFIEDLLFNKVTLADAGFIKQYGDCLGDIAARDLICAQKFNGLTVLPPLLTDEMIAQYTSALLAGTITSGWTFGAGAALQIPFAMQMAYRFNGIGVTQNVLYENQKLIANQFNSAIGKIQYSLSSTASALGKLQDVVNQNAQALNTLVKCLSSNFGAISSVLNDILSRLDKVEAEVQIDRLITGRLQCLQTYVTQQLIRAAEIRASANLAATKMSECVLGQSKRVDFCGKGYHLMSFPQSAPHGVVFLHVTYVPAQEKNFTTAPAICHDGKAHFPREGVFVSNGTHWFVTQRNFYEPQIITTDNTFVSGNCDVVIGIVNNTVYDPLQPELDSFKEELDKYFKNHTSPDVDLGDISGINASVVNIQKEIDRLNEVAKNLNESLIDLQELGKYEQYIKGGSGYIPEAPRDGQAYVRKDGEWVLLSTFL

SEQ ID NO: 6349 - protein, 1241 aa, Artificial Sequence; identical to SEQ ID NO: 6312
  SARS-CoV-2/Portugal/PT0034/2020__EPI_ISL_418019 spike protein (1-1211)(Q965C_S1003C) Foldon construct

SEQ ID NO: 6350 - protein, 1241 aa, Artificial Sequence
  SARS-CoV-2/Iceland/202/2020__EPI_ISL_417750 spike protein (1-1211)(Q965C_S1003C) Foldon construct
MFVFLVLLPLVSSQCVNLTTRTQLPPAYTNSFTRGVYYPDKVFRSSVLHSTQDLFLPFFSNVTWFHAIHVSGTNGTKRFDNPVLPFNDGVYFASTEKSNIIRGWIFGTTLDSKTQSLLIVNNATNVVIKVCEFQFCNDPFLGVYYHKNNKSWMESEFRVYSSANNCTFEYVSQPFLMDLEGKQGNFKNLREFVFKNIDGYFKIYSKHTPINLVRDLPQGFSALEPLVDLPIGINITRFQTLLALHRSYLTPGDSSSGWTAGAAAYYVGYLQPRTFLLKYNENGTITDAVDCALDPLSETKCTLKSFTVEKGIYQTSNFRVQPTESIVRFPNITNLCPFGEVFNATRFASVYAWNRKRISNCVADYSVLYNSASFSTFKCYGVSPTKLNDLCFTNVYADSFVIRGDEVRQIAPGQTGKIADYNYKLPDDFTGCVIAWNSNNLDSKVGGNYNYLYRLFRKSNLKPFERDISTEIYQAGSTPCNGVEGFNCYFPLQSYGFQPTNGVGYQPYRVVVLSFELLHAPATVCGPKKSTNLVKNKCVNFNFNGLTGTGVLTESNKKFLPFQQFGRDIADTTDAVRDPQTLEILDITPCSFGGVSVITPGTNTSNQVAVLYQDVNCTEVPVAIHADQLTPTWRVYSTGSNVFQTRAGCLIGAEHVNNSYECDIPIGAGICASYQTQTNSPRRARSVASQSIIAYTMSLGAENSVAYSNNSIAIPTNFTISVTTEILPVSMTKTSVDCTMYICGDSTECSNLLLQYGSFCTQLNRALTGIAVEQDKNTQEVFAQVKQIYKTPPIKDFGGFNFSQILPDPSKPSKRSFIEDLLFNKVTLADAGFIKQYGDCLGDIAARDLICAQKFNGLTVLPPLLTDEMIAQYTSALLAGTITSGWTFGAGAALQIPFAMQMAYRFNGIGVTQNVLYENQKLIANQFNSAIGKIQDSLSSTASALGKLQDVVNQNAQALNTLVKCLSSNFGAISSVLNDILSRLDKVEAEVQIDRLITGRLQCLQTYVTQQLIRAAEIRASANLAATKMSECVLGQSKRVDFCGKGYHLMSFPQSAPHGVVFLHVTYVPAQEKNFTTAPAICHDGKAHFPREGVFVSNGTHWFVTQRNFYEPQIITTDNTFVSGNCDVVIGIVNNTVYDPLQPELDSFKEELDKYFKNHTSPDVDLGDIPGINASVVNIQKEIDRLNEVAKNLNESLIDLQELGKYEQYIKGGSGYIPEAPRDGQAYVRKDGEWVLLSTFL

SEQ ID NO: 6351 - protein, 1241 aa, Artificial Sequence
  SARS-CoV-2/USA/WA-UW261/2020__EPI_ISL_418046 spike protein (1-1211)(Q965C_S1003C) Foldon construct
MFVFLVLLPLVSSQCVNLTTRTQLPPAYTNSFTRGVYYPDKVFRSSVLHSTQDLFLPFFSNVTWFHAIHVSGTNGTKRFDNPVLPFNDGVYFASTEKSNIIRGWIFGTTLDSKTQSLLIVNNATNVVIKVCEFQFCNDPFLGVYYHKNNKSWMESEFRVYSSANNCTFEYVSQPFLMDLEGKQGNFKNLREFVFKNIDGYFKIYSKHTPINLVRDLPQGFSALEPLVDLPIGINITRFQTLLALHRSYLTPGDSSSGWTAGAAAYYVGYLQPRTFLLKYNENGTITDAVDCALDPLSETKCTLKSFTVEKGIYQTSNFRVQPTESIVRFPNITNLCPFGEVFNATRFTSVYAWNRKRISNCVADYSVLYNSASFSTFKCYGVSPTKLNDLCFTNVYADSFVIRGDEVRQIAPGQTGKIADYNYKLPDDFTGCVIAWNSNNLDSKVGGNYNYLYRLFRKSNLKPFERDISTEIYQAGSTPCNGVEGFNCYFPLQSYGFQPTNGVGYQPYRVVVLSFELLHAPATVCGPKKSTNLVKNKCVNFNFNGLTGTGVLTESNKKFLPFQQFGRDIADTTDAVRDPQTLEILDITPCSFGGVSVITPGTNTSNQVAVLYQDVNCTEVPVAIHADQLTPTWRVYSTGSNVFQTRAGCLIGAEHVNNSYECDIPIGAGICASYQTQTNSPRRARSVASQSIIAYTMSLGAENSVAYSNNSIAIPTNFTISVTTEILPVSMTKTSVDCTMYICGDSTECSNLLLQYGSFCTQLNRALTGIAVEQDKNTQEVFAQVKQIYKTPPIKDFGGFNFSQILPDPSKPSKRSFIEDLLFNKVTLADAGFIKQYGDCLGDIAARDLICAQKFNGLTVLPPLLTDEMIAQYTSALLAGTITSGWTFGAGAALQIPFAMQMAYRFNGIGVTQNVLYENQKLIANQFNSAIGKIQDSLSSTASALGKLQDVVNQNAQALNTLVKCLSSNFGAISSVLNDILSRLDKVEAEVQIDRLITGRLQCLQTYVTQQLIRAAEIRASANLAATKMSECVLGQSKRVDFCGKGYHLMSFPQSAPHGVVFLHVTYVPAQEKNFTTAPAICHDGKAHFPREGVFVSNGTHWFVTQRNFYEPQIITTDNTFVSGNCDVVIGIVNNTVYDPLQPELDSFKEELDKYFKNHTSPDVDLGDISGINASVVNIQKEIDRLNEVAKNLNESLIDLQELGKYEQYIKGGSGYIPEAPRDGQAYVRKDGEWVLLSTFL

SEQ ID NO: 6352 - protein, 1241 aa, Artificial Sequence
  SARS-CoV-2/Portugal/PT0035/2020__EPI_ISL_418020 spike protein (1-1211)(Q965C_S1003C) Foldon construct
MFVFLVLLPLVSSQCVNLTTRTQLPPAYTNSFTRGVYYPDKVFRSSVLHSTQDLFLPFFSNVTWFHAIHVSGTNGTKRFDNPVLPFNDGVYFASTEKSNIIRGWIFGTTLDSKTQSLLIVNNATNVVIKVCEFQFCNDPFLGVYYHKNNKSWMESEFRVYSSANNCTFEYVSQPFLMDLEGKQGNFKNLREFVFKNIDGYFKIYSKHTPINLVRDLPQGFSALEPLVDLPIGINITRFQTLLALHRSYLTPGDSSSGWTAGAAAYYVGYLQPRTFLLKYNENGTITDAVDCALDPLSETKCTLKSFTVEKGIYQTSNFRVQPTESIVRFPNITNLCPFGEVFNATRFASVYAWNRKRISNCVADYSVLYNSASFSTFKCYGVSPTKLNDLCFTNVYADSFVIRGDEVRQIAPGQTGKIADYNYKLPDDFTGCVIAWNSNNLDSKVGGNYNYLYRLFRKSNLKPFERDISTEIYQAGSTPCNGVEGFNCYFPLQSYGFQPTNGVGYQPYRVVVLSFELLHAPATVCGPKKSTNLVKNKCVNFNFNGLTGTGVLTESNKKFLPFQQFGRDIADTTDAVRDPQTLEILDITPCSFGGVSVITPGTNTSNQVAVLYQDVNCTEVPVAIHADQLTPTWRVYSTGSNVFQTRAGCLIGAEHVNNSYECDIPIGAGICASYQTQTNSPRRARSVASQSIIAYTMSLGAENSVAYSNNSIAIPTNFTISVTTEILPVSMTKTSVDCTMYICGDSTECSNLLLQYGSFCTQLNRALTGIAVEQDKNTQEVFAQVKQIYKTPPIKDFGGFNFSQILPDPSKPSKRSFIEDLLFNKVTLADAGFIKQYGDCLGDISARDLICAQKFNGLTVLPPLLTDEMIAQYTSALLAGTITSGWTFGAGAALQIPFAMQMAYRFNGIGVTQNVLYENQKLIANQFNSAIGKIQDSLSSTASALGKLQDVVNQNAQALNTLVKCLSSNFGAISSVLNDILSRLDKVEAEVQIDRLITGRLQCLQTYVTQQLIRAAEIRASANLAATKMSECVLGQSKRVDFCGKGYHLMSFPQSAPHGVVFLHVTYVPAQEKNFTTAPAICHDGKAHFPREGVFVSNGTHWFVTQRNFYEPQIITTDNTFVSGNCDVVIGIVNNTVYDPLQPELDSFKEELDKYFKNHTSPDVDLGDISGINASVVNIQKEIDRLNEVAKNLNESLIDLQELGKYEQYIKGGSGYIPEAPRDGQAYVRKDGEWVLLSTFL

SEQ ID NO: 6353 - protein, 1241 aa, Artificial Sequence
  SARS-CoV-2/USA/NY-NYUMC7/2020__EPI_ISL_418192 spike protein (1-1211)(Q965C_S1003C) Foldon construct
MFVFLVLLPLVSSQCVNLTTRTQLPPAYTNSFTRGVYYPDKVFRSSVLHSTQDLFLPFFSNVTWFHAIHVSGTNGTKRFDNPVLPFNDGVYFASTEKSNIIRGWIFGTTLDSKTQSLLIVNNATNVVIKVCEFQFCNDPFLGVYHHKNNKSWMESEFRVYSSANNCTFEYVSQPFLMDLEGKQGNFKNLREFVFKNIDGYFKIYSKHTPINLVRDLPQGFSALEPLVDLPIGINITRFQTLLALHRSYLTPGDSSSGWTAGAAAYYVGYLQPRTFLLKYNENGTITDAVDCALDPLSETKCTLKSFTVEKGIYQTSNFRVQPTESIVRFPNITNLCPFGEVFNATRFASVYAWNRKRISNCVADYSVLYNSASFSTFKCYGVSPTKLNDLCFTNVYADSFVIRGDEVRQIAPGQTGKIADYNYKLPDDFTGCVIAWNSNNLDSKVGGNYNYLYRLFRKSNLKPFERDISTEIYQAGSTPCNGVEGFNCYFPLQSYGFQPTNGVGYQPYRVVVLSFELLHAPATVCGPKKSTNLVKNKCVNFNFNGLTGTGVLTESNKKFLPFQQFGRDIADTTDAVRDPQTLEILDITPCSFGGVSVITPGTNTSNQVAVLYQGVNCTEVPVAIHADQLTPTWRVYSTGSNVFQTRAGCLIGAEHVNNSYECDIPIGAGICASYQTQTNSPRRARSVASQSIIAYTMSLGAENSVAYSNNSIAIPTNFTISVTTEILPVSMTKTSVDCTMYICGDSTECSNLLLQYGSFCTQLNRALTGIAVEQDKNTQEVFAQVKQIYKTPPIKDFGGFNFSQILPDPSKPSKRSFIEDLLFNKVTLADAGFIKQYGDCLGDIAARDLICAQKFNGLTVLPPLLTDEMIAQYTSALLAGTITSGWTFGAGAALQIPFAMQMAYRFNGIGVTQNVLYENQKLIANQFNSAIGKIQDSLSSTASALGKLQDVVNQNAQALNTLVKCLSSNFGAISSVLNDILSRLDKVEAEVQIDRLITGRLQCLQTYVTQQLIRAAEIRASANLAATKMSECVLGQSKRVDFCGKGYHLMSFPQSAPHGVVFLHVTYVPAQEKNFTTAPAICHDGKAHFPREGVFVSNGTHWFVTQRNFYEPQIITTDNTFVSGNCDVVIGIVNNTVYDPLQPELDSFKEELDKYFKNHTSPDVDLGDISGINASVVNIQKEIDRLNEVAKNLNESLIDLQELGKYEQYIKGGSGYIPEAPRDGQAYVRKDGEWVLLSTFL

SEQ ID NO: 6354 - protein, 1241 aa, Artificial Sequence
  SARS-CoV-2/Iceland/189/2020__EPI_ISL_417709 spike protein (1-1211)(Q965C_S1003C) Foldon construct
MFVFLVLLPLVSSQCVNLTTRTQLPPAYTNSFTRGVYYPDKVFRSSVLHSTQDLFLPFFSNVTWFHAIHVSGTNGTKRFDNPVLPFNDGVYFASTEKSNIIRGWIFGTTLDSKTQSLLIVNNATNVVIKVCEFQFCNDPFLGVYYHKNNKSWMESEFRVYSSANNCTFEYVSQPFLMDLEGKQGNFKNLREFVFKNIDGYFKIYSKHTPINLVRDLPQGFSALEPLVDLPIGINITRFQTLLALHRSYLTPGDSSSGWTAGAAAYYVGYLQPRTFLLKYNENGTITDAVDCALDPLSETKCTLKSFTVEKGIYQTSNFRVQPTESIVRFPNITNLCPFGEVFNATRFASVYAWNRKRISNCVADYSVLYNSASFSTFKCYGVSPTKLNDLCFTNVYADSFVIRGDEVRQIAPGQTGKIADYNYKLPDDFTGCVIAWNSNNLDSKVGGNYNYLYRLFRKSNLKPFERDISTEIYQAGSTPCNGVEGFNCYFPLQSYGFQPTNGVGYQPYRVVVLSFELLHAPATVCGPKKSTNLVKNKCVNFNFNGLTGTGVLTESNKKFLPFQQFGRDIADTTDAVRDPQTLEILDITPCSFGGVSVITPGTNTSNQVAVLYQGVNCTEVPVAIHADQLTPTWRVYSTGSNVFQTRAGCLIGAEHVNNSYECDIPIGAGICASYQTQTNSPRRARSVASQSIIAYTMSLGAENSVAYSNNSIAIPTNFTISVTTEILPVSMTKTSVDCTMYICGDSTECSNLLLQYGSFCTQLNRALTGIAVEQDKNTQEVFAQVKQIYKTPPIKDFGGFNFSQILPDPSKPSKRSFIEDLLFNKVTLADAGFTKQYGDCLGDIAARDLICAQKFNGLTVLPPLLTDEMIAQYTSALLAGTITSGWTFGAGAALQIPFAMQMAYRFNGIGVTQNVLYENQKLIANQFNSAIGKIQDSLSSTASALGKLQDVVNQNAQALNTLVKCLSSNFGAISSVLNDILSRLDKVEAEVQIDRLITGRLQCLQTYVTQQLIRAAEIRASANLAATKMSECVLGQSKRVDFCGKGYHLMSFPQSAPHGVVFLHVTYVPAQEKNFTTAPAICHDGKAHFPREGVFVSNGTHWFVTQRNFYEPQIITTDNTFVSGNCDVVIGIVNNTVYDPLQPELDSFKEELDKYFKNHTSPDVDLGDISGINASVVNIQKEIDRLNEVAKNLNESLIDLQELGKYEQYIKGGSGYIPEAPRDGQAYVRKDGEWVLLSTFL

SEQ ID NO: 6355 - protein, 1241 aa, Artificial Sequence
  SARS-CoV-2/Australia/NSW56/2020__EPI_ISL_417408 spike protein (1-1211)(Q965C_S1003C) Foldon construct
MFVFLVLLPLVSSQCVNLTTRTQLPPAYTNSFTRGVYYPDKVFRSSVLHSTQDLFLPFFSNVTWFHAIHVSGTNGTKRFDNPVLPFNDGVYFASTEKSNIIRGWIFGTTLDSKTQSLLIVNNATNVVIKVCEFQFCNDPFLGVYYHKNNKSWMESEFRVYSSANNCTFEYVSQPFLMDLEGKQGNFKNLREFVFKNIDGYFKIYSKHTPINLVRDLPQGFSALEPLVDLPIGINITRFQTLLALHRSYLTPGDSSSGWTAGAAAYYVGYLQPRTFLLKYNENGTITDAVDCALDPLSETKCTLKSFTVEKGIYQTSNFRVQPTESIVRFPNITNLCPFGEVFNATRFASVYAWNRKRISNCVADYSVLYNSASFSTFKCYGVSPTKLNDLCFTNVYADSFVIRGDEVRQIAPGQTGKIADYNYKLPDDFTGCVIAWNSNNLDSKVGGNYNYLYRLFRKSNLKPFERDISTEIYQAGSTPCNGVEGFNCYFPLQSYGFQPTNGVGYQPYRVVVLSFELLHAPATVCGPKKSTNLVKNKCVNFNFNGLTGTGVLTESNKKFLPFQQFGRDIADTTDAVRDPQTLEILDITPCSFGGVSVITPGTNTSNQVAVLYQDVNCTEVPVAIHADQLTPTWRVYSTGSNVFQTRAGCLIGAEHVNNSYECDIPIGAGICASYQTQTNSPRRARSVASQSIIAYTMSLGAENSVAYSNNSIAIPTNFTISVTTEILPVSMTKTSVDCTMYICGDSTECSNLLLQYGSFCTQLNRALTGIAVEQDKNTQEVFAQVKQIYKTPPIKDFGGFNFSQILPDSSKPSKRSFIEDLLFNKVTLADAGFIKQYGDCLGDIAARDLICAQKFNGLTVLPPLLTDEMIAQYTSALLAGTITSGWTFGAGAALQIPFAMQMAYRFNGIGVTQNVLYENQKLIANQFNSAIGKIQDSLSSTASALGKLQDVVNQNAQALNTLVKCLSSNFGAISSVLNDILSRLDKVEAEVQIDRLITGRLQCLQTYVTQQLIRAAEIRASANLAATKMSECVLGQSKRVDFCGKGYHLMSFPQSAPHGVVFLHVTYVPAQEKNFTTAPAICHDGKAHFPREGVFVSNGTHWFVTQRNFYEPQIITTDNTFVSGNCDVVIGIVNNTVYDPLQPELDSFKEELDKYFKNHTSPDVDLGDISGINASVVNIQKEIDRLNEVAKNLNESLIDLQELGKYEQYIKGGSGYIPEAPRDGQAYVRKDGEWVLLSTFL

SEQ ID NO: 6356 - protein, 1241 aa, Artificial Sequence
  SARS-CoV-2/Iceland/280/2020__EPI_ISL_417608 spike protein (1-1211)(Q965C_S1003C) Foldon construct
MFVFLVLLPLVSSQCVNLTTRTQLPPAYTNSFTRGVYYPDKVFRSSVLHSTQDLFLPFFSNVTWFHAIHVSGTNGTKRFDNPVLPFNDGVYFASTEKSNIIRGWIFGTTLDSKTQSLLIVNNATNVVIKVCEFQFCNDPFLGVYYHKNNKSWMESEFRVYSSANNCTFEYVSQPFLMDLEGKQGNFKNLREFVFKNIDGYFKIYSKHTPINLVRDLPQGFSALEPLVDLPIGINITRFQTLLALHRSYLTPGDSSSGWTAGAAAYYVGYLQPRTFLLKYNENGTITDAVDCALDPLSETKCTLKSFTVEKGIYQTSNFRVQPTESIVRFPNITNLCPFGEVFNATRFASVYAWNRKRISNCVADYSVLYNSASFSTFKCYGVSPTKLNDLCFTNVYADSFVIRGDEVRQIAPGQTGKIADYNYKLPDDFTGCVIAWNSNNLDSKVGGNYNYLYRLFRKSNLKPFERDISTEIYQAGSTPCNGVEGFNCYFPLQSYGFQPTNGVGYQPYRVVVLSFELLHAPATVCGPKKSTNLVKNKCVNFNFNGLTGTGVLTESNKKFLPFQQFGRDIADTTDAVRDPQTLEILDITPCSFGGVSVITPGTNTSNQVAVLYQGVNCTEVPVAIHADQLTPTWRVYSTGSNVFQTRAGCLIGAEHVNNSYECDIPIGAGICASYHTQTNSPRRARSVASQSIIAYTMSLGAENSVAYSNNSIAIPTNFTISVTTEILPVSMTKTSVDCTMYICGDSTECSNLLLQYGSFCTQLNRALTGIAVEQDKNTQEVFAQVKQIYKTPPIKDFGGFNFSQILPDPSKPSKRSFIEDLLFNKVTLADAGFIKQYGDCLGDIAARDLICAQKFNGLTVLPPLLTDEMIAQYTSALLAGTITSGWTFGAGAALQIPFAMQMAYRFNGIGVTQNVLYENQKLIANQFNSAIGKIQDSLSSTASALGKLQDVVNQNAQALNTLVKCLSSNFGAISSVLNDILSRLDKVEAEVQIDRLITGRLQCLQTYVTQQLIRAAEIRASANLAATKMSECVLGQSKRVDFCGKGYHLMSFPQSAPHGVVFLHVTYVPAQEKNFTTAPAICHDGKAHFPREGVFVSNGTHWFVTQRNFYEPQIITTDNTFVSGNCDVVIGIVNNTVYDPLQPELDSFKEELDKYFKNHTSPDVDLGDISGINASVVNIQKEIDRLNEVAKNLNESLIDLQELGKYEQYIKGGSGYIPEAPRDGQAYVRKDGEWVLLSTFL

SEQ ID NO: 6357 - protein, 1241 aa, Artificial Sequence; identical to SEQ ID NO: 6312
  SARS-CoV-2/Iceland/247/2020__EPI_ISL_417575 spike protein (1-1211)(Q965C_S1003C) Foldon construct

SEQ ID NO: 6358 - protein, 1241 aa, Artificial Sequence
  SARS-CoV-2/Iceland/238/2020__EPI_ISL_417566 spike protein (1-1211)(Q965C_S1003C) Foldon construct
MFVFLVLLPLVSSQCVNLTTRTQLPPAYTNSFTRGVYYPDKVFRSSVLHSTQDLFLPFFSNVTWFHAIHVSGTNGTKRFDNPVLPFNDGVYFASTEKSNIIRGWIFGTTLDSKTQSLLIVNNATNVVIKVCEFQFCNDPFLGVYYHKNNKSWMESEFRVYSSANNCTFEYVSQPFLMDLEGKQGNFKNLREFVFKNIDGYFKIYSKHTPINLVRDLPQGFSALEPLVDLPIGINITRFQTLLALHRSYLTPGDSSSGWTAGAAAYYVGYLQPRTFLLKYNENGTITDAVDCALDPLSETKCTLKSFTVEKGIYQTSNFRVQPTESIVRFPNITNLCPFGEVFNATRFASVYAWNRKRISNCVADYSVLYNSASFSTFKCYGVSPTKLNDLCFTNVYADSFVIRGDEVRQIAPGQTGKIADYNYKLPDDFTGCVIAWNSNNLDSKVGGNYNYLYRLFRKSNLKPFERDISTEIYQAGSTPCNGVEGFNCYFPLQSYGFQPTNGVGYQPYRVVVLSFELLHAPATVCGPKKSTNLVKNKCVNFNFNGLTGTGVLTESNKKFLPFQQFGRDIADTTDAVRDPQTLEILDITPCSFGGVSVITPGTNTSNQVAVLYQGVNCTEVPVAIHADQLTPTWRVYSTGSNVFQTRAGCLIGAEHVNNSYECDIPIGAGICASYQTQTNSPRRARSVASQSIIAYTMSLGAENSVAYSNNSIAIPTNFTISVTTEILPVSMTKTSVDCTMYICGDSTECSNLLLQYGSFCTQLNRALTGIAVEQDKNTQEVFAQVKQIYKTPPIKDFGGFNFSQILPDPSKPSKRSFIEDLLFNKVTLADVGFIKQYGDCLGDIAARDLICAQKFNGLTVLPPLLTDEMIAQYTSALLAGTITSGWTFGAGAALQIPFAMQMAYRFNGIGVTQNVLYENQKLIANQFNSAIGKIQDSLSSTASALGKLQDVVNQNAQALNTLVKCLSSNFGAISSVLNDILSRLDKVEAEVQIDRLITGRLQCLQTYVTQQLIRAAEIRASANLAATKMSECVLGQSKRVDFCGKGYHLMSFPQSAPHGVVFLHVTYVPAQEKNFTTAPAICHDGKAHFPREGVFVSNGTHWFVTQRNFYEPQIITTDNTFVSGNCDVVIGIVNNTVYDPLQPELDSFKEELDKYFKNHTSPDVDLGDISGINASVVNIQKEIDRLNEVAKNLNESLIDLQELGKYEQYIKGGSGYIPEAPRDGQAYVRKDGEWVLLSTFL

SEQ ID NO: 6359 - protein, 1241 aa, Artificial Sequence
  SARS-CoV-2/Greece/16/2020__EPI_ISL_418265 spike protein (1-1211)(Q965C_S1003C) Foldon construct
MFVFLVLLPLVSSQCVNLTTRTQLPPAYTNSFTRGVYYPDKVFRSSVLHSTQDLFLPFFSNVTWFHAIHVSGTNGTKRFDNPVLPFNDGVYFASTEKSNIIRGWIFGTTLDSKTQSLLIVNNATNVVIKVCEFQFCNDPFLGVYYHKNNKSWMESEFRVYSSANNCTFEYVSQPFLMDLEGKQGNFKNLREFVFKNVDGYFKIYSKHTPINLVRDLPQGFSALEPLVDLPIGINITRFQTLLALHRSYLTPGDSSSGWTAGAAAYYVGYLQPRTFLLKYNENGTITDAVDCALDPLSETKCTLKSFTVEKGIYQTSNFRVQPTESIVRFPNITNLCPFGEVFNATRFASVYAWNRKRISNCVADYSVLYNSASFSTFKCYGVSPTKLNDLCFTNVYADSFVIRGDEVRQIAPGQTGKIADYNYKLPDDFTGCVIAWNSNNLDSKVGGNYNYLYRLFRKSNLKPFERDISTEIYQAGSTPCNGVEGFNCYFPLQSYGFQPTNGVGYQPYRVVVLSFELLHAPATVCGPKKSTNLVKNKCVNFNFNGLTGTGVLTESNKKFLPFQQFGRDIADTTDAVRDPQTLEILDITPCSFGGVSVITPGTNTSNQVAVLYQDVNCTEVPVAIHADQLTPTWRVYSTGSNVFQTRAGCLIGAEHVNNSYECDIPIGAGICASYQTQTNSPRRARSVASQSIIAYTMSLGAENSVAYSNNSIAIPTNFTISVTTEILPVSMTKTSVDCTMYICGDSTECSNLLLQYGSFCTQLNRALTGIAVEQDKNTQEVFAQVKQIYKTPPIKDFGGFNFSQILPDPSKPSKRSFIEDLLFNKVTLADAGFIKQYGDCLGDIAARDLICAQKFNGLTVLPPLLTDEMIAQYTSALLAGTITSGWTFGAGAALQIPFAMQMAYRFNGIGVTQNVLYENQKLIANQFNSAIGKIQDSLSSTASALGKLQDVVNQNAQALNTLVKCLSSNFGAISSVLNDILSRLDKVEAEVQIDRLITGRLQCLQTYVTQQLIRAAEIRASANLAATKMSECVLGQSKRVDFCGKGYHLMSFPQSAPHGVVFLHVTYVPAQEKNFTTAPAICHDGKAHFPREGVFVSNGTHWFVTQRNFYEPQIITTDNTFVSGNCDVVIGIVNNTVYDPLQPELDSFKEELDKYFKNHTSPDVDLGDISGINASVVNIQKEIDRLNEVAKNLNESLIDLQELGKYEQYIKGGSGYIPEAPRDGQAYVRKDGEWVLLSTFL

SEQ ID NO: 6360 - protein, 1241 aa, Artificial Sequence
  SARS-CoV-2/Iceland/319/2020__EPI_ISL_417648 spike protein (1-1211)(Q965C_S1003C) Foldon construct
MFVFLVLLPLVSSQCVNLTTRTQLPPAYTNSFTRGVYYPDKVFRSSVLHSTQDLFLPFFSNVTWFHAIHVSGTNGTKRFDNPVLPFNDGVYFASTEKSNIIRGWIFGTTLDSKTQSLLIVNNATNVVIKVCEFQFCNDPFLGVYYHKNNKSWMESEFRVYSSANNCTFEYVSQPFLIDLEGKQGNFKNLREFVFKNIDGYFKIYSKHTPINLVRDLPQGFSALEPLVDLPIGINITRFQTLLALHRSYLTPGDSSSGWTAGAAAYYVGYLQPRTFLLKYNENGTITDAVDCALDPLSETKCTLKSFTVEKGIYQTSNFRVQPTESIVRFPNITNLCPFGEVFNATRFASVYAWNRKRISNCVADYSVLYNSASFSTFKCYGVSPTKLNDLCFTNVYADSFVIRGDEVRQIAPGQTGKIADYNYKLPDDFTGCVIAWNSNNLDSKVGGNYNYLYRLFRKSNLKPFERDISTEIYQAGSTPCNGVEGFNCYFPLQSYGFQPTNGVGYQPYRVVVLSFELLHAPATVCGPKKSTNLVKNKCVNFNFNGLTGTGVLTESNKKFLPFQQFGRDIADTTDAVRDPQTLEILDITPCSFGGVSVITPGTNTSNQVAVLYQGVNCTEVPVAIHADQLTPTWRVYSTGSNVFQTRAGCLIGAEHVNNSYECDIPIGAGICASYQTQTNSPRRARSVASQSIIAYTMSLGAENSVAYSNNSIAIPTNFTISVTTEILPVSMTKTSVDCTMYICGDSTECSNLLLQYGSFCTQLNRALTGIAVEQDKNTQEVFAQVKQIYKTPPIKDFGGFNFSQILPDPSKPSKRSFIEDLLFNKVTLADAGFIKQYGDCLGDIAARDLICAQKFNGLTVLPPLLTDEMIAQYTSALLAGTITSGWTFGAGAALQIPFAMQMAYRFNGIGVTQNVLYENQKLIANQFNSAIGKIQDSLSSTASALGKLQDVVNQNAQALNTLVKCLSSNFGAISSVLNDILSRLDKVEAEVQIDRLITGRLQCLQTYVTQQLIRAAEIRASANLAATKMSECVLGQSKRVDFCGKGYHLMSFPQSAPHGVVFLHVTYVPAQEKNFTTAPAICHDGKAHFPREGVFVSNGTHWFVTQRNFYEPQIITTDNTFVSGNCDVVIGIVNNTVYDPLQPELDSFKEELDKYFKNHTSPDVDLGDISGINASVVNIQKEIDRLNEVAKNLNESLIDLQELGKYEQYIKGGSGYIPEAPRDGQAYVRKDGEWVLLSTFL

SEQ ID NO: 6361 - protein, 1241 aa, Artificial Sequence
  SARS-CoV-2/Congo/94/2020__EPI_ISL_417947 spike protein (1-1211)(Q965C_S1003C) Foldon construct
MFVFLVLLPLVSSQCVNLTTRTQLPPAYTNSFTRGVYYPDKVFRSSVLHSTQDLFLPFFSNVTWFHAIHVSGTNGTKRFDNPVLPFNDGVYFASTEKSNIIRGWIFGTTLDSKTQSLLIVNNATNVVIKVCEFQFCNDPFLGVYYHKNNKSWMESEFRVYSSANNCTFEYVSQPFLMDLEGKQGNFKNLREFVFKNIDGYFKIYSKHTPINLVRDLPQGFSALEPLVDLPIGINITRFQTLLALHRSYLTPGDSSSGWTAGAAAYYVGYLQPRTFLLKYNENGTITDAVDCALDPLSETKCTLKSFTVEKGIYQTSNFRVQPTESIVRFPNITNLCPFGEVFNATRFASVYAWNRKRISNCVADYSVLYNSASFSTFKCYGVSPTKLNDLCFTNVYADSFVIRGDEVRQIAPGQTGKIADYNYKLPDDFTGCVIAWNSNNLDSKVGGNYNYLYRLFRKSNLKPFERDISTEIYQAGSTPCNGVEGFNCYFPLQSYGFQPTNGVGYQPYRVVVLSFELLHAPATVCGPKKSTNLVKNKCVNFNFNGLTGTGVLTESNKKFLPFQQFGRDIADTTDAVRDPQTLEILDITPCSFGGVSVITPGTNTSNQVAVLYQGVNCTEVPVAIHADQLTPTWRVYSTGSNVFQTRAGCLIGAEHVNNSYECDIPIGAGICASYQTQTNSPRRARSVASQSIIAYTMSLGAENSVAYSNNSIAIPTNFTISVTTEILPVSMTKTSVDCTMYICGDSTECSNLLLQYGSFCTQLNRALTGIAVEQDKNTQEVFAQVKQIYKTPPIKDFGGFNFSQILPDPSKPSKRSFIEDILFNKVTLADAGFIKQYGDCLGDIAARDLICAQKFNGLTVLPPLLTDEMIAQYTSALLAGTITSGWTFGAGAALQIPFAMQMAYRFNGIGVTQNVLYENQKLIANQFNSAIGKIQDSLSSTASALGKLQDVVNQNAQALNTLVKCLSSNFGAISSVLNDILSRLDKVEAEVQIDRLITGRLQCLQTYVTQQLIRAAEIRASANLAATKMSECVLGQSKRVDFCGKGYHLMSFPQSAPHGVVFLHVTYVPAQEKNFTTAPAICHDGKAHFPREGVFVSNGTHWFVTQRNFYEPQIITTDNTFVSGNCDVVIGIVNNTVYDPLQPELDSFKEELDKYFKNHTSPDVDLGDISGINASVVNIQKEIDRLNEVAKNLNESLIDLQELGKYEQYIKGGSGYIPEAPRDGQAYVRKDGEWVLLSTFL

SEQ ID NO: 6362 - protein, 1241 aa, Artificial Sequence
  SARS-CoV-2/Congo/158/2020__EPI_ISL_417950 spike protein (1-1211)(Q965C_S1003C) Foldon construct
MFVFLVLLPLVSSQCVNLTTRTQLPPAYTNSFTRGVYYPDKVFRSSVLHSTQDLFLPFFSNVTWFHAIHVSGTNGTKRFDNPVLPFNDGVYFASTEKSNIIRGWIFGTTLDSKTQSLLIVNNATNVVIKVCEFQFCNDPFLGVYYHKNNKSWMESEFRVYSSANNCTFEYVSQPFLMDLEGKQGNFKNLREFVFKNIDGYFKIYSKHTPINLVRDLPQGFSALEPLVDLPIGINITRFQTLLALHRSYLTPGDSSSGWTAGAAAYYVGYLQPRTFLLKYNENGTITDAVDCALDPLSETKCTLKSFTVEKGIYQTSNFRVQPTESIVRFPNITNLCPFGEVFNATRFASVYAWNRKRISNCVADYSVLYNSASFSTFKCYGVSPTKLNDLCFTNVYADSFVIRGDEVRQIAPGQTGKIADYNYKLPDDFTGCVIAWNSNNLDSKVGGNYNYLYRLFRKSNLKPFERDISTEIYQAGSTPCNGVEGFNCYFPLQSYGFQPTNGVGYQPYRVVVLSFELLHAPATVCGPKKSTNLVKNKCVNFNFNGLTGTGVLTESNKKFLPFQQFGRDIADTTDAVRDPQTLEILDITPCSFGGVSVITPGTNTSNQVAVLYQDVNCTEVPVAIHADQLTPTWRVYSTGSNVFQTRAGCLIGAEHVNNSYECDIPIGAGICASYQTQTNSPRRARSVASQSIIAYTMSLGAENSVAYSNNSIAIPTNFTISVTTEILPVSMTKTSVDCTMYICGDSTECSNLLLQYGSFCTQLNRALTGIAVEQDKNTQEVFAQVKQIYKTPPIKDFGGFNFSQILPDPSKPSKRSFIEDLLFNKVTLADAGFIKQYGDCLGDIAARDLICAQKFNGLTVLPPLLTDEMIAQYTSALLAGTITSGWTFGAGAALQIPFAMQMAYRFNGIGVTQNVLYENQKLIANQFNSAIGKIQDSLSSTASALGKLQDVVNQNAQALNTLVKCLSSNFGAISSVLNDILSRLDKVEAEVQIDRLITGRLQCLQTYVTQQLIRAAEIRASANLAATKMSECVLGQSKRVDFCGKGYHLMSFPQSAPHGVVFLHVTYVPAQEKNFTTAPAICHDGKAHFPREGVFVSNGTHWFVTQRNFYEPQIITTDNTFLSGNCDVVIGIVNNTVYDPLQPELDSFKEELDKYFKNHTSPDVDLGDISGINASVVNIQKEIDRLNEVAKNLNESLIDLQELGKYEQYIKGGSGYIPEAPRDGQAYVRKDGEWVLLSTFL

SEQ ID NO: 6363 - protein, 1241 aa, Artificial Sequence
  SARS-CoV-2/USA/UT-00034/2020__EPI_ISL_417977 spike protein (1-1211)(Q965C_S1003C) Foldon construct
MFVFLVLLPLVSSQCVNLTTRTQLPPAYTNSFTRGVYYPDKVFRSSVLHSTQDLFLPFFSNVTWFHAIHVSGTNGTKRFDNPVLPFNDGVYFASTEKSNIIRGWIFGTTLDSKTQSLLIVNNATNVVIKVCEFQFCNDPFLGVYYYKNNKSWMESEFRVYSSANNCTFEYVSQPFLMDLEGKQGNFKNLREFVFKNIDGYFKIYSKHTPINLVRDLPQGFSALEPLVDLPIGINITRFQTLLALHRSYLTPGDSSSGWTAGAAAYYVGYLQPRTFLLKYNENGTITDAVDCALDPLSETKCTLKSFTVEKGIYQTSNFRVQPTESIVRFPNITNLCPFGEVFNATRFASVYAWNRKRISNCVADYSVLYNSASFSTFKCYGVSPTKLNDLCFTNVYADSFVIRGDEVRQIAPGQTGKIADYNYKLPDDFTGCVIAWNSNNLDSKVGGNYNYLYRLFRKSNLKPFERDISTEIYQAGSTPCNGVEGFNCYFPLQSYGFQPTNGVGYQPYRVVVLSFELLHAPATVCGPKKSTNLVKNKCVNFNFNGLTGTGVLTESNKKFLPFQQFGRDIADTTDAVRDPQTLEILDITPCSFGGVSVITPGTNTSNQVAVLYQGVNCTEVPVAIHADQLTPTWRVYSTGSNVFQTRAGCLIGAEHVNNSYECDIPIGAGICASYQTQTNSPRRARSVASQSIIAYTMSLGAENSVAYSNNSIAIPTNFTISVTTEILPVSMTKTSVDCTMYICGDSTECSNLLLQYGSFCTQLNRALTGIAVEQDKNTQEVFAQVKQIYKTPPIKDFGGFNFSQILPDPSKPSKRSFIEDLLFNKVTLADAGFIKQYGDCLGDIAARDLICAQKFNGLTVLPPLLTDEMIAQYTSALLAGTITSGWTFGAGAALQIPFAMQMAYRFNGIGVTQNVLYENQKLIANQFNSAIGKIQDSLSSTASALGKLQDVVNQNAQALNTLVKCLSSNFGAISSVLNDILSRLDKVEAEVQIDRLITGRLQCLQTYVTQQLIRAAEIRASANLAATKMSECVLGQSKRVDFCGKGYHLMSFPQSAPHGVVFLHVTYVPAQEKNFTTAPAICHDGKAHFPREGVFVSNGTHWFVTQRNFYEPQIITTDNTFVSGNCDVVIGIVNNTVYDPLQPELDSFKEELDKYFKNHTSPDVDLGDISGINASVVNIQKEIDRLNEVAKNLNESLIDLQELGKYEQYIKGGSGYIPEAPRDGQAYVRKDGEWVLLSTFL

SEQ ID NO: 6364 - protein, 1241 aa, Artificial Sequence
  SARS-CoV-2/USA/UT-00033/2020__EPI_ISL_417976 spike protein (1-1211)(Q965C_S1003C) Foldon construct
MFVFLVLLPLVSSQCVNLTTRTQLPPAYTNSFTRGVYYPDKVFRSSVLHSTQDLFLPFFSNVTWFHAIHVSGTNGTKRFDNPVLPFNDGVYFASTEKSNIIRGWIFGTTLDSKTQSLLIVNNATNVVIKVCEFQFCNDPFLGVYYHKNNKSWMESEFRVYSSANNCTFEYVSQPFLMDLEGKQGNFKNLREFVFKNIDGYFKIYSKHTPINLVRDLPQGFSALEPLVDLPIGINITRFQTLLALHRSYLTPGDSSSGLTAGAAAYYVGYLQPRTFLLKYNENGTITDAVDCALDPLSETKCTLKSFTVEKGIYQTSNFRVQPTESIVRFPNITNLCPFGEVFNATRFASVYAWNRKRISNCVADYSVLYNSASFSTFKCYGVSPTKLNDLCFTNVYADSFVIRGDEVRQIAPGQTGKIADYNYKLPDDFTGCVIAWNSNNLDSKVGGNYNYLYRLFRKSNLKPFERDISTEIYQAGSTPCNGVEGFNCYFPLQSYGFQPTNGVGYQPYRVVVLSFELLHAPATVCGPKKSTNLVKNKCVNFNFNGLTGTGVLTESNKKFLPFQQFGRDIADTTDAVRDPQTLEILDITPCSFGGVSVITPGTNTSNQVAVLYQGVNCTEVPVAIHADQLTPTWRVYSTGSNVFQTRAGCLIGAEHVNNSYECDIPIGAGICASYQTQTNSPRRARSVASQSIIAYTMSLGAENSVAYSNNSIAIPTNFTISVTTEILPVSMTKTSVDCTMYICGDSTECSNLLLQYGSFCTQLNRALTGIAVEQDKNTQEVFAQVKQIYKTPPIKDFGGFNFSQILPDPSKPSKRSFIEDLLFNKVTLADAGFIKQYGDCLGDIAARDLICAQKFNGLTVLPPLLTDEMIAQYTSALLAGTITSGWTFGAGAALQIPFAMQMAYRFNGIGVTQNVLYENQKLIANQFNSAIGKIQDSLSSTASALGKLQDVVNQNAQALNTLVKCLSSNFGAISSVLNDILSRLDKVEAEVQIDRLITGRLQCLQTYVTQQLIRAAEIRASANLAATKMSECVLGQSKRVDFCGKGYHLMSFPQSAPHGVVFLHVTYVPAQEKNFTTAPAICHDGKAHFPREGVFVSNGTHWFVTQRNFYEPQIITTDNTFVSGNCDVVIGIVNNTVYDPLQPELDSFKEELDKYFKNHTSPDVDLGDISGINASVVNIQKEIDRLNEVAKNLNESLIDLQELGKYEQYIKGGSGYIPEAPRDGQAYVRKDGEWVLLSTFL

SEQ ID NO: 6365 - protein, 1241 aa, Artificial Sequence
  SARS-CoV-2/USA/WI-13/2020__EPI_ISL_417516 spike protein (1-1211)(Q965C_S1003C) Foldon construct
MFVFLVLLPLVSSQCVNLTTRTQLPPAYTNSFTRGVYYPDKVFRSSVLHSTQDLFLPFFSNVTWFHAIHVSGTNGTKRFDNPVLPFNDGVYFASTEKSNIIRGWIFGTTLDSKTQSLLIVNNATNVVIKVCEFQFCNDPFLGVYYHKNNKSWMESEFRVYSSANNCTFEYVSQPFLMDLEGKQGNFKNLREFVFKNIDGYFKIYSKHTPINLVRDLPQGFSALEPLVDLPIGINITRFQTLLALHRSYLTPGDSSSGWTAGAAAYYVGYLQPRTFLLKYNENGTITDAVDCALDPLSETKCTLKSFTVEKGIYQTSNFRVLPTESIVRFPNITNLCPFGEVFNATRFASVYAWNRKRISNCVADYSVLYNSASFSTFKCYGVSPTKLNDLCFTNVYADSFVIRGDEVRQIAPGQTGKIADYNYKLPDDFTGCVIAWNSNNLDSKVGGNYNYLYRLFRKSNLKPFERDISTEIYQAGSTPCNGVEGFNCYFPLQSYGFQPTNGVGYQPYRVVVLSFELLHAPATVCGPKKSTNLVKNKCVNFNFNGLTGTGVLTESNKKFLPFQQFGRDIADTTDAVRDPQTLEILDITPCSFGGVSVITPGTNTSNQVAVLYQGVNCTEVPVAIHADQLTPTWRVYSTGSNVFQTRAGCLIGAEHVNNSYECDIPIGAGICASYQTQTNSPRRARSVASQSIIAYTMSLGAENSVAYSNNSIAIPTNFTISVTTEILPVSMTKTSVDCTMYICGDSTECSNLLLQYGSFCTQLNRALTGIAVEQDKNTQEVFAQVKQIYKTPPIKDFGGFNFSQILPDPSKPSKRSFIEDLLFNKVTLADAGFIKQYGDCLGDIAARDLICAQKFNGLTVLPPLLTDEMIAQYTSALLAGTITSGWTFGAGAALQIPFAMQMAYRFNGIGVTQNVLYENQKLIANQFNSAIGKIQDSLSSTASALGKLQDVVNQNAQALNTLVKCLSSNFGAISSVLNDILSRLDKVEAEVQIDRLITGRLQCLQTYVTQQLIRAAEIRASANLAATKMSECVLGQSKRVDFCGKGYHLMSFPQSAPHGVVFLHVTYVPAQEKNFTTAPAICHDGKAHFPREGVFVSNGTHWFVTQRNFYEPQIITTDNTFVSGNCDVVIGIVNNTVYDPLQPELDSFKEELDKYFKNHTSPDVDLGDISGINASVVNIQKEIDRLNEVAKNLNESLIDLQELGKYEQYIKGGSGYIPEAPRDGQAYVRKDGEWVLLSTFL

SEQ ID NO: 6366 - protein, 1240 aa, Artificial Sequence
  SARS-CoV-2/India/1-27/2020__EPI_ISL_413522 spike protein (1-1210)(Q964C_S1002C) Foldon construct
MFVFLVLLPLVSSQCVNLTTRTQLPPAYTNSFTRGVYYPDKVFRSSVLHSTQDLFLPFFSNVTWFHAIHVSGTNGTKRFDNPVLPFNDGVYFASTEKSNIIRGWIFGTTLDSKTQSLLIVNNATNVVIKVCEFQFCNDPFLGVYHKNNKSWMESEFRVYSSANNCTFEYVSQPFLMDLEGKQGNFKNLREFVFKNIDGYFKIYSKHTPINLVRDLPQGFSALEPLVDLPIGINITRFQTLLALHRSYLTPGDSSSGWTAGAAAYYVGYLQPRTFLLKYNENGTITDAVDCALDPLSETKCTLKSFTVEKGIYQTSNFRVQPTESIVRFPNITNLCPFGEVFNATRFASVYAWNRKRISNCVADYSVLYNSASFSTFKCYGVSPTKLNDLCFTNVYADSFVIRGDEVIQIAPGQTGKIADYNYKLPDDFTGCVIAWNSNNLDSKVGGNYNYLYRLFRKSNLKPFERDISTEIYQAGSTPCNGVEGFNCYFPLQSYGFQPTNGVGYQPYRVVVLSFELLHAPATVCGPKKSTNLVKNKCVNFNFNGLTGTGVLTESNKKFLPFQQFGRDIADTTDAVRDPQTLEILDITPCSFGGVSVITPGTNTSNQVAVLYQDVNCTEVPVAIHADQLTPTWRVYSTGSNVFQTRAGCLIGAEHVNNSYECDIPIGAGICASYQTQTNSPRRARSVASQSIIAYTMSLGAENSVAYSNNSIAIPTNFTISVTTEILPVSMTKTSVDCTMYICGDSTECSNLLLQYGSFCTQLNRALTGIAVEQDKNTQEVFAQVKQIYKTPPIKDFGGFNFSQILPDPSKPSKRSFIEDLLFNKVTLADAGFIKQYGDCLGDIAARDLICAQKFNGLTVLPPLLTDEMIAQYTSALLAGTITSGWTFGAGAALQIPFAMQMAYRFNGIGVTQNVLYENQKLIANQFNSAIGKIQDSLSSTASALGKLQDVVNQNAQALNTLVKCLSSNFGAISSVLNDILSRLDKVEAEVQIDRLITGRLQCLQTYVTQQLIRAAEIRASANLAATKMSECVLGQSKRVDFCGKGYHLMSFPQSAPHGVVFLHVTYVPAQEKNFTTAPAICHDGKAHFPREGVFVSNGTHWFVTQRNFYEPQIITTDNTFVSGNCDVVIGIVNNTVYDPLQPELDSFKEELDKYFKNHTSPDVDLGDISGINASVVNIQKEIDRLNEVAKNLNESLIDLQELGKYEQYIKGGSGYIPEAPRDGQAYVRKDGEWVLLSTFL

SEQ ID NO: 6367 - protein, 1235 aa, Artificial Sequence
  SARS-CoV-2/pangolin/Guangxi/P4L/2017__EPI_ISL_410538 spike protein (1-1205)(Q959C_S997C) Foldon construct
MFVFLFVLPLVSSQCVNLTTRTGIPPGYTNSSTRGVYYPDKVFRSSILHLTQDLFLPFFSNVTWFNTINYQGGFKKFDNPVLPFNDGVYFASTEKSNIIRGWIFGTTLDARTQSLLIVNNATNVVIKVCEFQFCTDPFLGVYYHNNNKTWVENEFRVYSSANNCTFEYISQPFLMDLEGKQGNFKNLREFVFKNVDGYFKIYSKHTPIDLVRDLPRGFAALEPLVDLPIGINITRFQTLLALHRSYLTPGNLESGWTTGAAAYYVGYLQQRTFLLSYNQNGTITDAVDCSLDPLSETKCTLKSLTVEKGIYQTSNFRVQPTISIVRFPNITNLCPFGEVFNASKFASVYAWNRKRISNCVADYSVLYNSTSFSTFKCYGVSPTKLNDLCFTNVYADSFVVKGDEVRQIAPGQTGVIADYNYKLPDDFTGCVIAWNSVKQDALTGGNYGYLYRLFRKSKLKPFERDISTEIYQAGSTPCNGQVGLNCYYPLERYGFHPTTGVNYQPFRVVVLSFELLNGPATVCGPKLSTTLVKDKCVNFNFNGLTGTGVLTTSKKQFLPFQQFGRDISDTTDAVRDPQTLEILDITPCSFGGVSVITPGTNTSNQVAVLYQDVNCTEVPMAIHAEQLTPAWRVYSAGANVFQTRAGCLVGAEHVNNSYECDIPVGAGICASYHSMSSLRSVNQRSIIAYTMSLGAENSVAYSNNSIAIPTNFTISVTTEILPVSMTKTSVDCTMYICGDSIECSNLLLQYGSFCTQLNRALTGIAVEQDKNTQEVFAQVKQIYKTPPIKDFGGFNFSQILPDPSKPSKRSFIEDLLFNKVTLADAGFIKQYGDCLGDIAARDLICAQKFNGLTVLPPLLTDEMIAQYTSALLAGTITSGWTFGAGAALQIPFAMQMAYRFNGIGVTQNVLYENQKLIANQFNSAIGKIQDSLSSTASALGKLQDVVNQNAQALNTLVKCLSSNFGAISSVLNDILSRLDKVEAEVQIDRLITGRLQCLQTYVTQQLIRAAEIRASANLAATKMSECVLGQSKRVDFCGKGYHLMSFPQSAPHGVVFLHVTYVPAQEKNFTTAPAICHEGKAHFPREGVFVSNGTHWFITQRNFYEPQIITTDNTFVSGSCDVVIGIVNNTVYDPLQPELDSFKEELDKYFKNHTSPDVDLGDISGINASVVNIQKEIDRLNEVAKNLNESPIDLQELGKYEQYIKGGSGYIPEAPRDGQAYVRKDGEWVLLSTFL

SEQ ID NO: 6368 - protein, 1235 aa, Artificial Sequence
  SARS-CoV-2/pangolin/Guangxi/P5L/2017__EPI_ISL_410540 spike protein (1-1205)(Q959C_S997C) Foldon construct
MFVFLFVLPLVSSQCVNLTTRTGIPPGYTNSSTRGVYYPDKVFRSSILHLTQDLFLPFFSNVTWFNTINYQGGFKKFDNPVLPFNDGVYFASTEKSNIIRGWIFGTTLDARTQSLLIVNNATNVVIKVCEFQFCTDPFLGVYYHNNNKTWVENEFRVYSSANNCTFEYISQPFLMDLEGKQGNFKNLREFVFKNVDGYFKIYSKHTPIDLVRDLPRGFAALEPLVDLPIGINITRFQTLLALHRSYLTPGKLESGWTTGAAAYYVGYLQQRTFLLSYNQNGTITDAVDCSLDPLSETKCTLKSLTVEKGIYQTSNFRVQPTISIVRFPNITNLCPFGEVFNASKFASVYAWNRKRISNCVADYSVLYNSTSFSTFKCYGVSPTKLNDLCFTNVYADSFVVKGDEVRQIAPGQTGVIADYNYKLPDDFTGCVIAWNSVKQDALTGGNYGYLYRLFRKSKLKPFERDISTEIYQAGSTPCNGQVGLNCYYPLERYGFHPTTGVNYQPFRVVVLSFELLNGPATVCGPKLSTTLVKDKCVNFNFNGLTGTGVLTTSKKQFLPFQQFGRDISDTTDAVRDPQTLEILDITPCSFGGVSVITPGTNTSNQVAVLYQDVNCTEVPMAIHAEQLTPAWRVYSAGANVFQTRAGCLVGAEHVNNSYECDIPVGAGICASYHSMSSFRSVNQRSIIAYTMSLGAENSVAYSNNSIAIPTNFTISVTTEILPVSMTKTSVDCTMYICGDSIECSNLLLQYGSFCTQLNRALTGIAVEQDKNTQEVFAQVKQIYKTPPIKDFGGFNFSQILPDPSKPSKRSFIEDLLFNKVTLADAGFIKQYGDCLGDIAARDLICAQKFNGLTVLPPLLTDEMIAQYTSALLAGTITSGWTFGAGAALQIPFAMQMAYRFNGIGVTQNVLYENQKLIANQFNSAIGKIQDSLSSTASALGKLQDVVNQNAQALNTLVKCLSSNFGAISSVLNDILSRLDKVEAEVQIDRLITGRLQCLQTYVTQQLIRAAEIRASANLAATKMSECVLGQSKRVDFCGKGYHLMSFPQSAPHGVVFLHVTYVPAQEKNFTTAPAICHEGKAHFPREGVFVSNGTHWFITQRNFYEPQIITTDNTFVSGSCDVVIGIVNNTVYDPLQPELDSFKEELDKYFKNHTSPDVDLGDISGINASVVNIQKEIDRLNEVAKNLNESLIDLQELGKYEQYIKGGSGYIPEAPRDGQAYVRKDGEWVLLSTFL

SEQ ID NO: 6369 - protein, 1235 aa, Artificial Sequence
  SARS-CoV-2/pangolin/Guangxi/P5E/2017__EPI_ISL_410541 spike protein (1-1205)(Q959C_S997C) Foldon construct
MFVFLFVLPLVSSQCVNLTTRTGIPPGYTNSSTRGVYYPDKVFRSSILHLTQDLFLPFFSNVTWFNTITYQGGSKKFDNPVLPFNDGVYFASTEKSNIIRGWIFGTTLDARTQSLLIVNNATNVVIKVCEFQFCTDPFLGVYYHNNNKTWVENEFRVYSSANNCTFEYISQPFLMDLEGKQGNFKNLREFVFKNVDGYFKIYSKHTPIDLVRDLPRGFAALEPLVDLPIGINITRFQTLLALHRSYLTPGKLESGWTTGAAAYYVGYLQQRTFLLSYNQNGTITDAVDCSLDPLSETKCTLKSLTVEKGIYQTSNFRVQPTISIVRFPNITNLCPFGEVFNASKFASVYAWNRKRISNCVADYSVLYNSTSFSTFKCYGVSPTKLNDLCFTNVYADSFVVKGDEVRQIAPGQTGVIADYNYKLPDDFTGCVIAWNSVKQDALTGDNYGYLYRLFRKSKLKPFERDISTEIYQAGSTPCNGQVGLNCYYPLERYGFHPTTGVNYQPFRVVVLSFELLNGPATVCGPKLSTTLVKDKCVNFNFNGLTGTGVLTTSKKQFLPFQQFGRDISDTTDAVRDPQTLEILDITPCSFGGVSVITPGTNTSNQVAVLYQDVNCTEVPMAIHAEQLTPAWRVYSAGANVFQTRAGCLVGAEHVNNSYECDIPVGAGICASYHSMSSFRSVNQRSIIAYTMSLGAENSVAYSNNSIAIPTNFTISVTTEILPVSMTKTSVDCTMYICGDSIECSNLLLQYGSFCTQLNRALTGIAVEQDKNTQEVFAQVKQIYKTPPIKDFGGFNFSQILPDPSKPSKRSFIEDLLFNKVTLADAGFIKQYGDCLGDIAARDLICAQKFNGLTVLPPLLTDEMIAQYTSALLAGTITSGWTFGAGAALQIPFAMQMAYRFNGIGVTQNVLYENQKLIANQFNSAIGKIQDSLSSTASALGKLQDVVNQNAQALNTLVKCLSSNFGAISSVLNDILSRLDKVEAEVQIDRLITGRLQCLQTYVTQQLIRAAEIRASANLAATKMSECVLGQSKRVDFCGKGYHLMSFPQSAPHGVVFLHVTYVPAQEKNFTTAPAICHEGKAHFPREGVFVSNGTHWFITQRNFYEPQIITTDNTFVSGSCDVVIGIVNNTVYDPLQPELDSFKEELDKYFKNHTSPDVDLGDISGINASVVNIQKEIDRLNEVAKNLNESLIDLQELGKYEQYIKGGSGYIPEAPRDGQAYVRKDGEWVLLSTFL

SEQ ID NO: 6370 - protein, 1233 aa, Artificial Sequence
  SARS-CoV-2/pangolin/Guangxi/P1E/2017__EPI_ISL_410539 spike protein (1-1203)(Q957C_S995C) Foldon construct
MFVFLFVLPLVSSQCVNLTTRTGIQPGYTNSSTRGVYYPDKVFRSSILHLTQDLFLPFFSNVTWFNTINYQGGFKKFDNPVLPFNDGVYFASTEKSNIIRGWIFGTTLDARTQSLLIVNNATNVVIKVCEFQFCTDPFLGVYYHNNNKTWVENEFRVYSSANNCTFEYISQPFLMDLEGKQGNFKNLREFVFKNVDGYFKIYSKHTPIDLVRDLPRGFAALEPLVDLPIGINITRFQTLLALHRSYLTPGKLESGWTTGAAAYYVGYLQQRTFLLSYNQNGTITDAVDCSLDPLSETKCTLKSLTVEKGIYQTSNFRVQPTISIVRFPNITNLCPFGEVFNASKFASVYAWNRKRISNCVADYSVLYNSTSFSTFKCYGVSPTKLNDLCFTNVYADSFVVKGDEVRQIAPGQTGVIADYNYKLPDDFTGCVIAWNSVKQDALTGGNYLYRLFRKSKLKPFERDISTEIYQAGSTPCNGQVGLNCYYPLERYGFHPTTGVNYQPFRVVVLSFELLNGPATVCGPKLSTTLVKDKCVNFNFNGLTGTGVLTTSKKQFLPFQQFGRDISDTTDAVRDPQTLEILDITPCSFGGVSVITPGTNTSNQVAVLYQDVNCTEVPMAIHAEQLTPAWRVYSAGANVFQTRAGCLVGAEHVNNSYECDIPVGAGICASYHSMSSLRSVNQRSIIAYTMSLGAENSVAYSNNSIAIPTNFTISVTTEILPVSMTKTSVDCTMYICGDSIECSNLLLQYGSFCTQLNRALTGIAVEQDKNTQEVFAQVKQIYKTPPIKDFGGFNFSQILPDPSKPSKRSFIEDLLFNKVTLADAGFIKQYGDCLGDIAARDLICAQKFNGLTVLPPLLTDEMIAQYTSALLAGTITSGWTFGAGAALQIPFAMQMAYRFNGIGVTQNVLYENQKLIANQFNSAIGKIQDSLSSTASALGKLQDVVNQNAQALNTLVKCLSSNFGAISSVLNDILSRLDKVEAEVQIDRLITGRLQCLQTYVTQQLIRAAEIRASANLAATKMSECVLGQSKRVDFCGKGYHLMSFPQSAPHGVVFLHVTYVPAQEKNFTTAPAICHEGKAHFPREGVFVSNGTHWFITQRNFYEPQIITTDNTFVSGSCDVVIGIVNNTVYDPLQPELDSFKEELDKYFKNHTSPDVDLGDISGINASVVNIQKEIDRLNEVAKNLNESLIDLQELGKYEQYIKGGSGYIPEAPRDGQAYVRKDGEWVLLSTFL

SEQ ID NO: 6371 - protein, 1241 aa, Artificial Sequence
  SARS-CoV-2/Wuhan/WIV05/2019__EPI_ISL_402128 spike protein (1-1211)(F970C_G999C) Foldon construct
MFVFLVLLPLVSSQCVNLTTRTQLPPAYTNSFTRGVYYPDKVFRSSVLHSTQDLFLPFFSNVTWFHAIHVSGTNGTKRFDNPVLPFNDGVYFASTEKSNIIRGWIFGTTLDSKTQSLLIVNNATNVVIKVCEFQFCNDPFLGVYYHKNNKSWMESEFRVYSSANNCTFEYVSQPFLMDLEGKQGNFKNLREFVFKNIDGYFKIYSKHTPINLVRDLPQGFSALEPLVDLPIGINITRFQTLLALHRSYLTPGDSSSGWTAGAAAYYVGYLQPRTFLLKYNENGTITDAVDCALDPLSETKCTLKSFTVEKGIYQTSNFRVQPTESIVRFPNITNLCPFGEVFNATRFASVYAWNRKRISNCVADYSVLYNSASFSTFKCYGVSPTKLNDLCFTNVYADSFVIRGDEVRQIAPGQTGKIADYNYKLPDDFTGCVIAWNSNNLDSKVGGNYNYLYRLFRKSNLKPFERDISTEIYQAGSTPCNGVEGFNCYFPLQSYGFQPTNGVGYQPYRVVVLSFELLHAPATVCGPKKSTNLVKNKCVNFNFNGLTGTGVLTESNKKFLPFQQFGRDIADTTDAVRDPQTLEILDITPCSFGGVSVITPGTNTSNQVAVLYQDVNCTEVPVAIHADQLTPTWRVYSTGSNVFQTRAGCLIGAEHVNNSYECDIPIGAGICASYQTQTNSPRRARSVASQSIIAYTMSLGAENSVAYSNNSIAIPTNFTISVTTEILPVSMTKTSVDCTMYICGDSTECSNLLLQYGSFCTQLNRALTGIAVEQDKNTQEVFAQVKQIYKTPPIKDFGGFNFSQILPDPSKPSKRSFIEDLLFNKVTLADAGFIKQYGDCLGDIAARDLICAQKFNGLTVLPPLLTDEMIAQYTSALLAGTITSGWTFGAGAALQIPFAMQMAYRFNGIGVTQNVLYENQKLIANQFNSAIGKIQDSLSSTASALGKLQDVVNQNAQALNTLVKQLSSNCGAISSVLNDILSRLDKVEAEVQIDRLITCRLQSLQTYVTQQLIRAAEIRASANLAATKMSECVLGQSKRVDFCGKGYHLMSFPQSAPHGVVFLHVTYVPAQEKNFTTAPAICHDGKAHFPREGVFVSNGTHWFVTQRNFYEPQIITTDNTFVSGNCDVVIGIVNNTVYDPLQPELDSFKEELDKYFKNHTSPDVDLGDISGINASVVNIQKEIDRLNEVAKNLNESLIDLQELGKYEQYIKGGSGYIPEAPRDGQAYVRKDGEWVLLSTFL

SEQ ID NO: 6372 - protein, 1237 aa, Artificial Sequence
  SARS-CoV-2/bat/Yunnan/RaTG13/2013__EPI_ISL_402131 spike protein (1-1207)(F966C_G995C) Foldon construct
MFVFLVLLPLVSSQCVNLTTRTQLPPAYTNSSTRGVYYPDKVFRSSVLHLTQDLFLPFFSNVTWFHAIHVSGTNGIKRFDNPVLPFNDGVYFASTEKSNIIRGWIFGTTLDSKTQSLLIVNNATNVVIKVCEFQFCNDPFLGVYYHKNNKSWMESEFRVYSSANNCTFEYVSQPFLMDLEGKQGNFKNLREFVFKNIDGYFKIYSKHTPINLVRDLPPGFSALEPLVDLPIGINITRFQTLLALHRSYLTPGDSSSGWTAGAAAYYVGYLQPRTFLLKYNENGTITDAVDCALDPLSETKCTLKSFTVEKGIYQTSNFRVQPTDSIVRFPNITNLCPFGEVFNATTFASVYAWNRKRISNCVADYSVLYNSTSFSTFKCYGVSPTKLNDLCFTNVYADSFVITGDEVRQIAPGQTGKIADYNYKLPDDFTGCVIAWNSKHIDAKEGGNFNYLYRLFRKANLKPFERDISTEIYQAGSKPCNGQTGLNCYYPLYRYGFYPTDGVGHQPYRVVVLSFELLNAPATVCGPKKSTNLVKNKCVNFNFNGLTGTGVLTESNKKFLPFQQFGRDIADTTDAVRDPQTLEILDITPCSFGGVSVITPGTNASNQVAVLYQDVNCTEVPVAIHADQLTPTWRVYSTGSNVFQTRAGCLIGAEHVNNSYECDIPIGAGICASYQTQTNSRSVASQSIIAYTMSLGAENSVAYSNNSIAIPTNFTISVTTEILPVSMTKTSVDCTMYICGDSTECSNLLLQYGSFCTQLNRALTGIAVEQDKNTQEVFAQVKQIYKTPPIKDFGGFNFSQILPDPSKPSKRSFIEDLLFNKVTLADAGFIKQYGDCLGDIAARDLICAQKFNGLTVLPPLLTDEMIAQYTSALLAGTITSGWTFGAGAALQIPFAMQMAYRFNGIGVTQNVLYENQKLIANQFNSAIGKIQDSLSSTASALGKLQDVVNQNAQALNTLVKQLSSNCGAISSVLNDILSRLDKVEAEVQIDRLITCRLQSLQTYVTQQLIRAAEIRASANLAATKMSECVLGQSKRVDFCGKGYHLMSFPQSAPHGVVFLHVTYVPAQEKNFTTAPAICHDGKAHFPREGVFVSNGTHWFVTQRNFYEPQIITTDNTFVSGSCDVVIGIVNNTVYDPLQPELDSFKEELDKYFKNHTSPDVDLGDISGINASVVNIQKEIDRLNEVAKNLNESLIDLQELGKYEQYIKGGSGYIPEAPRDGQAYVRKDGEWVLLSTFL

SEQ ID NO: 6373 - protein, 1241 aa, Artificial Sequence
  SARS-CoV-2/Wuhan/HBCDC-HB-01/2019__EPI_ISL_402132 spike protein (1-1211)(F970C_G999C) Foldon construct
MFVFLVLLPLVSSQCVNLTTRTQLPPAYTNSITRGVYYPDKVFRSSVLHSTQDLFLPFFSNVTWFHAIHVSGTNGTKRFDNPVLPFNDGVYFASTEKSNIIRGWIFGTTLDSKTQSLLIVNNATNVVIKVCEFQFCNDPFLGVYYHKNNKSWMESEFRVYSSANNCTFEYVSQPFLMDLEGKQGNFKNLREFVFKNIDGYFKIYSKHTPINLVRDLPQGFSALEPLVDLPIGINITRFQTLLALHRSYLTPGDSSSGWTAGAAAYYVGYLQPRTFLLKYNENGTITDAVDCALDPLSETKCTLKSFTVEKGIYQTSNFRVQPTESIVRFPNITNLCPFGEVFNATRFASVYAWNRKRISNCVADYSVLYNSASFSTFKCYGVSPTKLNDLCFTNVYADSFVIRGDEVRQIAPGQTGKIADYNYKLPDDFTGCVIAWNSNNLDSKVGGNYNYLYRLFRKSNLKPFERDISTEIYQAGSTPCNGVEGFNCYFPLQSYGFQPTNGVGYQPYRVVVLSFELLHAPATVCGPKKSTNLVKNKCVNFNFNGLTGTGVLTESNKKFLPFQQFGRDIADTTDAVRDPQTLEILDITPCSFGGVSVITPGTNTSNQVAVLYQDVNCTEVPVAIHADQLTPTWRVYSTGSNVFQTRAGCLIGAEHVNNSYECDIPIGAGICASYQTQTNSPRRARSVASQSIIAYTMSLGAENSVAYSNNSIAIPTNFTISVTTEILPVSMTKTSVDCTMYICGDSTECSNLLLQYGSFCTQLNRALTGIAVEQDKNTQEVFAQVKQIYKTPPIKDFGGFNFSQILPDPSKPSKRSFIEDLLFNKVTLADAGFIKQYGDCLGDIAARDLICAQKFNGLTVLPPLLTDEMIAQYTSALLAGTITSGWTFGAGAALQIPFAMQMAYRFNGIGVTQNVLYENQKLIANQFNSAIGKIQDSLSSTASALGKLQDVVNQNAQALNTLVKQLSSNCGAISSVLNDILSRLDKVEAEVQIDRLITCRLQSLQTYVTQQLIRAAEIRASANLAATKMSECVLGQSKRVDFCGKGYHLMSFPQSAPHGVVFLHVTYVPAQEKNFTTAPAICHDGKAHFPREGVFVSNGTHWFVTQRNFYEPQIITTDNTFVSGNCDVVIGIVNNTVYDPLQPELDSFKEELDKYFKNHTSPDVDLGDISGINASVVNIQKEIDRLNEVAKNLNESLIDLQELGKYEQYIKGGSGYIPEAPRDGQAYVRKDGEWVLLSTFL

SEQ ID NO: 6374 - protein, 1241 aa, Artificial Sequence
  SARS-CoV-2/Guangdong/20SF028/2020__EPI_ISL_403936 spike protein (1-1211)(F970C_G999C) Foldon construct
MFVFLVLLPLVSSQCVNLTTRTQLPPAYTNSFTRGVYYPDKVFRSSVLYSTQDLFLPFFSNVTWFHAIHVSGTNGTKRFDNPVLPFNDGVYFASTEKSNIIRGWIFGTTLDSKTQSLLIVNNATNVVIKVCEFQFCNDPFLGVYYHKNNKSWMESEFRVYSSANNCTFEYVSQPFLMDLEGKQGNFKNLREFVFKNIDGYFKIYSKHTPINLVRDLPQGFSALEPLVDLPIGINITRFQTLLALHRSYLTPGDSSSGWTAGAAAYYVGYLQPRTFLLKYNENGTITDAVDCALDPLSETKCTLKSFTVEKGIYQTSNFRVQPTESIVRFPNITNLCPFGEVFNATRFASVYAWNRKRISNCVADYSVLYNSASFSTFKCYGVSPTKLNDLCFTNVYADSFVIRGDEVRQIAPGQTGKIADYNYKLPDDFTGCVIAWNSNNLDSKVGGNYNYLYRLFRKSNLKPFERDISTEIYQAGSTPCNGVEGFNCYFPLQSYGFQPTNGVGYQPYRVVVLSFELLHAPATVCGPKKSTNLVKNKCVNFNFNGLTGTGVLTESNKKFLPFQQFGRDIADTTDAVRDPQTLEILDITPCSFGGVSVITPGTNTSNQVAVLYQDVNCTEVPVAIHADQLTPTWRVYSTGSNVFQTRAGCLIGAEHVNNSYECDIPIGAGICASYQTQTNSPRRARSVASQSIIAYTMSLGAENSVAYSNNSIAIPTNFTISVTTEILPVSMTKTSVDCTMYICGDSTECSNLLLQYGSFCTQLNRALTGIAVEQDKNTQEVFAQVKQIYKTPPIKDFGGFNFSQILPDPSKPSKRSFIEDLLFNKVTLADAGFIKQYGDCLGDIAARDLICAQKFNGLTVLPPLLTDEMIAQYTSALLAGTITSGWTFGAGAALQIPFAMQMAYRFNGIGVTQNVLYENQKLIANQFNSAIGKIQDSLSSTASALGKLQDVVNQNAQALNTLVKQLSSNCGAISSVLNDILSRLDKVEAEVQIDRLITCRLQSLQTYVTQQLIRAAEIRASANLAATKMSECVLGQSKRVDFCGKGYHLMSFPQSAPHGVVFLHVTYVPAQEKNFTTAPAICHDGKAHFPREGVFVSNGTHWFVTQRNFYEPQIITTDNTFVSGNCDVVIGIVNNTVYDPLQPELDSFKEELDKYFKNHTSPDVDLGDISGINASVVNIQKEIDRLNEVAKNLNESLIDLQELGKYEQYIKGGSGYIPEAPRDGQAYVRKDGEWVLLSTFL

SEQ ID NO: 6375 - protein, 1241 aa, Artificial Sequence
  SARS-CoV-2/Shenzhen/SZTH-001/2020__EPI_ISL_406592 spike protein (1-1211)(F970C_G999C) Foldon construct
MFVFLVLLPLVSSQCVNLTTRTQLPPAYTNSFTRGVYYPDKVFRSSVLHSTQDLFLPFFSNVTWFHAIHVSGTNGTKRFDNPVLPFNDGVYFASTEKSNIIRGWIFGTTLDSKTQSLLIVNNATNVVIKVCEFQFCNDPFLGVYYHKNNKSWMESEFRVYSSANNCTFEYVSQPFLMDLEGKQGNFKNLREFVFKNIDGYFKIYSKHTPINLVRDLPQGFSALEPLVDLPIGINITRFQTLLALHRSYLTPGDSSSGWTAGAAAYYVGYLQPRTFLLKYNENGTITDAVDCALDPLSETKCTLKSFTVEKGIYQTSNFRVQPTESIVRFPNITNLCPFGEVFNATRFASVYAWNRKRISNCVADYSVLYNSASFSTFKCYGVSPTKLNDLCFTNVYADSFVIRGDEVRQIAPGQTGKIADYNYKLPDDFTGCVIAWNSNNLDSKVGGNYNYLYRLFRKSNLKPFERDISTEIYQAGSTPCNGVEGFNCYFPLQSYGFQPTNGVGYQPYRVVVLSFELLHAPATVCGPKKSTNLVKNKCVNFNFNGLTGTGVLTESNKKFLPFQQFGRDIADTTDAVRDPQTLEILDITPCSFGGVSVITPGTNTSNQVAVLYQDVNCTEVPVAIHADQLTPTWRVYSTGSNVFQTRAGCLIGAEHVNNSYECDIPIGAGICASYQTQTNSPRRARSVASQSIIAYTMSLGAENSVAYSNNSIAIPTNFTISVTTEILPVSMTKTSVDCTMYICGDSTECSNLLLQYGSFCTQLNRALTGIAVEQDKNTQEVFAQVKQIYKTPPIKDFGGFNFSQILPDPSKPSKRSFIEDLLFNKVTLADAGFIKQYGDCLGDIAARDLICAQKFNGLTVLPPLLTDEMIAQYTSALLAGTITSGWTFGAGAALQIPFAMQMAYRFNGIGVTQNVLYENQKLIANQFNSAIGKIQDSLSSTASALGKLQDVVNQNAQALNTLVKQLSSNCGAISSVLNDILSRLDKVEAEVQIDRLITCRLQSLQTYVTQQLIRAAEIRASANLAATKMSECVLGQSKRVDFCGKGYHLMSFPQSAPHGVVFLHVTYVPAQEKNFTTAPAICHDGKAHFPREGVFVSNGTHWFVTQRNFYEPQIITTDNTFVSGNCDVLIGIVNNTVYDPLQPELDSFKEELDKYFKNHTSPDVDLGDISGINASVVNIQKEIDRLNEVAKNLNESLIDLQELGKYEQYIKGGSGYIPEAPRDGQAYVRKDGEWVLLSTFL

SEQ ID NO: 6376 - protein, 1241 aa, Artificial Sequence
  SARS-CoV-2/Shenzhen/SZTH-004/2020__EPI_ISL_406595 spike protein (1-1211)(F970C_G999C) Foldon construct
MFVFLVLLPLVSSQCVNLTTRTQLPPAYTNSFTRGVYYPDKVFRSSVLHSTQDLFLPFFSNVTWFHAIHVSGTNGTKRFDNPVLPFNDGVYFASTEKSNIIRGWIFGTTLDSKTQSLLIVNNATNVVIKVCEFQFCNDPFLGVYYHKNNKSWMESEFRVYSSANNCTFEYVSQPFLMDLEGKQGNFKNLREFVFKNIDGYFKIYSKHTPINLVRDLPQGFSALEPLVDLPIGINITRFQTLLALHRSYLTPGDSSSGWTAGAAAYYVGYLQPRTFLLKYNENGTITDAVDCALDPLSETKCTLKSFTVEKGIYQTSNFRVQPTESIVRFPNITNLCPFGEVFNATRFASVYAWDRKRISNCVAYYSVLYNSASFSTFKCYGVSPTKLNDLCFTNVYADSFVIRGDEVRQIAPGQTGKIADYNYKLPDDFTGCVIAWNSNNLDSKVGGNYNYLYRLFRKSNLKPFERDISTEIYQAGSTPCNGVEGFNCYFPLQSYGFQPTNGVGYQPYRVVVLSFELLHAPATVCGPKKSTNLVKNKCVNFNFNGLTGTGVLTESNKKFLPFQQFGRDIADTTDAVRDPQTLEILDITPCSFGGVSVITPGTNTSNQVAVLYQDVNCTEVPVAIHADQLTPTWRVYSTGSNVFQTRAGCLIGAEHVNNSYECDIPIGAGICASYQTQTNSPRRARSVASQSIIAYTMSLGAENSVAYSNNSIAIPTNFTISVTTEILPVSMTKTSVDCTMYICGDSTECSNLLLQYGSFCTQLNRALTGIAVEQDKNTQEVFAQVKQIYKTPPIKDFGGFNFSQILPDPSKPSKRSFIEDLLFNKVTLADAGFIKQYGDCLGDIAARDLICAQKFNGLTVLPPLLTDEMIAQYTSALLAGTITSGWTFGAGAALQIPFAMQMAYRFNGIGVTQNVLYENQKLIANQFNSAIGKIQDSLSSTASALGKLQDVVNQNAQALNTLVKQLSSNCGAISSVLNDILSRLDKVEAEVQIDRLITCRLQSLQTYVTQQLIRAAEIRASANLAATKMSECVLGQSKRVDFCGKGYHLMSFPQSAPHGVVFLHVTYVPAQEKNFTTAPAICHDGKAHFPREGVFVSNGTHWFVTQRNFYEPQIITTDNTFVSGNCDVVIGIVNNTVYDPLQPELDSFKEELDKYFKNHTSPDVDLGDISGINASVVNIQKEIDRLNEVAKNLNESLIDLQELGKYEQYIKGGSGYIPEAPRDGQAYVRKDGEWVLLSTFL

SEQ ID NO: 6377 - protein, 1241 aa, Artificial Sequence
  SARS-CoV-2/France/IDF0372/2020__EPI_ISL_406596 spike protein (1-1211)(F970C_G999C) Foldon construct
MFVFLVLLPLVSSQCVNLTTRTQLPPAYTNSFTRGVYYPDKVFRSSVLHSTQDLFLPFFSNVTWFHAIHVSGTNGTKRFDNPVLPFNDGVYFASTEKSNIIRGWIFGTTLDSKTQSLLIVNNATNVVIKVCEFQFCNDPFLGVYYHKNNKSWMESEFRVYSSANNCTFEYVSQPFLMDLEGKQGNFKNLREFVFKNIDGYFKIYSKHTPINLVRDLPQGFSALEPLVDLPIGINITRFQTLLALHRSYLTPGDSSSGWTAGAAAYYVGYLQPRTFLLKYNENGTITDAVDCALDPLSETKCTLKSFTVEKGIYQTSNFRVQPTESIVRFPNITNLCPFGEVFNATRFASVYAWNRKRISNCVADYSFLYNSASFSTFKCYGVSPTKLNDLCFTNVYADSFVIRGDEVRQIAPGQTGKIADYNYKLPDDFTGCVIAWNSNNLDSKVGGNYNYLYRLFRKSNLKPFERDISTEIYQAGSTPCNGVEGFNCYFPLQSYGFQPTNGVGYQPYRVVVLSFELLHAPATVCGPKKSTNLVKNKCVNFNFNGLTGTGVLTESNKKFLPFQQFGRDIADTTDAVRDPQTLEILDITPCSFGGVSVITPGTNTSNQVAVLYQDVNCTEVPVAIHADQLTPTWRVYSTGSNVFQTRAGCLIGAEHVNNSYECDIPIGAGICASYQTQTNSPRRARSVASQSIIAYTMSLGAENSVAYSNNSIAIPTNFTISVTTEILPVSMTKTSVDCTMYICGDSTECSNLLLQYGSFCTQLNRALTGIAVEQDKNTQEVFAQVKQIYKTPPIKDFGGFNFSQILPDPSKPSKRSFIEDLLFNKVTLADAGFIKQYGDCLGDIAARDLICAQKFNGLTVLPPLLTDEMIAQYTSALLAGTITSGWTFGAGAALQIPFAMQMAYRFNGIGVTQNVLYENQKLIANQFNSAIGKIQDSLSSTASALGKLQDVVNQNAQALNTLVKQLSSNCGAISSVLNDILSRLDKVEAEVQIDRLITCRLQSLQTYVTQQLIRAAEIRASANLAATKMSECVLGQSKRVDFCGKGYHLMSFPQSAPHGVVFLHVTYVPAQEKNFTTAPAICHDGKAHFPREGVFVSNGTHWFVTQRNFYEPQIITTDNTFVSGNCDVVIGIVNNTVYDPLQPELDSFKEELDKYFKNHTSPDVDLGDISGINASVVNIQKEIDRLNEVAKNLNESLIDLQELGKYEQYIKGGSGYIPEAPRDGQAYVRKDGEWVLLSTFL

SEQ ID NO: 6378 - protein, 1241 aa, Artificial Sequence
  SARS-CoV-2/Australia/VIC01/2020__EPI_ISL_406844 spike protein (1-1211)(F970C_G999C) Foldon construct
MFVFLVLLPLVSSQCVNLTTRTQLPPAYTNSFTRGVYYPDKVFRSSVLHSTQDLFLPFFSNVTWFHAIHVSGTNGTKRFDNPVLPFNDGVYFASTEKSNIIRGWIFGTTLDSKTQSLLIVNNATNVVIKVCEFQFCNDPFLGVYYHKNNKSWMESEFRVYSSANNCTFEYVSQPFLMDLEGKQGNFKNLREFVFKNIDGYFKIYSKHTPINLVRDLPQGFSALEPLVDLPIGINITRFQTLLALHRRYLTPGDSSSGWTAGAAAYYVGYLQPRTFLLKYNENGTITDAVDCALDPLSETKCTLKSFTVEKGIYQTSNFRVQPTESIVRFPNITNLCPFGEVFNATRFASVYAWNRKRISNCVADYSVLYNSASFSTFKCYGVSPTKLNDLCFTNVYADSFVIRGDEVRQIAPGQTGKIADYNYKLPDDFTGCVIAWNSNNLDSKVGGNYNYLYRLFRKSNLKPFERDISTEIYQAGSTPCNGVEGFNCYFPLQSYGFQPTNGVGYQPYRVVVLSFELLHAPATVCGPKKSTNLVKNKCVNFNFNGLTGTGVLTESNKKFLPFQQFGRDIADTTDAVRDPQTLEILDITPCSFGGVSVITPGTNTSNQVAVLYQDVNCTEVPVAIHADQLTPTWRVYSTGSNVFQTRAGCLIGAEHVNNSYECDIPIGAGICASYQTQTNSPRRARSVASQSIIAYTMSLGAENSVAYSNNSIAIPTNFTISVTTEILPVSMTKTSVDCTMYICGDSTECSNLLLQYGSFCTQLNRALTGIAVEQDKNTQEVFAQVKQIYKTPPIKDFGGFNFSQILPDPSKPSKRSFIEDLLFNKVTLADAGFIKQYGDCLGDIAARDLICAQKFNGLTVLPPLLTDEMIAQYTSALLAGTITSGWTFGAGAALQIPFAMQMAYRFNGIGVTQNVLYENQKLIANQFNSAIGKIQDSLSSTASALGKLQDVVNQNAQALNTLVKQLSSNCGAISSVLNDILSRLDKVEAEVQIDRLITCRLQSLQTYVTQQLIRAAEIRASANLAATKMSECVLGQSKRVDFCGKGYHLMSFPQSAPHGVVFLHVTYVPAQEKNFTTAPAICHDGKAHFPREGVFVSNGTHWFVTQRNFYEPQIITTDNTFVSGNCDVVIGIVNNTVYDPLQPELDSFKEELDKYFKNHTSPDVDLGDISGINASVVNIQKEIDRLNEVAKNLNESLIDLQELGKYEQYIKGGSGYIPEAPRDGQAYVRKDGEWVLLSTFL

SEQ ID NO: 6379 - protein, 1241 aa, Artificial Sequence
  SARS-CoV-2/Germany/BavPat1/2020__EPI_ISL_406862 spike protein (1-1211)(F970C_G999C) Foldon construct
MFVFLVLLPLVSSQCVNLTTRTQLPPAYTNSFTRGVYYPDKVFRSSVLHSTQDLFLPFFSNVTWFHAIHVSGTNGTKRFDNPVLPFNDGVYFASTEKSNIIRGWIFGTTLDSKTQSLLIVNNATNVVIKVCEFQFCNDPFLGVYYHKNNKSWMESEFRVYSSANNCTFEYVSQPFLMDLEGKQGNFKNLREFVFKNIDGYFKIYSKHTPINLVRDLPQGFSALEPLVDLPIGINITRFQTLLALHRSYLTPGDSSSGWTAGAAAYYVGYLQPRTFLLKYNENGTITDAVDCALDPLSETKCTLKSFTVEKGIYQTSNFRVQPTESIVRFPNITNLCPFGEVFNATRFASVYAWNRKRISNCVADYSVLYNSASFSTFKCYGVSPTKLNDLCFTNVYADSFVIRGDEVRQIAPGQTGKIADYNYKLPDDFTGCVIAWNSNNLDSKVGGNYNYLYRLFRKSNLKPFERDISTEIYQAGSTPCNGVEGFNCYFPLQSYGFQPTNGVGYQPYRVVVLSFELLHAPATVCGPKKSTNLVKNKCVNFNFNGLTGTGVLTESNKKFLPFQQFGRDIADTTDAVRDPQTLEILDITPCSFGGVSVITPGTNTSNQVAVLYQGVNCTEVPVAIHADQLTPTWRVYSTGSNVFQTRAGCLIGAEHVNNSYECDIPIGAGICASYQTQTNSPRRARSVASQSIIAYTMSLGAENSVAYSNNSIAIPTNFTISVTTEILPVSMTKTSVDCTMYICGDSTECSNLLLQYGSFCTQLNRALTGIAVEQDKNTQEVFAQVKQIYKTPPIKDFGGFNFSQILPDPSKPSKRSFIEDLLFNKVTLADAGFIKQYGDCLGDIAARDLICAQKFNGLTVLPPLLTDEMIAQYTSALLAGTITSGWTFGAGAALQIPFAMQMAYRFNGIGVTQNVLYENQKLIANQFNSAIGKIQDSLSSTASALGKLQDVVNQNAQALNTLVKQLSSNCGAISSVLNDILSRLDKVEAEVQIDRLITCRLQSLQTYVTQQLIRAAEIRASANLAATKMSECVLGQSKRVDFCGKGYHLMSFPQSAPHGVVFLHVTYVPAQEKNFTTAPAICHDGKAHFPREGVFVSNGTHWFVTQRNFYEPQIITTDNTFVSGNCDVVIGIVNNTVYDPLQPELDSFKEELDKYFKNHTSPDVDLGDISGINASVVNIQKEIDRLNEVAKNLNESLIDLQELGKYEQYIKGGSGYIPEAPRDGQAYVRKDGEWVLLSTFL

SEQ ID NO: 6380 - protein, 1241 aa, Artificial Sequence
  SARS-CoV-2/Wuhan/HBCDC-HB-02/2020__EPI_ISL_412978 spike protein (1-1211)(F970C_G999C) Foldon construct
MFVFLVLLPLVSSQCVNLTTRTQLPPAYTNSFTRGVYYPDKVFRSSVLHSTQDLFLPFFSNVTWFHAIHVSGTNGTKRFDNPVLPFNDGVYFASTEKSNIIRGWIFGTTLDSKTQSLLIVNNATNVVIKVCEFQFCNDPFLGVYYHKNNKSWMESEFRVYSSANNCTFEYVSQPFLMDLEGKQGNFKNLREFVFKNIDGYFKIYSKHTPINLVRDLPQGFSALEPLVDLPIGINITRFQTLLALHRSYLTPGDSSSGWTAGAAAYYVGYLQPRTFLLKYNENGTITDAVDCALDPLSETKCTLKSFTVEKGIYQTSNFRVQPTESIVRFPNITNLCPFGEVFNATRFASVYAWNRKRISNCVADYSVLYNSASFSTFKCYGVSPTKLNDLCFTNVYADSFVIRGDEVRQIAPGQTGKIADYNYKLPDDFTGCVIAWNSNNLDSKVGGNYNYLYRLFRKSNLKPFERDISTEIYQAGSTPCNGVEGFNCYFPLQSYGFQPTNGVGYQPYRVVVLSFELLHAPATVCGPKKSTNLVKNKCVNFNFNGLTGTGVLTESNKKFLPFQQFGRDIADTTDAVRDPQTLEILDITPCSFGGVSVITPGTNTSNQVAVLYQDVNCTEVPVAIHADQLTPTWRVYSTGSNVFQTRAGCLIGAEHVNNSYECDIPIGAGICASYQTQTNSPRRARSVASQSIIAYTMSLGAENSVAYSNNSIAIPTNFTISVTTEILPVSMTKTSVDCTMYICGDSTECSNFLLQYGSFCTQLNRALTGIAVEQDKNTQEVFAQVKQIYKTPPIKDFGGFNFSQILPDPSKPSKRSFIEDLLFNKVTLADAGFIKQYGDCLGDIAARDLICAQKFNGLTVLPPLLTDEMIAQYTSALLAGTITSGWTFGAGAALQIPFAMQMAYRFNGIGVTQNVLYENQKLIANQFNSAIGKIQDSLSSTASALGKLQDVVNQNAQALNTLVKQLSSNCGAISSVLNDILSRLDKVEAEVQIDRLITCRLQSLQTYVTQQLIRAAEIRASANLAATKMSECVLGQSKRVDFCGKGYHLMSFPQSAPHGVVFLHVTYVPAQEKNFTTAPAICHDGKAHFPREGVFVSNGTHWFVTQRNFYEPQIITTDNTFVSGNCDVVIGIVNNTVYDPLQPELDSFKEELDKYFKNHTSPDVDLGDISGINASVVNIQKEIDRLNEVAKNLNESLIDLQELGKYEQYIKGGSGYIPEAPRDGQAYVRKDGEWVLLSTFL

SEQ ID NO: 6381 - protein, 1241 aa, Artificial Sequence
  SARS-CoV-2/Australia/QLD02/2020__EPI_ISL_407896 spike protein (1-1211)(F970C_G999C) Foldon construct
MFVFLVLLPLVSSQCVNLTTRTQLPPAYTNSFTRGVYYPDKVFRSSVLHSTQDLFLPFFSNVTWFHAIHVSGTNGTKRFDNPVLPFNDGVYFASTEKSNIIRGWIFGTTLDSKTQSLLIVNNATNVVIKVCEFQFCNDPFLGVYYHKNNKSWMESEFRVYSSANNCTFEYVSQPFLMDLEGKQGNFKNLREFVFKNIDGYFKIYSKHTPINLVRDLPQGFSALEPLVDLPIGINITRFQTLLALHRSYLTPGDSSSGWTAGAAAYYVGYLQPRTFLLKYNENGTITDAVDCALDPLSETKCTLKSFTVEKGIYQTSNFRVQPTESIVRFPNITNLCPFGEVFNATRFASVYAWNRKRISNCVADYSVLYNSASFSTFKCYGVSPTKLNDLCFTNVYADSFVIRGDEVRQIAPGQTGKIADYNYKLPDDFTGCVIAWNSNNLDSKVGGNYNYLYRLFRKSNLKPFERDISTEIYQAGSTPCNGVEGFNCYFPLQSYGFQPTNGVGYQPYRVVVLSFELLHAPATVCGPKKSTNLVKNKCVNFNFNGLTGTGVLTESNKKFLPFQQFGRDIADTTDAVRDPQTLEILDITPCSFGGVSVITPGTNTSNQVAVLYQDVNCTEVPVAIHADQLTPTWRVYSTGSNVFQTRAGCLIGAEHVNNSYECDIPIGAGICASYQTQTNSPRRARSVASQSIIAYTMSLGAENSVAYSNNSIAIPTNFTISVTTEILPVSMTKTSVDCTMYICGDSTECSNLLLQYGSFCTQLNRALTGIAVEQDKNTQEVFAQVKQIYKTPPIKDFGGFNFSQILPDPSKPSKRSFIEDLLFNKVTLADAGFIKQYGDCLGDIAARDLICAQKFNGLTVLPPLLTDEMIAQYTSALLAGTITSGWTFGAGAALQIPFAMQMAYRFNGIGVTQNVLYENQKLIANQFNSAIGKIQDSLSSTASALGKLQDVVNQNAQALNTLVKQLSSNCGAISSVLNDILSRLDKVEAEVQIDRLITCRLQSLQTYVTQQLIRAAEIRASANLAATKMSECVLGQSKRVDFCGKGYHLMSFPQSAPHGVVFLHVTYVPAQEKNFTTAPAICHDGKAHFPREGVFVSNGTHWFVTQRNFYEPQIITTDNTFVSGNCDVVIGIVNNTVYDPLQLELDSFKEELDKYFKNHTSPDVDLGDISGINASVVNIQKEIDRLNEVAKNLNESLIDLQELGKYEQYIKGGSGYIPEAPRDGQAYVRKDGEWVLLSTFL

SEQ ID NO: 6382 - protein, 1241 aa, Artificial Sequence
  SARS-CoV-2/India/1-31/2020__EPI_ISL_413523 spike protein (1-1211)(F970C_G999C) Foldon construct
MFVFLVLLPLVSSQCVNLTTRTQLPPAYTNSFTRGVYYPDKVFRSSVLHSTQDLFLPFFSNVTWFHAIHVSGTNGTKRFDNPVLPFNDGVYFASTEKSNIIRGWIFGTTLDSKTQSLLIVNNATNVVIKVCEFQFCNDPFLGVYYHKNNKSWMESEFRVYSSANNCTFEYVSQPFLMDLEGKQGNFKNLREFVFKNIDGYFKIYSKHTPINLVRDLPQGFSALEPLVDLPIGINITRFQTLLALHRSYLTPGDSSSGWTAGAAAYYVGYLQPRTFLLKYNENGTITDAVDCALDPLSETKCTLKSFTVEKGIYQTSNFRVQPTESIVRFPNITNLCPFGEVFNATRFASVYAWNRKRISNCVADYSVLYNSASFSTFKCYGVSPTKLNDLCFTNVYADSFVIRGDEVRQIAPGQTGKIADYNYKLPDDFTGCVIAWNSNNLDSKVGGNYNYLYRLFRKSNLKPFERDISTEIYQAGSTPCNGVEGFNCYFPLQSYGFQPTNGVGYQPYRVVVLSFELLHAPATVCGPKKSTNLVKNKCVNFNFNGLTGTGVLTESNKKFLPFQQFGRDIADTTDAVRDPQTLEILDITPCSFGGVSVITPGTNTSNQVAVLYQDVNCTEVPVAIHADQLTPTWRVYSTGSNVFQTRAGCLIGAEHVNNSYECDIPIGAGICASYQTQTNSPRRARSVASQSIIAYTMSLGAENSVAYSNNSIAIPTNFTISVTTEILPVSMTKTSVDCTMYICGDSTECSNLLLQYGSFCTQLNRALTGIAVEQDKNTQEVFAQVKQIYKTPPIKDFGGFNFSQILPDPSKPSKRSFIEDLLFNKVTLADAGFIKQYGDCLGDIAARDLICAQKFNGLTVLPPLLTDEMIAQYTSALLAGTITSGWTFGAGAALQIPFAMQMAYRFNGIGVTQNVLYENQKLIANQFNSVIGKIQDSLSSTASALGKLQDVVNQNAQALNTLVKQLSSNCGAISSVLNDILSRLDKVEAEVQIDRLITCRLQSLQTYVTQQLIRAAEIRASANLAATKMSECVLGQSKRVDFCGKGYHLMSFPQSAPHGVVFLHVTYVPAQEKNFTTAPAICHDGKAHFPREGVFVSNGTHWFVTQRNFYEPQIITTDNTFVSGNCDVVIGIVNNTVYDPLQPELDSFKEELDKYFKNHTSPDVDLGDISGINASVVNIQKEIDRLNEVAKNLNESLIDLQELGKYEQYIKGGSGYIPEAPRDGQAYVRKDGEWVLLSTFL

SEQ ID NO: 6383 - protein, 1241 aa, Artificial Sequence
  SARS-CoV-2/Guangdong/GD2020087-P0008/2020__EPI_ISL_413863 spike protein (1-1211)(F970C_G999C) Foldon construct
MFVFLVLLPLVSSQCVNLTTRTQLPPAYTNSFTRGVYYPDKVFRSSVLHSTQDLFLPFFSNVTWFHAIHVSGTNGTKRFDNPVLPFNDGVYFASTEKSNIIRGWIFGTTLDSKTQSLLIVNNATNVVIKVCEFQFCNDPFLGVYYHKNNKSWMESEFRVYSSANNCTFEYVSQPFLMDLEGKQGNFKNLREFVFKNIDGYFKIYSKHTPINLVRDLPQGFSALEPLVDLPIGINITRFQTLLALHRSYLTPGDSSSGWTAGAAAYYVGYLQPRTFLLKYNENGTITDAVDCALDPLSETKCTLKSFTVEKGIYQTSNFRVQPTESIVRFPNITNLCPFGEVFNATRFASVYAWNRKRISNCVADYSVLYNSASFSTFKCYGVSPTKLNDLCFTNVYADSFVIRGDEVREIAPGQTGKIADYNYKLPDDFTGCVIAWNSNNLDSKVGGNYNYLYRLFRKSNLKPFERDISTEIYQAGSTPCNGVEGFNCYFPLQSYGFQPTNGVGYQPYRVVVLSFELLHAPATVCGPKKSTNLVKNKCVNFNFNGLTGTGVLTESNKKFLPFQQFGRDIADTTDAVRDPQTLEILDITPCSFGGVSVITPGTNTSNQVAVLYQDVNCTEVPVAIHADQLTPTWRVYSTGSNVFQTRAGCLIGAEHVNNSYECDIPIGAGICASYQTQTNSPRRARSVASQSIIAYTMSLGAENSVAYSNNSIAIPTNFTISVTTEILPVSMTKTSVDCTMYICGDSTECSNLLLQYGSFCTQLNRALTGIAVEQDKNTQEVFAQVKQIYKTPPIKDFGGFNFSQILPDPSKPSKRSFIEDLLFNKVTLADAGFIKQYGDCLGDIAARDLICAQKFNGLTVLPPLLTDEMIAQYTSALLAGTITSGWTFGAGAALQIPFAMQMAYRFNGIGVTQNVLYENQKLIANQFNSAIGKIQDSLSSTASALGKLQDVVNQNAQALNTLVKQLSSNCGAISSVLNDILSRLDKVEAEVQIDRLITCRLQSLQTYVTQQLIRAAEIRASANLAATKMSECVLGQSKRVDFCGKGYHLMSFPQSAPHGVVFLHVTYVPAQEKNFTTAPAICHDGKAHFPREGVFVSNGTHWFVTQRNFYEPQIITTDNTFVSGNCDVVIGIVNNTVYDPLQPELDSFKEELDKYFKNHTSPDVDLGDISGINASVVNIQKEIDRLNEVAKNLNESLIDLQELGKYEQYIKGGSGYIPEAPRDGQAYVRKDGEWVLLSTFL

SEQ ID NO: 6384 - protein, 1241 aa, Artificial Sequence
  SARS-CoV-2/Sweden/01/2020__EPI_ISL_411951 spike protein (1-1211)(F970C_G999C) Foldon construct
MFVFLVLLPLVSSQCVNLTTRTQLPPAYTNSFTRGVYYPDKVFRSSVLHSTQDLFLPFFSNVTWFHAIHVSGTNGTKRFDNPVLPFNDGVYFASTEKSNIIRGWIFGTTLDSKTQSLLIVNNATNVVIKVCEFQFCNDPFLGVYYHKNNKSWMESEFRVYSSANNCTFEYVSQPFLMDLEGKQGNFKNLREFVFKNIDGYFKIYSKHTPINLVRDLPQGFSALEPLVDLPIGINITRFQTLLALHRSYLTPGDSSSGWTAGAAAYYVGYLQPRTFLLKYNENGTITDAVDCALDPLSETKCTLKSFTVEKGIYQTSNFRVQPTESIVRFPNITNLCPFGEVFNATRFASVYAWNRKRISNCVADYSVLYNSASFSTFKCYGVSPTKLNDLCFTNVYADSFVIRGDEVRQIAPGQTGKIADYNYKLPDDFTGCVIAWNSNNLDSKVGGNYNYLYRLFRKSNLKPFERDISTEIYQAGSTPCNGVEGFNCYFPLQSYGFQPTNGVGYQPYRVVVLSFELLHAPATVCGPKKSTNLVKNKCVNFNFNGLTGTGVLTESNKKFLPFQQFGRDIADTTDAVRDPQTLEILDITPCSFGGVSVITPGTNTSNQVAVLYQDVNCTEVPVAIHADQLTPTWRVYSTGSNVFQTRAGCLIGAEHVNNSYECDIPIGAGICASYQTQTNSPRRARSVASQSIIAYTMSLGAENSVAYSNNSIAIPTNFTISVTTEILPVSMTKTSVDCTMYICGDSTECSNLLLQYGSFCTQLNRALTGIAVEQDKNTQEVFAQVKQIYKTPPIKDCGGFNFSQILPDPSKPSKRSFIEDLLFNKVTLADAGFIKQYGDCLGDIAARDLICAQKFNGLTVLPPLLTDEMIAQYTSALLAGTITSGWTFGAGAALQIPFAMQMAYRFNGIGVTQNVLYENQKLIANQFNSAIGKIQDSLSSTASALGKLQDVVNQNAQALNTLVKQLSSNCGAISSVLNDILSRLDKVEAEVQIDRLITCRLQSLQTYVTQQLIRAAEIRASANLAATKMSECVLGQSKRVDFCGKGYHLMSFPQSAPHGVVFLHVTYVPAQEKNFTTAPAICHDGKAHFPREGVFVSNGTHWFVTQRNFYEPQIITTDNTFVSGNCDVVIGIVNNTVYDPLQPELDSFKEELDKYFKNHTSPDVDLGDISGINASVVNIQKEIDRLNEVAKNLNESLIDLQELGKYEQYIKGGSGYIPEAPRDGQAYVRKDGEWVLLSTFL

SEQ ID NO: 6385 - protein, 1241 aa, Artificial Sequence
  SARS-CoV-2/Tianmen/HBCDC-HB-07/2020__EPI_ISL_412983 spike protein (1-1211)(F970C_G999C) Foldon construct
MFVFLVLLPLVSSQCVNLTTRTQLPPAYTNSFTRGVYYPDKVFRSSVLHSTQDLFLPFFSNVTWFHAIHVSGTNGTKRFDNPVLPFNDGVYFASTEKSNIIRGWIFGTTLDSKTQSLLIVNNATNVVIKVCEFQFCNDPFLGVYYHKNNKSWMESEFRVYSSANNCTFEYVSQPFLMDLEGKQGNFKNLREFVFKNIDGYFKIYSKHTPINLVRDLPQGFSALEPLVDLPIGINITRFQTLLALHRSYLTPGDSSSGWTAGAAAYYVGYLQPRTFLLKYNENGTITDAVDCALDPLSETKCTLKSFTVEKGIYQTSNFRVQPTESIVRFPNITNLCPFGEVFNATRFASVYAWNRKRISNCVADYSVLYNSASFSTFKCYGVSPTKLNDLCFTNVYADSFVIRGDEVRQIAPGQTGKIADYNYKLPDDFTGCVIAWNSNNLDSKVGGNYNYLYRLFRKSNLKPFERDISTEIYQAGSTPCNGVEGFNCYFPLQSYGFQPTNGVGYQPYRVVVLSFELLHAPATVCGPKKSTNLVKNKCVNFNFNGLTGTGVLTESNKKFLPFQQFGRDIADTTDAVRDPQTLEILDITPCSFGGVSVITPGTNTSNQVAVLYQDLNCTEVPVAIHADQLTPTWRVYSTGSNVFQTRAGCLIGAEHVNNSYECDIPIGAGICASYQTQTNSPRRARSVASQSIIAYTMSLGAENSVAYSNNSIAIPTNFTISVTTEILPVSMTKTSVDCTMYICGDSTECSNLLLQYGSFCTQLNRALTGIAVEQDKNTQEVFAQVKQIYKTPPIKDFGGFNFSQILPDPSKPSKRSFIEDLLFNKVTLADAGFIKQYGDCLGDIAARDLICAQKFNGLTVLPPLLTDEMIAQYTSALLAGTITSGWTFGAGAALQIPFAMQMAYRFNGIGVTQNVLYENQKLIANQFNSAIGKIQDSLSSTASALGKLQDVVNQNAQALNTLVKQLSSNCGAISSVLNDILSRLDKVEAEVQIDRLITCRLQSLQTYVTQQLIRAAEIRASANLAATKMSECVLGQSKRVDFCGKGYHLMSFPQSAPHGVVFLHVTYVPAQEKNFTTAPAICHDGKAHFPREGVFVSNGTHWFVTQRNFYEPQIITTDNTFVSGNCDVVIGIVNNTVYDPLQPELDSFKEELDKYFKNHTSPDVDLGDISGINASVVNIQKEIDRLNEVAKNLNESLIDLQELGKYEQYIKGGSGYIPEAPRDGQAYVRKDGEWVLLSTFL

SEQ ID NO: 6386 - protein, 1241 aa, Artificial Sequence
  SARS-CoV-2/Hong Kong/case42_VM20002493/2020__EPI_ISL_414527 spike protein (1-1211)(F970C_G999C) Foldon construct
MFVFLVLLPLVSSQCVNLTTRTQLPPAYTNSFTRGVYYPDKVFRSSVLHSTQDLFLPFFSNVTWFHAIHVSGTNGTKRFDNPVLPFNDGVYFASTEKSNIIRGWIFGTTLDSKTQSLLIVNNATNVVIKVCEFQFCNDPFLGVYYHKNNKSWMESEFRVYSSANNCTFEYVSQPFLMDLEGKQGNFKNLREFVFKNIDGYFKIYSKHTPINLVRDLPQGFSALEPLVDLPIGINITRFQTLLALHRSYLTPGDSSSGWTAGAAAYYVGYLQPRTFLLKYNENGTITDAVDCALDPLSETKCTLKSFTVEKGIYQTSNFRVQPTESIVRFPNITNLCPFGEVFNATRFASVYAWNRKRISNCVADYSVLYNSASFSTFKCYGVSPTKLNDLCFTNVYADSFVIRGDEVRQIAPGQTGKIADYNYKLPDDFTGCVIAWNSNNLDSKVGGNYNYLYRLFRKSNLKPFERDISTEIYQAGSTPCNGVEGFNCYFPLQSYGFQPTNGVGYQPYRVVVLSFELLHAPATVCGPKKSTNLVKNKCVNFNFNGLTGTGVLTESNKKFLPFQQFGRDIADTTDAVRDPQTLEILDITPCSFGGVSVITPGTNTSNQVAVLYQDVNCTEVPVAIHADQLTPTWRVYSTGSNVFQTRAGCLIGAEHVNNSYECDIPIGAGICASYQTQTNSPRRARSVASQSIIAYTMSLGAENSVAYSNNSIAIPTNFAISVTTEILPVSMTKTSVDCTMYICGDSTECSNLLLQYGSFCTQLNRALTGIAVEQDKNTQEVFAQVKQIYKTPPIKDFGGFNFSQILPDPSKPSKRSFIEDLLFNKVTLADAGFIKQYGDCLGDIAARDLICAQKFNGLTVLPPLLTDEMIAQYTSALLAGTITSGWTFGAGAALQIPFAMQMAYRFNGIGVTQNVLYENQKLIANQFNSAIGKIQDSLSSTASALGKLQDVVNQNAQALNTLVKQLSSNCGAISSVLNDILSRLDKVEAEVQIDRLITCRLQSLQTYVTQQLIRAAEIRASANLAATKMSECVLGQSKRVDFCGKGYHLMSFPQSAPHGVVFLHVTYVPAQEKNFTTAPAICHDGKAHFPREGVFVSNGTHWFVTQRNFYEPQIITTDNTFVSGNCDVVIGIVNNTVYDPLQPELDSFKEELDKYFKNHTSPDVDLGDISGINASVVNIQKEIDRLNEVAKNLNESLIDLQELGKYEQYIKGGSGYIPEAPRDGQAYVRKDGEWVLLSTFL

SEQ ID NO: 6387 - protein, 1241 aa, Artificial Sequence
  SARS-CoV-2/USA/CruiseA-23/2020__EPI_ISL_414482 spike protein (1-1211)(F970C_G999C) Foldon construct
MFVFLVLLPLVSSQCVNLTTRTQLPPAYTNSFTRGVYYPDKVFRSSVLHSTQDLFLPFFSNVTWFHAIHVSGTNGTKRFDNPVLPFNDGVYFASTEKSNIIRGWIFGTTLDSKTQSLLIVNNATNVVIKVCEFQFCNDPFLGVYYHKNNKSWMESEFRVYSSANNCTFEYVSQPFLMDLEVKQGNFKNLREFVFKNIDGYFKIYSKHTPINLVRDLPQGFSALEPLVDLPIGINITRFQTLLALHRSYLTPGDSSSGWTAGAAAYYVGYLQPRTFLLKYNENGTITDAVDCALDPLSETKCTLKSFTVEKGIYQTSNFRVQPTESIVRFPNITNLCPFGEVFNATRFASVYAWNRKRISNCVADYSVLYNSASFSTFKCYGVSPTKLNDLCFTNVYADSFVIRGDEVRQIAPGQTGKIADYNYKLPDDFTGCVIAWNSNNLDSKVGGNYNYLYRLFRKSNLKPFERDISTEIYQAGSTPCNGVEGFNCYFPLQSYGFQPTNGVGYQPYRVVVLSFELLHAPATVCGPKKSTNLVKNKCVNFNFNGLTGTGVLTESNKKFLPFQQFGRDIADTTDAVRDPQTLEILDITPCSFGGVSVITPGTNTSNQVAVLYQDVNCTEVPVAIHADQLTPTWRVYSTGSNVFQTRAGCLIGAEHVNNSYECDIPIGAGICASYQTQTNSPRRARSVASQSIIAYTMSLGAENSVAYSNNSIAIPTNFTISVTTEILPVSMTKTSVDCTMYICGDSTECSNLLLQYGSFCTQLNRALTGIAVEQDKNTQEVFAQVKQIYKTPPIKDFGGFNFSQILPDPSKPSKRSFIEDLLFNKVTLADAGFIKQYGDCLGDIAARDLICAQKFNGLTVLPPLLTDEMIAQYTSALLAGTITSGWTFGAGAALQIPFAMQMAYRFNGIGVTQNVLYENQKLIANQFNSAIGKIQDSLSSTASALGKLQDVVNQNAQALNTLVKQLSSNCGAISSVLNDILSRLDKVEAEVQIDRLITCRLQSLQTYVTQQLIRAAEIRASANLAATKMSECVLGQSKRVDFCGKGYHLMSFPQSAPHGVVFLHVTYVPAQEKNFTTAPAICHDGKAHFPREGVFVSNGTHWFVTQRNFYEPQIITTDNTFVSGNCDVVIGIVNNTVYDPLQPELDSFKEELDKYFKNHTSPDVDLGDISGINASVVNIQKEIDRLNEVAKNLNESLIDLQELGKYEQYIKGGSGYIPEAPRDGQAYVRKDGEWVLLSTFL

SEQ ID NO: 6388 - protein, 1241 aa, Artificial Sequence
  SARS-CoV-2/Hong Kong/case85_VM20002868/2020__EPI_ISL_414519 spike protein (1-1211)(F970C_G999C) Foldon construct
MFVFLVLVPLVSSQCVNLTTRTQLPPAYTNSFTRGVYYPDKVFRSSVLHSTQDLFLPFFSNVTWFHAIHVSGTNGTKRFDNPVLPFNDGVYFASTEKSNIIRGWIFGTTLDSKTQSLLIVNNATNVVIKVCEFQFCNDPFLGVYYHKNNKSWMESEFRVYSSANNCTFEYVSQPFLMDLEGKQGNFKNLREFVFKNIDGYFKIYSKHTPINLVRDLPQGFSALEPLVDLPIGINITRFQTLLALHRSYLTPGDSSSGWTAGAAAYYVGYLQPRTFLLKYNENGTITDAVDCALDPLSETKCTLKSFTVEKGIYQTSNFRVQPTESIVRFPNITNLCPFGEVFNATRFASVYAWNRKRISNCVADYSVLYNSASFSTFKCYGVSPTKLNDLCFTNVYADSFVIRGDEVRQIAPGQTGKIADYNYKLPDDFTGCVIAWNSNNLDSKVGGNYNYLYRLFRKSNLKPFERDISTEIYQAGSTPCNGVEGFNCYFPLQSYGFQPTNGVGYQPYRVVVLSFELLHAPATVCGPKKSTNLVKNKCVNFNFNGLTGTGVLTESNKKFLPFQQFGRDIADTTDAVRDPQTLEILDITPCSFGGVSVITPGTNTSNQVAVLYQDVNCTEVPVAIHADQLTPTWRVYSTGSNVFQTRAGCLIGAEHVNNSYECDIPIGAGICASYQTQTNSPRRARSVASQSIIAYTMSLGAENSVAYSNNSIAIPTNFTISVTTEILPVSMTKTSVDCTMYICGDSTECSNLLLQYGSFCTQLNRALTGIAVEQDKNTQEVFAQVKQIYKTPPIKDFGGFNFSQILPDPSKPSKRSFIEDLLFNKVTLADAGFIKQYGDCLGDIAARDLICAQKFNGLTVLPPLLTDEMIAQYTSALLAGTITSGWTFGAGAALQIPFAMQMAYRFNGIGVTQNVLYENQKLIANQFNSAIGKIQDSLSSTASALGKLQDVVNQNAQALNTLVKQLSSNCGAISSVLNDILSRLDKVEAEVQIDRLITCRLQSLQTYVTQQLIRAAEIRASANLAATKMSECVLGQSKRVDFCGKGYHLMSFPQSAPHGVVFLHVTYVPAQEKNFTTAPAICHDGKAHFPREGVFVSNGTHWFVTQRNFYEPQIITTDNTFVSGNCDVVIGIVNNTVYDPLQPELDSFKEELDKYFKNHTSPDVDLGDISGINASVVNIQKEIDRLNEVAKNLNESLIDLQELGKYEQYIKGGSGYIPEAPRDGQAYVRKDGEWVLLSTFL

SEQ ID NO: 6389 - protein, 1241 aa, Artificial Sequence; identical to SEQ ID NO: 6379
  SARS-CoV-2/England/200990660/2020__EPI_ISL_414523 spike protein (1-1211)(F970C_G999C) Foldon construct

SEQ ID NO: 6390 - protein, 1241 aa, Artificial Sequence
  SARS-CoV-2/Australia/NSW09/2020__EPI_ISL_413595 spike protein (1-1211)(F970C_G999C) Foldon construct
MFVFLVLLPLVSSQCVNLTTRTQLPPAYTNSFTRGVYYPDKVFRSSVLHSTQDLFLPFFSNVTWFHAIHVSGTNGTKRFDNPVLPFNDGVYFASTEKSNIIRGWIFGTTLDSKTQSLLIVNNATNVVIKVCEFQFCNDPFLGVYYHKNNKSWMESEFRVYSSANNCTFEYVSQPFLMDLEGKQGNFKNLREFVFKNIDGYFKIYSKHTPINLVRDLPQGFSALEPLVDLPIGINITRFQTLLALHRSYLTPGDSSSGWTAGAAAYYVGYLQPRTFLLKYNENGTITDAVDCALDPLSETKCTLKSFTVEKGIYQTSNFRVQPTESIVRFPNITNLCPFGEVFNATRFASVYAWNRKRISNCVADYSVLYNSASFSTFKCYGVSPTKLNDLCFTNVYADSFVIRGDEVRQIAPGQTGKIADYNYKLPDDFTGCVIAWNSNNLDSKVGGNYNYLYRLFRKSNLKPFERDISTEIYQAGSTPCNGVEGFNCYFPLQSYGFQPTNGVGYQPYRVVVLSFELLHAPATVCGPKKSTNLVKNKCVNFNFNGLTGTGVLTESNKKFLPFQQFGRDIADTTDAVRDPQTLEILDITPCSFGGVSVITPGTNTSNQVAVLYQDVNCTEVPVAIHADQLTPTWRVYSTGSNVFQTRAGCLIGAEHVNNSYECDIPIGAGICASYQTQTNSPRRARSVASQSIIAYTMSLGAENSVAYSNNSIAIPTNFTISVTTEILPVSMTKTSVDCTMYICGDSTECSNLLLQYGSFCTQLNRALTGIAVEQDKNTQEVFAQVKQIYKTPPIKDFGGFNFSQILPDPSKPSKRSFIEDLLFNKVTLADAGFIKQYGDCLGDIAARDLICAQKFNGLTVLPPLLTDEMIAQYTSALLAGTITSGWTFGAGAALQIPFAMQMAYRFNGIGVTQNVLYENQKLIANQFNSAIGKIQDSLSFTASALGKLQDVVNQNAQALNTLVKQLSSNCGAISSVLNDILSRLDKVEAEVQIDRLITCRLQSLQTYVTQQLIRAAEIRASANLAATKMSECVLGQSKRVDFCGKGYHLMSFPQSAPHGVVFLHVTYVPAQEKNFTTAPAICHDGKAHFPREGVFVSNGTHWFVTQRNFYEPQIITTDNTFVSGNCDVVIGIVNNTVYDPLQPELDSFKEELDKYFKNHTSPDVDLGDISGINASVVNIQKEIDRLNEVAKNLNESLIDLQELGKYEQYIKGGSGYIPEAPRDGQAYVRKDGEWVLLSTFL

SEQ ID NO: 6391 - protein, 1241 aa, Artificial Sequence; identical to SEQ ID NO: 6371
  SARS-CoV-2/Australia/NSW10/2020__EPI_ISL_413596 spike protein (1-1211)(F970C_G999C) Foldon construct

SEQ ID NO: 6392 - protein, 1241 aa, Artificial Sequence
  SARS-CoV-2/Switzerland/1000477797/2020__EPI_ISL_413023 spike protein (1-1211)(F970C_G999C) Foldon construct
MFVFLVLLPLVSSQCVNLTTRTQLPPAYTNSFTRGVYYPDKVFRSSVLHSTQDLFLPFFSNVTWFHAIHVSGTNGTKRFDNPVLPFNDGVYFASTEKSNIIRGWIFGTTLDSKTQSLLIVNNATNVVIKVCEFQFCNDPFLGVYYHKNNKSWMESEFRVYSSANNCTFEYVSQPFLMDLEGKQGNFKNLREFVFKNIDGYFNIYSKHTPINLVRDLPQGFSALEPLVDLPIGINITRFQTLLALHRSYLTPGDSSSGWTAGAAAYYVGYLQPRTFLLKYNENGTITDAVDCALDPLSETKCTLKSFTVEKGIYQTSNFRVQPTESIVRFPNITNLCPFGEVFNATRFASVYAWNRKRISNCVADYSVLYNSASFSTFKCYGVSPTKLNDLCFTNVYADSFVIRGDEVRQIAPGQTGKIADYNYKLPDDFTGCVIAWNSNNLDSKVGGNYNYLYRLFRKSNLKPFERDISTEIYQAGSTPCNGVEGFNCYFPLQSYGFQPTNGVGYQPYRVVVLSFELLHAPATVCGPKKSTNLVKNKCVNFNFNGLTGTGVLTESNKKFLPFQQFGRDIADTTDAVRDPQTLEILDITPCSFGGVSVITPGTNTSNQVAVLYQGVNCTEVPVAIHADQLTPTWRVYSTGSNVFQTRAGCLIGAEHVNNSYECDIPIGAGICASYQTQTNSPRRARSVASQSIIAYTMSLGAENSVAYSNNSIAIPTNFTISVTTEILPVSMTKTSVDCTMYICGDSTECSNLLLQYGSFCTQLNRALTGIAVEQDKNTQEVFAQVKQIYKTPPIKDFGGFNFSQILPDPSKPSKRSFIEDLLFNKVTLADAGFIKQYGDCLGDIAARDLICAQKFNGLTVLPPLLTDEMIAQYTSALLAGTITSGWTFGAGAALQIPFAMQMAYRFNGIGVTQNVLYENQKLIANQFNSAIGKIQDSLSSTASALGKLQDVVNQNAQALNTLVKQLSSNCGAISSVLNDILSRLDKVEAEVQIDRLITCRLQSLQTYVTQQLIRAAEIRASANLAATKMSECVLGQSKRVDFCGKGYHLMSFPQSAPHGVVFLHVTYVPAQEKNFTTAPAICHDGKAHFPREGVFVSNGTHWFVTQRNFYEPQIITTDNTFVSGNCDVVIGIVNNTVYDPLQPELDSFKEELDKYFKNHTSPDVDLGDISGINASVVNIQKEIDRLNEVAKNLNESLIDLQELGKYEQYIKGGSGYIPEAPRDGQAYVRKDGEWVLLSTFL

SEQ ID NO: 6393 - protein, 1241 aa, Artificial Sequence
  SARS-CoV-2/Belgium/BA-02291/2020__EPI_ISL_415159 spike protein (1-1211)(F970C_G999C) Foldon construct
MFVFLVLLPLVSSQCVNLTTRTQLPPAYTNSFTRGVYYPDKVFRSSVLHSTQDLFLPFFSNVTWFHAIHVSGTNGTKRFDNPVLPFNDGVYFASTEKSNIIRGWIFGTTLDSKTQSLLIVNNATNVVIKVCEFQFCNDPFLGVYYHKNNKSWMESEFRVYSSANNCTFEYVSQPFLMDLEGKQGNFKNLREFVFKNIDGYFKIYSKHTPINLVRDLPQGFSALEPLVDLPIGINITRFQTLLALHRSYLTPGDSSSGWTAGAAAYYVGYLQPRTFLLKYNENGTITDAVDCALDPLSETKCTLKSFTVEKGIYQTSNFRVQPTESIVRFPNITNLCPFGEVFNATRFASVYAWNRKRISNCVADYSVLYNSASFSTFKCYGVSPTKLNDLCFTNVYADSFVIRGDEVRQIAPGQTGKIADYNYKLPDDFTGCVIAWNSNNLDSKVGGNYNYLYRLFRRSNLKPFERDISTEIYQAGSTPCNGVEGFNCYFPLQSYGFQPTNGVGYQPYRVVVLSFELLPAPATVCGPKKSTNLVKNKCVNFNFNGLTGTGVLTESNKKFLPFQQFGRDIADTTDAVRDPQTLEILDITPCSFGGVSVITPGTNTSNQVAVLYQGVNCTEVPVAIHADQLTPTWRVYSTGSNVFQTRAGCLIGAEHVNNSYECDIPIGAGICASYQTQTNSPRRARSVASQSIIAYTMSLGAENSVAYSNNSIAIPTNFTISVTTEILPVSMTKTSVDCTMYICGDSTECSNLLLQYGSFCTQLNRALTGIAVEQDKNTQEVFAQVKQIYKTPPIKDFGGFNFSQILPDPSKPSKRSFIEDLLFNKVTLADAGFIKQYGDCLGDIAARDLICAQKFNGLTVLPPLLTDEMIAQYTSALLAGTITSGWTFGAGAALQIPFAMQMAYRFNGIGVTQNVLYENQKLIANQFNSAIGKIQDSLSSAAPALGKLQDVVNQNAQALNTLVKQLSSNCGAISSVLNDILSRLDKVEAEVQIDRLITCRLQSLQTYVTQQLIRAAEIRASANLAATKMSECVLGQSKRVDFCGKGYHLMSFPQSAPHGVVFLHVTYVPAQEKNFTTAPAICHDGKAHFPREGVFVSNGTHWFVTQRNFYEPQIITTDNTFVSGNCDVVIGIVNNTVYDPLQPELDSFKEELDKYFKNHTSPDVDLGDISGINASVVNIQKEIDRLNEVAKNLNESLIDLQELGKYEQYIKGGSGYIPEAPRDGQAYVRKDGEWVLLSTFL

SEQ ID NO: 6394 - protein, 1241 aa, Artificial Sequence
  SARS-CoV-2/USA/WA8-UW5/2020__EPI_ISL_413486 spike protein (1-1211)(F970C_G999C) Foldon construct
MFVFLVLLPLVSSQCVNLTTRTQLPPAYTNSFTRGVYYPDKVFRSSVLHSTQDLFLPFFSNVTWFHAIHVSGTNGTKRFDNPVLPFNDGVYFASTEKSNIIRGWIFGTTLDSKTQSLLIVNNATNVVIKVCEFQFCNDPFLGVYYHKNNKSWMESEFRVYSSANNCTFEYVSQPFLMDLEGKQGNFKNLREFVFKNIDGYFKIYSKHTPINLVRDLPQGFSALEPLVDLPIGINITRFQTLLALHRSYLTPGDSSSGWTAGAAAYYVGYLQPRTFLLKYNENGTITDAVDCALDPLSETKCTLKSFTVEKGIYQTSNFRVQPTESIVRFPNITNLCPFGEVFNATRFASVYAWNRKRISNCVADYSVLYNSASFSTFKCYGVSPTKLNDLCFTNVYADSFVIRGDEVRQIAPGQTGKIADYNYKLPDDFTGCVIAWNSNNLDSKVGGNYNYLYRLFRKSNLKPFERDISTEIYQAGSTPCNGVEGFNCYFPLQSYGFQPTNGVGYQPYRVVVLSFELLHAPATVCGPKKSTNLVKNKCVNFNFNGLTGTGVLTESNKKFLPFQQFGRDIADTTDAVRDPQTLEILDITPCSFGGVSVITPGTNTSNQVAVLYQDVNCTEVPVAIHADQLTPTWRVYSTGSNVFQTRAGCLIGAEYVNNSYECDIPIGAGICASYQTQTNSPRRARSVASQSIIAYTMSLGAENSVAYSNNSIAIPTNFTISVTTEILPVSMTKTSVDCTMYICGDSTECSNLLLQYGSFCTQLNRALTGIAVEQDKNTQEVFAQVKQIYKTPPIKDFGGFNFSQILPDPSKPSKRSFIEDLLFNKVTLADAGFIKQYGDCLGDIAARDLICAQKFNGLTVLPPLLTDEMIAQYTSALLAGTITSGWTFGAGAALQIPFAMQMAYRFNGIGVTQNVLYENQKLIANQFNSAIGKIQDSLSSTASALGKLQDVVNQNAQALNTLVKQLSSNCGAISSVLNDILSRLDKVEAEVQIDRLITCRLQSLQTYVTQQLIRAAEIRASANLAATKMSECVLGQSKRVDFCGKGYHLMSFPQSAPHGVVFLHVTYVPAQEKNFTTAPAICHDGKAHFPREGVFVSNGTHWFVTQRNFYEPQIITTDNTFVSGNCDVVIGIVNNTVYDPLQPELDSFKEELDKYFKNHTSPDVDLGDISGINASVVNIQKEIDRLNEVAKNLNESLIDLQELGKYEQYIKGGSGYIPEAPRDGQAYVRKDGEWVLLSTFL

SEQ ID NO: 6395 - protein, 1241 aa, Artificial Sequence
  SARS-CoV-2/England/20102000506/2020__EPI_ISL_415147 spike protein (1-1211)(F970C_G999C) Foldon construct
MFVFLVLLPLVSSQCVNLTTRTQLPPAYTNSFTRGVYYPDKVFRSSVLHSTQDLFLPFFSNVTWFHAIHVSGTNGTKRFDNPVLPFNDGVYFASTEKSNIIRGWIFGTTLDSKTQSLLIVNNATNVVIKVCEFQFCNDPFLGVYYHKNNKSWMESEFRVYSSANNCTFEYVSQPFLMDLEGKQGNFKNLREFVFKNIDGYFKIYSKHTPINLVRDLPQGFSALEPLVDLPIGINITRFQTLLALHRSYLTPGDSSSGWTAGAAAYYVGYLQPRTFLLKYNENGTITDAVDCALDPLSETKCTLKSFTVEKGIYQTSNFRVQPTESIVRFPNITNLCPFGEVFNATRFASVYAWNRKRISNCVADYSVLYNSASFSTFKCYGVSPTKLNDLCFTNVYADSFVIRGDEVRQIAPGQTGKIADYNYKLPDDFTGCVIAWNSNNLDSKVGGNYNYLYRLFRKSNLKPFERDISTEIYQAGSTPCNGVEGFNCYFPLQSYGFQPTNGVGYQPYRVVVLSFELLHAPATVCGPKKSTNLVKNKCVNFNFNGLTGTGVLTESNKKFLPFQQFGRDIADTTDAVRDPQTLEILDITPCSFGGVSVITPGTNTSNQVAVLYQGVNCTEVPVAIHADQLTPTWRVYSTGSNVFQTRAGCLIGAEHVNNSYECDIPIGAGICASYQTQTNSPRRARSVASQSIIAYTMSLGAENSVAYSNNSIAIPTNFTISVTTEILPVSMTKTSVDCTMYICGDSTECSNLLLQYGSFCTQLNRALTGIAVEQDKNTQEVFAQVKQIYKTPPIKDFGGFNFSQILPDPSKPSKRSFIEDLLFNKVTLADAGFIKQYGYCLGDIAARDLICAQKFNGLTVLPPLLTDEMIAQYTSALLAGTITSGWTFGAGAALQIPFAMQMAYRFNGIGVTQNVLYENQKLIANQFNSAIGKIQDSLSSTASALGKLQDVVNQNAQALNTLVKQLSSNCGAISSVLNDILSRLDKVEAEVQIDRLITCRLQSLQTYVTQQLIRAAEIRASANLAATKMSECVLGQSKRVDFCGKGYHLMSFPQSAPHGVVFLHVTYVPAQEKNFTTAPAICHDGKAHFPREGVFVSNGTHWFVTQRNFYEPQIITTDNTFVSGNCDVVIGIVNNTVYDPLQPELDSFKEELDKYFKNHTSPDVDLGDISGINASVVNIQKEIDRLNEVAKNLNESLIDLQELGKYEQYIKGGSGYIPEAPRDGQAYVRKDGEWVLLSTFL

SEQ ID NO: 6396 - protein, 1241 aa, Artificial Sequence
  SARS-CoV-2/Belgium/VAG-03013/2020__EPI_ISL_415155 spike protein (1-1211)(F970C_G999C) Foldon construct
MFVFLVLLPLVSSQCVNLTTRTQLPPAYTNSFTRGVYYPDKVFRSSVLHSTQDLFLPFFSNVTWFHAIHVSGTNGTKRFDNPVLPFNDGVYFASTEKSNIIRGWIFGTTLDSKTQSLLIVNNATNVVIKVCEFQFCNDPFLGVYYHKNNKSWMESEFRVYSSANNCTFEYVSQPFLMDLEGKQGNFKNLREFVFKNIDGYFKIYSKHTPINLVRDLPQGFSALEPLVDLPIGINITRFQTLLALHRSYLTPGDSSSGWTAGAAAYYVGYLQPRTFLLKYNENGTITDAVDCALDPLSETKCTLKSFTVEKGIYQTSNFRVQPTESIVRFPNITNLCPFGEVFNATRFASVYAWNRKRISNCVADYSVLYNSASFSTFKCYGVSPTKLNDLCFTNVYADSFVIRGDEVRQIAPGQTGKIADYNYKLPDDFTGCVIAWNSNNLDSKVGGNYNYLYRLFRKSNLKPFERDISTEIYQAGSTPCNGVEGFNCYFPLQSYGFQPTNGVGYQPYRVVVLSFELLHAPATVCGPKKSTNLVKNKCVNFNFNGLTGTGVLTESNKKFLPFQQFGRDIADTTDAVRDPQTLEILDITPCSFGGVSVITPGTNTSNQVAVLYQGVNCTEVPVAIHADQLTPTWRVYSTGSNVFQTRAGCLIGAEHVNNSYECDIPIGAGICASYQTQTNSPRRARSVASQSIIAYTMSLGAENSVAYSNNSIAIPTNFTISVTTEILPVSMTKTSVDCTMYICGDSTECSNLLLQYGSFCTQLNRALTGIAVEQDKNTQEVFAQVKQIYKTPPIKDFGGFNFSQILPDPSKPSKRSFIEDLLFNKVTLADAGFIKQYGDCLGDIAARDLICAQKFNGLTVLPPLLTDEMIAQYTSALLAGTITSGWTFGAGAALQIPFAMQMAYRFNGIGVTQNVLYENQKLIANQFNSAIGKIQDSLSSTATALGKLQDVVNQNAQALNTLVKQLSSNCGAISSVLNDILSRLDKVEAEVQIDRLITCRLQSLQTYVTQQLIRAAEIRASANLAATKMSECVLGQSKRVDFCGKGYHLMSFPQSAPHGVVFLHVTYVPAQEKNFTTAPAICHDGKAHFPREGVFVSNGTHWFVTQRNFYEPQIITTDNTFVSGNCDVVIGIVNNTVYDPLQPELDSFKEELDKYFKNHTSPDVDLGDISGINASVVNIQKEIDRLNEVAKNLNESLIDLQELGKYEQYIKGGSGYIPEAPRDGQAYVRKDGEWVLLSTFL

SEQ ID NO: 6397 - protein, 1241 aa, Artificial Sequence
  SARS-CoV-2/Belgium/BC-03016/2020__EPI_ISL_415157 spike protein (1-1211)(F970C_G999C) Foldon construct
MFVFLVLLPLVSSQCVNLTTRTQLPPAYTNSFTRGVYYPDKVFRSSVLHSTQDLFLPFFSNVTWFHAIHVSGTNGTKRFDNPVLPFNDGVYFASTEKSNIIRGWIFGTTLDSKTQSLLIVNNATNVVIKVCEFQFCNDPFLGVYYHKNNKSWMESEFRVYSSANNCTFEYVSQPFLMDLEGKQGNFKNLREFVFKNIDGYFKIYSKHTPINLVRDLPQGFSALEPLVDLPIGINITRFQTLLALHRSYLTPGDSSSGWTAGAAAYYVGYLQPRTFLLKYNENGTITDAVDCALDPLSETKCTLKSFTVEKGIYQTSNFRVQPTESIVRFPNITNLCPFGEVFNATRFASVYAWNRKRISNCVADYSVLYNSASFSTFKCYGVSPTKLNDLCFTNVYADSFVIRGDEVRQIAPGQTGKIADYNYKLPDDFTGCVIAWNSNNLDSKVGGNYNYLYRLFRKSNLKPFERDISTEIYQAGSTPCNGVEGFNCYFPLQSYGFQPTNGVGYQPYRVVVLSFELLHAPATVCGPKKSTNLVKNKCVNFNFNGLTGTGVLTESNKKFLPFQQFGRDIADTTDAVRDPQTLEILDITPCSFGGVSVITPGTNTSNQVAVLYQGVNCTEVPVAIHADQLTPTWRVYSTGSNVFQTRAGCLIGAEHVNNSYECDIPIGAGICASYQTQTNSPRRARSVASQSIIAYTMSLGAENSVAYSNNSIAIPTNFTISVTTEILPVSMTKTSVDCTMYICGDSTECSNLLLQYGSFCTQLNRALTGIAVEQDKNTQEVFAQVKQIYKTPPIKDFGGFNFSQILPDPSKPSKRSFIEDLLFNKVTLADAGFIKQYGDCLGDIAARDLICAQKFNGLTVLPPLLTDEMIAQYTSALLAGTITSGWTFGAGAALQIPFAMQMAYRFNGIGVTQNVLYENQKLIANQFNSAIGKIQDSLSSTAPALGKLQDVVNQNAQALNTLVKQLSSNCGAISSVLNDILSRLDKVEAEVQIDRLITCRLQSLQTYVTQQLIRAAEIRASANLAATKMSECVLGQSKRVDFCGKGYHLMSFPQSAPHGVVFLHVTYVPAQEKNFTTAPAICHDGKAHFPREGVFVSNGTHWFVTQRNFYEPQIITTDNTFVSGNCDVVIGIVNNTVYDPLQPELDSFKEELDKYFKNHTSPDVDLGDISGINASVVNIQKEIDRLNEVAKNLNESLIDLQELGKYEQYIKGGSGYIPEAPRDGQAYVRKDGEWVLLSTFL

SEQ ID NO: 6398 - protein, 1241 aa, Artificial Sequence
  SARS-CoV-2/Germany/BavPat3/2020__EPI_ISL_414521 spike protein (1-1211)(F970C_G999C) Foldon construct
MFVFLVLLPLVSSQCVNLTTRTQLPPAYTNSFTRGVYYPDKVFRSSVLHSTQDLFLPFFSNVTWFHAIHVSGTNGTKRFDNPVLPFNDGVYFASTEKSNIIRGWIFGTTLDSKTQSLLIVNNATNVVIKVCEFQFCNDPFLGVYYHKNNKSWMESEFRVYSSANNCTFEYVSQPFLMDLEGKQGNFKNLREFVFKNIDGYFKIYSKHTPINLVRDLPQGFSALEPLVDLPIGINITRFQTLLALHRSYLTPGDSSSGWTAGAAAYYVGYLQPRTFLLKYNENGTITDAVDCALDPLSETKCTLKSFTVEKGIYQTSNFRVQPTESIVRFPNITNLCPFGEVFNATRFASVYAWNRKRISNCVADYSVLYNSASFSTFKCYGVSPTKLNDLCFTNVYADSFVIRGDEVRQIAPGQTGKIADYNYKLPDDFTGCVIAWNSNNLDSKVGGNYNYLYRLFRKSNLKPFERDISTEIYQAGSTPCNGVEGFNCYFPLQSYGFQPTNGVGYQPYRVVVLSFELLHAPATVCGPKKSTNLVKNKCVNFNFNGLTGTGVLTESNKKFLPFQQFGRDIADTTDAVRDPQTLEILDITPCSFGGVSVITPGTNTSNQVAVLYQDVNCTEVPVAIHADQLTPTWRVYSTGSNVFQTRAGCLIGAEHVNNSYECDIPIGAGICASYQTQTNSPRRARSVASQSIIAYTMSLGAENSVAYSNNSIAIPTNFTISVTTEILPVSMTKTSVDCTMYICGDSTECSNLLLQYGSFCTQLNRALTGIAVEQDKNTQQVFAQVKQIYKTPPIKDFGGFNFSQILPDPSKPSKRSFIEDLLFNKVTLADAGFIKQYGDCLGDIAARDLICAQKFNGLTVLPPLLTDEMIAQYTSALLAGTITSGWTFGAGAALQIPFAMQMAYRFNGIGVTQNVLYENQKLIANQFNSAIGKIQDSLSSTASALGKLQDVVNQNAQALNTLVKQLSSNCGAISSVLNDILSRLDKVEAEVQIDRLITCRLQSLQTYVTQQLIRAAEIRASANLAATKMSECVLGQSKRVDFCGKGYHLMSFPQSAPHGVVFLHVTYVPAQEKNFTTAPAICHDGKAHFPREGVFVSNGTHWFVTQRNFYEPQIITTDNTFVSGNCDVVIGIVNNTVYDPLQPELDSFKEELDKYFKNHTSPDVDLGDISGINASVVNIQKEIDRLNEVAKNLNESLIDLQELGKYEQYIKGGSGYIPEAPRDGQAYVRKDGEWVLLSTFL

SEQ ID NO: 6399 - protein, 1241 aa, Artificial Sequence
  SARS-CoV-2/France/HF1805/2020__EPI_ISL_414628 spike protein (1-1211)(F970C_G999C) Foldon construct
MFVFLVLLPLVSSQCVNLTTRTQLPPAYTNSFTRGVYYPDKVFRSSVLHSTQDLFLPFFSNVTWFHAIHVSGTNGTKRFDNPVLPFNDGVYFASTEKSNIIRGWIFGTTLDSKTQSLLIVNNATNVVIKVCEFQFCNDPFLGVYYHKNNKSWMESEFRVYSSANNCTFEYVSQPFLMDLEGKQGNFKNLREFVFKNIDGYFKIYSKHTPINLVRDLPQGFSALEPLVDLPIGINITRFQTLLALHRSYLTPGDSSSGWTAGAAAYYVGYLQPRTFLLKYNENGTITDAVDCALDPLSETKCTLKSFTVEKGIYQTSNFRVQPTESIVRFPNITNLCPFGEVFNATRFASVYAWNRKRISNCVADYSVLYNSASFSTFKCYGVSPTKLNDLCFTNVYADSFVIRGDEVRQIAPGQTGKIADYNYKLPDDFTGCVIAWNSNNLDSKVGGNYNYLYRLFRKSNLKPFERDISTEIYQAGSTPCNGVEGFNCYFPLQSYGFQPTNGVGYQPYRVVVLSFELLHAPATVCGPKKSTNLVKNKCVNFNFNGLTGTGVLTESNKKFLPFQQFGRDIADTTDAVRDPQTLEILDITPCSFGGVSVITPGTNTSNQVAVLYQGVNCTEVPVAIHADQLTPTWRVYSTGSNVFQTRAGCLIGAEHVNNSYECDIPIGAGICASYQTQTNSPRRARSVASQSIIAYTMSLGAENSVAYSNNSIAIPTNFTISVTTEILPVSMTKTSVDCTMYICGDSTECSNLLLQYGSFCTQLNRALTGIAVEQDKNTQEVFAQVKQIYKTPPIKDFGGFNFSQILPDPSKPSKRSFIEDLLFNKVTLADAGFIKQYGDCLGDIAARDLICAQKFNGLTVLPPLLTDEMIAQYTSALLAGTITSGWTFGAGAALQIPFAMQMAYRFNGIGVTQNVLYENQKLIANQFNSAIGKIQDSLSSTASALGKLQDVVNQNAQALNTLVKQLSSNCGAISSVLNDILSRLDKVEAEVQIDRLITCRLQSLQTYVTQQLIRAAEIRASANLAATKMSECVLGQSKRVDFCGKGYHLMSFPQSAPHGVVFLHVTYVPAQEKNFTTAPAICHDGKAHFPREGVFVSNGTHWFVTQRNFYEPQIITTDNTFVSGNCDVVIGVVNNTVYDPLQPELDSFKEELDKYFKNHTSPDVDLGDISGINASVVNIQKEIDRLNEVAKNLNESLIDLQELGKYEQYIKGGSGYIPEAPRDGQAYVRKDGEWVLLSTFL

SEQ ID NO: 6400 - protein, 1241 aa, Artificial Sequence
  SARS-CoV-2/Netherlands/ZuidHolland_9/2020__EPI_ISL_414445 spike protein (1-1211)(F970C_G999C) Foldon construct
MFVFLVLLPLVSSQCVNLTTRTQLPPAYTNSFTRGVYYPDKVFRSSVLHSTQDLFLPFFSNVTWFHAIHVSGTNGTKRFDNPVLPFNDGVYFASTEKSNIIRGWIFGTTLDSKTQSLLIVNNATNVVIKVCEFQFCNDPFLGVYYHKNNKSWMESEFRVYSSANNCTFEYVSQPFLMDLEGKQGNFKNLREFVFKNIDGYFKIYSKHTPINLVRDLPQGFSALEPLVDLPIGINITRFQTLLALHRSYLTPGDSSSGWTAGAAAYYVGYLQPRTFLLKYNENGTITDAVDCALDPLSETKCTLKSFTVEKGIYQTSNFRVQPTESIVRFPNITNLCPFGEVFNATRFASVYAWNRKRISNCVADYSVLYNSASFSTFKCYGVSPTKLNDLCFTNVYADSFVIRGDEVRQIAPGQTGKIADYNYKLPDDFTGCVIAWNSNNLDSKVGGNYNYLYRLFRKSNLKPFERDISTEIYQAGSTPCNGVEGFNCYFPLQSYGFQPTNGVGYQPYRVVVLSFELLHAPATVCGPKKSTNLVKNKCVNFNFNGLTGTGVLTESNKKFLPFQQFGRDIADTTDAVRDPQTLEILDITPCSFGGVSVITPGTNTSNQVAVLYQGVNCTEVPVAIHADQLTPTWRVYSTGSNVFQTRAGCLIGAEHVNNSYECDIPIGAGICASYQTQTNSPRRARSVASQSIIAYTMSLGAENSVAYSNNSIAIPTNFTISVTTEILPVSMTKTSVDCTMYICGDSTECSNLLLQYGSFCTQLNRALTGIAVEQDKNTQEVFAQVKQIYKTPPIKDFGGFNFSQILPDPSKPSKRSFIEDLLFNKVTLADAGFIKQYGDCLGDIAARDLICVQKFNGLTVLPPLLTDEMIAQYTSALLAGTITSGWTFGAGAALQIPFAMQMAYRFNGIGVTQNVLYENQKLIANQFNSAIGKIQDSLSSTASALGKLQDVVNQNAQALNTLVKQLSSNCGAISSVLNDILSRLDKVEAEVQIDRLITCRLQSLQTYVTQQLIRAAEIRASANLAATKMSECVLGQSKRVDFCGKGYHLMSFPQSAPHGVVFLHVTYVPAQEKNFTTAPAICHDGKAHFPREGVFVSNGTHWFVTQRNFYEPQIITTDNTFVSGNCDVVIGIVNNTVYDPLQPELDSFKEELDKYFKNHTSPDVDLGDISGINASVVNIQKEIDRLNEVAKNLNESLIDLQELGKYEQYIKGGSGYIPEAPRDGQAYVRKDGEWVLLSTFL

SEQ ID NO: 6401 - protein, 1241 aa, Artificial Sequence
  SARS-CoV-2/Finland/FIN03032020A/2020__EPI_ISL_413602 spike protein (1-1211)(F970C_G999C) Foldon construct
MFVFLVLLPLVSSQCVNLTTRTQLPPAYTNSFTRGVYYPDKVFRSSVLHSTQDLFLPFFSNVTWFHAIHVSGTNGTKRFDNPVLPFNDGVYFASTEKSNIIRGWIFGTTLDSKTQSLLIVNNATNVVIKVCEFQFCNDPFLGVYYHKNNKSWMESEFRVYSSANNCTFEYVSQPFLMDLEGKQGNFKNLREFVFKNIDGYFKIYSKHTPINLVRDLPQGFSALEPLVDLPIGINITRFQTLLALHRSYLTPGDSSSGWTAGAAAYYVGYLQPRTFLLKYNENGTITDAVDCALDPLSETKCTLKSFTVEKGIYQTSNFRVQPTESIVRFPNITNLCPFGEVFNATRFASVYAWNRKRISNCVADYSVLYNSASFSTFKCYGVSPTKLNDLCFTNVYADSFVIRGDEVRQIAPGQTGKIADYNYKLPDDFTGCVISWNSNNLDSKVGGNYNYLYRLFRKSNLKPFERDISTEIYQAGSTPCNGVEGFNCYFPLQSYGFQPTNGVGYQPYRVVVLSFELLHAPATVCGPKKSTNLVKNKCVNFNFNGLTGTGVLTESNKKFLPFQQFGRDIADTTDAVRDPQTLEILDITPCSFGGVSVITPGTNTSNQVAVLYQGVNCTEVPVAIHADQLTPTWRVYSTGSNVFQTRAGCLIGAEHVNNSYECDIPIGAGICASYQTQTNSPRRARSVASQSIIAYTMSLGAENSVAYSNNSIAIPTNFTISVTTEILPVSMTKTSVDCTMYICGDSTECSNLLLQYGSFCTQLNRALTGIAVEQDKNTQEVFAQVKQIYKTPPIKDFGGFNFSQILPDPSKPSKRSFIEDLLFNKVTLADAGFIKQYGDCLGDIAARDLICAQKFNGLTVLPPLLTDEMIAQYTSALLAGTITSGWTFGAGAALQIPFAMQMAYRFNGIGVTQNVLYENQKLIANQFNSAIGKIQDSLSSTASALGKLQDVVNQNAQALNTLVKQLSSNCGAISSVLNDILSRLDKVEAEVQIDRLITCRLQSLQTYVTQQLIRAAEIRASANLAATKMSECVLGQSKRVDFCGKGYHLMSFPQSAPHGVVFLHVTYVPAQEKNFTTAPAICHDGKAHFPREGVFVSNGTHWFVTQRNFYEPQIITTDNTFVSGNCDVVIGIVNNTVYDPLQPELDSFKEELDKYFKNHTSPDVDLGDISGINASVVNIQKEIDRLNEVAKNLNESLIDLQELGKYEQYIKGGSGYIPEAPRDGQAYVRKDGEWVLLSTFL

SEQ ID NO: 6402 - protein, 1241 aa, Artificial Sequence
  SARS-CoV-2/France/GE1977/2020__EPI_ISL_414632 spike protein (1-1211)(F970C_G999C) Foldon construct
MFVFLVLLPLVSSQCVNLTTRTQLPPAYTNSFTRGVYYPDKVFRSSVLHSTQDLFLPFFSNVTWFHAIHVSGTNGTKRFDNPVLPFNDGVYFASTEKSNIIRGWIFGTTLDSKTQSLLIVNNATNVVIKVCEFQFCNDPFLGVYYHKNNKSWMESEFRVYSSANNCTFEYVSQPFLMDLEGKQGNFKNLREFVFKNIDGYFKIYSKHTPINLVRDLPQGFSALEPLVDLPIGINITRFQTLLALHRSYLTPGDSSSGWTAGAAAYYVGYLQPRTFLLKYNENGTITDAVDCALDPLSETKCTLKSFTVEKGIYQTSNFRVQPTESIVRFPNITNLCPFGEVFNATRFASVYAWNRKRISNCVADYSVLYNSASFSTFKCYGVSPTKLNDLCFTNVYADSFVIRGDEVRQIAPGQTGKIADYNYKLPDDFTGCVIAWNSNNLDSKVGGNYNYLYRLFRKSNLKPFERDISTEIYQAGSTPCNGVEGFNCYFPLQSYGFQPTNGVGYQPYRVVVLSFELLHAPATVCGPKKSTNLVKNKCVNFNFNGLTGTGVLTESNKKFLPFQQFGRDIADTTDAVRDPQTLEILDITPCSFGGVSVITPGTNTSNQVAVLYQGVNCTEVPVAIHADQLTPTWRVYSTGSNVFQTRAGCLIGAEHVNNSYECDIPIGAGICASYQTQTNSPRRARSVASQSIIAYTMSLGAENSVAYSNNSIAIPTNFTISVTTEILPVSMTKTSVDCTMYICGDSTECSNLLLQYGSFCTQLNRALTGIAVEQDKNTQEVFAQVKQIYKTPPIKDFGGFNFSQILPDPSKPSKRSFIEDLLFNKVTLADAGFIKQYGDCLGDIAARDLICAQKFNGLTVLPPLLTDEMIAQYTSALLAGTITSGWTFGAGAALQIPFAMQMAYRFNGIGVTQNVLYENQKLIANQFNSAIGKIQDSLFSTASALGKLQDVVNQNAQALNTLVKQLSSNCGAISSVLNDILSRLDKVEAEVQIDRLITCRLQSLQTYVTQQLIRAAEIRASANLAATKMSECVLGQSKRVDFCGKGYHLMSFPQSAPHGVVFLHVTYVPAQEKNFTTAPAICHDGKAHFPREGVFVSNGTHWFVTQRNFYEPQIITTDNTFVSGNCDVVIGIVNNTVYDPLQPELDSFKEELDKYFKNHTSPDVDLGDISGINASVVNIQKEIDRLNEVAKNLNESLIDLQELGKYEQYIKGGSGYIPEAPRDGQAYVRKDGEWVLLSTFL

SEQ ID NO: 6403 - protein, 1241 aa, Artificial Sequence
  SARS-CoV-2/Finland/FIN-313/2020__EPI_ISL_414641 spike protein (1-1211)(F970C_G999C) Foldon construct
MFVFLVLLPLVSSQCVNLTTRTQLPPAYTNSFTRGVYYPDKVFRSSVLHSTQDLFLPFFSNVTWFHAIHVSGTNGTKRFDNPVLPFNDGVYFASTEKSNIIRGWIFGTTLDSKTQSLLIVNNATNVVIKVCEFQFCNDPFLGVYYHKNNKSWMESEFRVYSSANNCTFEYVSQPFLMDLEGKQGNFKNLREFVFKNIDGYFKIYSKHTPINLVRDLPQGFSALEPLVDLPIGINITRFKTLLALHRSYLTPGDSSSGWTAGAAAYYVGYLQPRTFLLKYNENGTITDAVDCALDPLSETKCTLKSFTVEKGIYQTSNFRVQPTESIVRFPNITNLCPFGEVFNATRFASVYAWNRKRISNCVADYSVLYNSASFSTFKCYGVSPTKLNDLCFTNVYADSFVIRGDEVRQIAPGQTGKIADYNYKLPDDFTGCVIAWNSNNLDSKVGGNYNYLYRLFRKSNLKPFERDISTEIYQAGSTPCNGVEGFNCYFPLQSYGFQPTNGVGYQPYRVVVLSFELLHAPATVCGPKKSTNLVKNKCVNFNFNGLTGTGVLTESNKKFLPFQQFGRDIADTTDAVRDPQTLEILDITPCSFGGVSVITPGTNTSNQVAVLYQGVNCTEVPVAIHADQLTPTWRVYSTGSNVFQTRAGCLIGAEHVNNSYECDIPIGAGICASYQTQTNSPRRARSVASQSIIAYTMSLGAENSVAYSNNSIAIPTNFTISVTTEILPVSMTKTSVDCTMYICGDSTECSNLLLQYGSFCTQLNRALTGIAVEQDKNTQEVFAQVKQIYKTPPIKDFGGFNFSQILPDPSKPSKRSFIEDLLFNKVTLADAGFIKQYGDCLGDIAARDLICAQKFNGLTVLPPLLTDEMIAQYTSALLAGTITSGWTFGAGAALQIPFAMQMAYRFNGIGVTQNVLYENQKLIANQFNSAIGKIQDSLSSTASALGKLQDVVNQNAQALNTLVKQLSSNCGAISSVLNDILSRLDKVEAEVQIDRLITCRLQSLQTYVTQQLIRAAEIRASANLAATKMSECVLGQSKRVDFCGKGYHLMSFPQSAPHGVVFLHVTYVPAQEKNFTTAPAICHDGKAHFPREGVFVSNGTHWFVTQRNFYEPQIITTDNTFVSGNCDVVIGIVNNTVYDPLQPELDSFKEELDKYFKNHTSPDVDLGDISGINASVVNIQKEIDRLNEVAKNLNESLIDLQELGKYEQYIKGGSGYIPEAPRDGQAYVRKDGEWVLLSTFL

SEQ ID NO: 6404 - protein, 1241 aa, Artificial Sequence
  SARS-CoV-2/Netherlands/ZuidHolland_2/2020__EPI_ISL_414556 spike protein (1-1211)(F970C_G999C) Foldon construct
MFVFLVLLPLVSSQCVNLTTRTQLPPAYTNSFTRGVYYPDKVFRSSVLHSTQDLFLPFFSNVTWFHAIHVSGTNGTKRFDNPVLPFNDGVYFASTEKSNIIRGWIFGTTLDSKTQSLLIVNNATNVVIKVCEFQFCNDPFLGVYYHKNNKSWMESEFRVYSSANNCTFEYVSQPFLMDLEGKQGNFKNLREFVFKNIDGYFKIYSKHTPINLVRDLPQGFSALEPLVDLPIGINITRFQTLLALHRSYLTPGDSSSGWTAGAAAYYVGYLQPRTFLLKYNENGTITDAVDCALDPLSETKCTLKSFTVEKGIYQTSNFRVQPTESIVRFPNITNLCPFGEVFNATRFASVYAWNRKRISNCVADYSVLYNSASFSTFKCYGVSPTKLNDLCFTNVYADSFVIRGDEVRQIAPGQTGKIADYNYKLPDDFTGCVIAWNSNNLDSKVGGNYNYLYRLFRKSNLKPFERDISTEIYQAGSTPCNGVEGFNCYFPLQSYGFQPTNGVGYQPYRVVVLSFELLHAPATVCGPKKSTNLVKNKCVNFNFNGLTGTGVLTESNKKFLPFQQFGRDIADTTDAVRDPQTLEILDITPCSFGGVSVITPGTNTSNQVAVLYQGVNCTEVPVAIHADQLTPTWRVYSTGSNVFQTRAGCLIGAEHVNNSYECDIPIGAGICASYQTQTNSPRRARSVASQSIIAYTMSLGAENSVAYSNNSIAIPTNFTISVTTEILPVSMTKTSVDCTMYICGDSTECSNLLLQYGSFCTQLNRALTGIALEQDKNTQEVFAQVKQIYKTPPIKDFGGFNFSQILPDPSKPSKRSFIEDLLFNKVTLADAGFIKQYGDCLGDIAARDLICAQKFNGLTVLPPLLTDEMIAQYTSALLAGTITSGWTFGAGAALQIPFAMQMAYRFNGIGVTQNVLYENQKLIANQFNSAIGKIQDSLSSTASALGKLQDVVNQNAQALNTLVKQLSSNCGAISSVLNDILSRLDKVEAEVQIDRLITCRLQSLQTYVTQQLIRAAEIRASANLAATKMSECVLGQSKRVDFCGKGYHLMSFPQSAPHGVVFLHVTYVPAQEKNFTTAPAICHDGKAHFPREGVFVSNGTHWFVTQRNFYEPQIITTDNTFVSGNCDVVIGIVNNTVYDPLQPELDSFKEELDKYFKNHTSPDVDLGDISGINASVVNIQKEIDRLNEVAKNLNESLIDLQELGKYEQYIKGGSGYIPEAPRDGQAYVRKDGEWVLLSTFL

SEQ ID NO: 6405 - protein, 1241 aa, Artificial Sequence
  SARS-CoV-2/USA/WA-UW31/2020__EPI_ISL_414618 spike protein (1-1211)(F970C_G999C) Foldon construct
MFVFLVLLPLVSSQCVNLTTRTQLPPAYTNSFTRGVYYPDKVFRSSVLHSTQDLFLPFFSNVTWFHAIHVSGTNGTKRFDNPVLPFNDGVYFASTEKSNIIRGWIFGTTLDSKTQSLLIVNNATNVVIKVCEFQFCNDPFLGVYYHKNNKSWMESEFRVYSSANNCTFEYVSQPFLMDLEGKQGNFKNLREFVFKNIDGYFKIYSKHTPINLVRDLPQGFSALEPLVDLPIGINITRFQTLLALHRSYLTPGDSSSGWTAGAAAYYVGYLQPRTFLLKYNENGTITDAVDCALDPLSETKCTLKSFTVEKGIYQTSNFRVQPTESIVRFPNITNLCPFGEVFNATRFASVYAWNRKRISNCVADYSVLYNSASFSTFKCYGVSPTKLNDLCFTNVYADSFVIRGDEVRQIAPGQTGKIADYNYKLPDDFTGCVIAWNSNNLDSKVGGNYNYLYRLFRKSNLKPFERDISTEIYQAGSTPCNGAEGFNCYFPLQSYGFQPTNGVGYQPYRVVVLSFELLHAPATVCGPKKSTNLVKNKCVNFNFNGLTGTGVLTESNKKFLPFQQFGRDIADTTDAVRDPQTLEILDITPCSFGGVSVITPGTNTSNQVAVLYQDVNCTEVPVAIHADQLTPTWRVYSTGSNVFQTRAGCLIGAEHVNNSYECDIPIGAGICASYQTQTNSPRRARSVASQSIIAYTMSLGAENSVAYSNNSIAIPTNFTISVTTEILPVSMTKTSVDCTMYICGDSTECSNLLLQYGSFCTQLNRALTGIAVEQDKNTQEVFAQVKQIYKTPPIKDFGGFNFSQILPDPSKPSKRSFIEDLLFNKVTLADAGFIKQYGDCLGDIAARDLICAQKFNGLTVLPPLLTDEMIAQYTSALLAGTITSGWTFGAGAALQIPFAMQMAYRFNGIGVTQNVLYENQKLIANQFNSAIGKIQDSLSSTASALGKLQDVVNQNAQALNTLVKQLSSNCGAISSVLNDILSRLDKVEAEVQIDRLITCRLQSLQTYVTQQLIRAAEIRASANLAATKMSECVLGQSKRVDFCGKGYHLMSFPQSAPHGVVFLHVTYVPAQEKNFTTAPAICHDGKAHFPREGVFVSNGTHWFVTQRNFYEPQIITTDNTFVSGNCDVVIGIVNNTVYDPLQPELDSFKEELDKYFKNHTSPDVDLGDISGINASVVNIQKEIDRLNEVAKNLNESLIDLQELGKYEQYIKGGSGYIPEAPRDGQAYVRKDGEWVLLSTFL

SEQ ID NO: 6406 - protein, 1241 aa, Artificial Sequence
  SARS-CoV-2/South Korea/SNU01/2020__EPI_ISL_411929 spike protein (1-1211)(F970C_G999C) Foldon construct
MFVFLVLLPLVSSQCVNLTTRTQLPPAYTNSFTRGVYYPDKVFRSSVLHSTQDLFLPFFSNVTWFHAIHVSGTNGTKRFDNPVLPFNDGVYFASTEKSNIIRGWIFGTTLDSKTQSLLIVNNATNVVIKVCEFQFCNDPFLGVYYHKNNKSWMESEFRVYSSANNCTFEYVSQPFLMDLEGKQGNFKNLREFVFKNIDGYFKIYSKHTPINLVRDLPQGFWALEPLVDLPIGINITRFQTLLALHRSYLTPGDSSSGWTAGAAAYYVGYLQPRTFLLKYNENGTITDAVDCALDPLSETKCTLKSFTVEKGIYQTSNFRVQPTESIVRFPNITNLCPFGEVFNATRFASVYAWNRKRISNCVADYSVLYNSASFSTFKCYGVSPTKLNDLCFTNVYADSFVIRGDEVRQIAPGQTGKIADYNYKLPDDFTGCVIAWNSNNLDSKVGGNYNYLYRLFRKSNLKPFERDISTEIYQAGSTPCNGVEGFNCYFPLQSYGFQPTNGVGYQPYRVVVLSFELLHAPATVCGPKKSTNLVKNKCVNFNFNGLTGTGVLTESNKKFLPFQQFGRDIADTTDAVRDPQTLEILDITPCSFGGVSVITPGTNTSNQVAVLYQDVNCTEVPVAIHADQLTPTWRVYSTGSNVFQTRAGCLIGAEHVNNSYECDIPIGAGICASYQTQTNSPRRARSVASQSIIAYTMSLGAENSVAYSNNSIAIPTNFTISVTTEILPVSMTKTSVDCTMYICGDSTECSNLLLQYGSFCTQLNRALTGIAVEQDKNTQEVFAQVKQIYKTPPIKDFGGFNFSQILPDPSKPSKRSFIEDLLFNKVTLADAGFIKQYGDCLGDIAARDLICAQKFNGLTVLPPLLTDEMIAQYTSALLAGTITSGWTFGAGAALQIPFAMQMAYRFNGIGVTQNVLYENQKLIANQFNSAIGKIQDSLSSTASALGKLQDVVNQNAQALNTLVKQLSSNCGAISSVLNDILSRLDKVEAEVQIDRLITCRLQSLQTYVTQQLIRAAEIRASANLAATKMSECVLGQSKRVDFCGKGYHLMSFPQSAPHGVVFLHVTYVPAQEKNFTTAPAICHDGKAHFPREGVFVSNGTHWFVTQRNFYEPQIITTDNTFVSGNCDVVIGIVNNTVYDPLQPELDSFKEELDKYFKNHTSPDVDLGDISGINASVVNIQKEIDRLNEVAKNLNESLIDLQELGKYEQYIKGGSGYIPEAPRDGQAYVRKDGEWVLLSTFL

SEQ ID NO: 6407 - protein, 1241 aa, Artificial Sequence
  SARS-CoV-2/China/WF0004/2020__EPI_ISL_413694 spike protein (1-1211)(F970C_G999C) Foldon construct
MFVFLVLLPLVSSQCVNLTTRTQLPPAYTNSFTRGVYYPDKVFRSSVLHSTQDLFLPFFSNVTWFHAIHVSGTNGTKRFDNPVLPFNDGVYFASTEKSNIIRGWIFGTTLDSKTQSLLIVNNATNVVIKVCEFQFCNDPFLGVYYHKNNKSWTESEFRVYSSANNCTFEYVSQPFLMDLEGKQGNFKNLREFVFKNIDGYFKIYSKHTPINLVRDLPQGFSALEPLVDLPIGINITRFQTLLALHRSYLTPGDSSSGWTAGAAAYYVGYLQPRTFLLKYNENGTITDAVDCALDPLSETKCTLKSFTVEKGIYQTSNFRVQPTESIVRFPNITNLCPFGEVFNATRFASVYAWNRKRISNCVADYSVLYNSASFSTFKCYGVSPTKLNDLCFTNVYADSFVIRGDEVRQIAPGQTGKIADYNYKLPDDFTGCVIAWNSNNLDSKVGGNYNYLYRLFRKSNLKPFERDISTEIYQAGSTPCNGVEGFNCYFPLQSYGFQPTNGVGYQPYRVVVLSFELLHAPATVCGPKKSTNLVKNKCVNFNFNGLTGTGVLTESNKKFLPFQQFGRDIADTTDAVRDPQTLEILDITPCSFGGVSVITPGTNTSNQVAVLYQDVNCTEVPVAIHADQLTPTWRVYSTGSNVFQTRAGCLIGAEHVNNSYECDIPIGAGICASYQTQTNSPRRARSVASQSIIAYTMSLGAENSVAYSNNSIAIPTNFTISVTTEILPVSMTKTSVDCTMYICGDSTECSNLLLQYGSFCTQLNRALTGIAVEQDKNTQEVFAQVKQIYKTPPIKDFGGFNFSQILPDPSKPSKRSFIEDLLFNKVTLADAGFIKQYGDCLGDIAARDLICAQKFNGLTVLPPLLTDEMIAQYTSALLAGTITSGWTFGAGAALQIPFAMQMAYRFNGIGVTQNVLYENQKLIANQFNSAIGKIQDSLSSTASALGKLQDVVNQNAQALNTLVKQLSSNCGAISSVLNDILSRLDKVEAEVQIDRLITCRLQSLQTYVTQQLIRAAEIRASANLAATKMSECVLGQSKRFDFCGKGYHLMSFPQSAPHGVVFLHVTYVPAQEKNFTTAPAICHDGKAHFPREGVFVSNGTHWFVTQRNFYEPQIITTDNTFVSGNCDVVIGIVNNTVYDPLQPELDSFKEELDKYFKNHTSPDVDLGDISGINASVVNIQKEIDRLNEVAKNLNESLIDLQELGKYEQYIKGGSGYIPEAPRDGQAYVRKDGEWVLLSTFL

SEQ ID NO: 6408 - protein, 1241 aa, Artificial Sequence
  SARS-CoV-2/China/WF0028/2020__EPI_ISL_413791 spike protein (1-1211)(F970C_G999C) Foldon construct
MFVFLVLLPLVSSQCVNLTTRTQLPPAYTNSFTRGVYYPDKVFRSSVLHSTQDLFLPFFSNVTWFHAIHVSGTNGTKRFDNPVLPFNDGVYFASTEKSNIIRGWIFGTTLDSKTQSLLIVNNATNVVIKVCEFQFCNDPFLGVYYHKNNKSWMESEFRVYSSANNCTFEYVSQPFLMDLEGKQGNFKNLREFVFKNIDGYFKIYSKHTPINLVRDLPQGFSALEPLVDLPIGINITRFQTLLALHRSYLTPGDSSSGWTAGAAAYYVGYLQPRTFLLKYNENGTITDAVDCALDPLSETKCTLKSFTVEKGIYQTSNFRVQPTESIVRFPNITNLCPFGEVFNATRFASVYAWNRKRISNCVADYSVLYNSASFSTFKCYGVSPTKLNDLCFTNVYADSFVIRGDEVRQIAPGQTGKIADYNYKLPDDFTGCVIAWNSNNLDSKVGGNYNYLYRLFRKSNLKPFERDISTEIYQAGSTPCNGVEGFNCYFPLQSYGFQPTNGVGYQPYRVVVLSFELLHAPATVCGPKKSTNLVKNKCVNFNFNGLTGTGVLTESNKKFLPFQQFGRDIADTTDAVRDPQTLEILDITPCSFGGVSVITPGTNTSNQVAVLYQDVNCTEVPVAIHADQLTPTWRVYSTGSNVFQTRAGCLIGAEHVNNSYECDIPIGAGICASYQTQTNSPRRARSVASQSIIAYTMSLGAENSVAYSNNSIAIPTNFTISVTTEILPVSMTKTSVDCTMYICGDSTECSNLLLQYGSFCTQLNRALTGIAVEQDKNTQEVFAQVKQIYKTPPIKDFGGFNFSQILPDPSKPSKRSFIEDLLFNKVTLADAGFIKQYGDCLGDIAARDLICAQKFNGLTVLPPLLTDEMIAQYTSALLAGTITSGWTFGAGAALQIPFAMQMAYRFNGIGVTQNVLYENQKLIANQFNSAIGKIQDSLSSTASALGKLQDVVNQNAQALNTLVKQLSSNCGAISSVLNDILSRLDKVEAEVQIDRLITCRLQSLQTYVTQQLIRAAEIRASANLAATKMSECVLGQSKRVDFCGKGYHLMSFPQSAPHGVVFLHVTYVPAQEKNFTTAPAICHDGKAHFPREGVFVSNGTHWFVTQRNFYEPQIITTDNTFVSGNCDVVIGIVNNTVYDPLQPELESFKEELDKYFKNHTSPDVDLGDISGINASVVNIQKEIDRLNEVAKNLNESLIDLQELGKYEQYIKGGSGYIPEAPRDGQAYVRKDGEWVLLSTFL

SEQ ID NO: 6409 - protein, 1241 aa, Artificial Sequence
  SARS-CoV-2/2019-nCoV/USA-CruiseA-18/2020__MT159716.1 spike protein (1-1211)(F970C_G999C) Foldon construct
MFVFLVLLPLVSSQCVNLTTRTQLPPAYTNSFTRGVYYPDKVFRSSVLHSTQDLFLPFFSNVTWFHAIHVSGTNGTKRFDNPVLPFNDGVYFASTEKSNIIRGWIFGTTLDSKTQSLLIVNNATNVVIKVCEFQFCNDPFLGVYYHKNNKSWMESELRVYSSANNCTFEYVSQPFLMDLEGKQGNFKNLREFVFKNIDGYFKIYSKHTPINLVRDLPQGFSALEPLVDLPIGINITRFQTLLALHRSYLTPGDSSSGWTAGAAAYYVGYLQPRTFLLKYNENGTITDAVDCALDPLSETKCTLKSFTVEKGIYQTSNFRVQPTESIVRFPNITNLCPFGEVFNATRFASVYAWNRKRISNCVADYSVLYNSASFSTFKCYGVSPTKLNDLCFTNVYADSFVIRGDEVRQIAPGQTGKIADYNYKLPDDFTGCVIAWNSNNLDSKVGGNYNYLYRLFRKSNLKPFERDISTEIYQAGSTPCNGVEGFNCYFPLQSYGFQPTNGVGYQPYRVVVLSFELLHAPATVCGPKKSTNLVKNKCVNFNFNGLTGTGVLTESNKKFLPFQQFGRDIADTTDAVRDPQTLEILDITPCSFGGVSVITPGTNTSNQVAVLYQDVNCTEVPVAIHADQLTPTWRVYSTGSNVFQTRAGCLIGAEHVNNSYECDIPIGAGICASYQTQTNSPRRARSVASQSIIAYTMSLGAENSVAYSNNSIAIPTNFTISVTTEILPVSMTKTSVDCTMYICGDSTECSNLLLQYGSFCTQLNRALTGIAVEQDKNTQEVFAQVKQIYKTPPIKDFGGFNFSQILPDPSKPSKRSFIEDLLFNKVTLADAGFIKQYGDCLGDIAARDLICAQKFNGLTVLPPLLTDEMIAQYTSALLAGTITSGWTFGAGAALQIPFAMQMAYRFNGIGVTQNVLYENQKLIANQFNSAIGKIQDSLSSTASALGKLQDVVNQNAQALNTLVKQLSSNCGAISSVLNDILSRLDKVEAEVQIDRLITCRLQSLQTYVTQQLIRAAEIRASANLAATKMSECVLGQSKRVDFCGKGYHLMSFPQSAPHGVVFLHVTYVPAQEKNFTTAPAICHDGKAHFPREGVFVSNGTHWFVTQRNFYEPQIITTDNTFVSGNCDVVIGIVNNTVYDPLQPELDSFKEELDKYFKNHTSPDVDLGDISGINASVVNIQKEIDRLNEVAKNLNESLIDLQELGKYEQYIKGGSGYIPEAPRDGQAYVRKDGEWVLLSTFL

SEQ ID NO: 6410 - protein, 1241 aa, Artificial Sequence
  SARS-CoV-2/SARS-CoV-2/Yunnan-01/human/2020/CHN__MT049951.1 spike protein (1-1211)(F970C_G999C) Foldon construct
MFVFLVLLPLVSSQCVNLTTRTQLPPANTNSFTRGVYYPDKVFRSSVLHSTQDLFLPFFSNVTWFHAIHVSGTNGTKRFDNPVLPFNDGVYFASTEKSNIIRGWIFGTTLDSKTQSLLIVNNATNVVIKVCEFQFCNDPFLGVYYHKNNKSWMESEFRVYSSANNCTFEYVSQPFLMDLEGKQGNFKNLREFVFKNIDGYFKIYSKHTPINLVRDLPQGFSALEPLVDLPIGINITRFQTLLALHRSYLTPGDSSSGWTAGAAAYYVGYLQPRTFLLKYNENGTITDAVDCALDPLSETKCTLKSFTVEKGIYQTSNFRVQPTESIVRFPNITNLCPFGEVFNATRFASVYAWNRKRISNCVADYSVLYNSASFSTFKCYGVSPTKLNDLCFTNVYADSFVIRGDEVRQIAPGQTGKIADYNYKLPDDFTGCVIAWNSNNLDSKVGGNYNYLYRLFRKSNLKPFERDISTEIYQAGSTPCNGVEGFNCYFPLQSYGFQPTNGVGYQPYRVVVLSFELLHAPATVCGPKKSTNLVKNKCVNFNFNGLTGTGVLTESNKKFLPFQQFGRDIADTTDAVRDPQTLEILDITPCSFGGVSVITPGTNTSNQVAVLYQDVNCTEVPVAIHADQLTPTWRVYSTGSNVFQTRAGCLIGAEHVNNSYECDIPIGAGICASYQTQTNSPRRARSVASQSIIAYTMSLGAENSVAYSNNSIAIPTNFTISVTTEILPVSMTKTSVDCTMYICGDSTECSNLLLQYGSFCTQLNRALTGIAVEQDKNTQEVFAQVKQIYKTPPIKDFGGFNFSQILPDPSKPSKRSFIEDLLFNKVTLADAGFIKQYGDCLGDIAARDLICAQKFNGLTVLPPLLTDEMIAQYTSALLAGTITSGWTFGAGAALQIPFAMQMAYRFNGIGVTQNVLYENQKLIANQFNSAIGKIQDSLSSTASALGKLQDVVNQNAQALNTLVKQLSSNCGAISSVLNDILSRLDKVEAEVQIDRLITCRLQSLQTYVTQQLIRAAEIRASANLAATKMSECVLGQSKRVDFCGKGYHLMSFPQSAPHGVVFLHVTYVPAQEKNFTTAPAICHDGKAHFPREGVFVSNGTHWFVTQRNFYEPQIITTDNTFVSGNCDVVIGIVNNTVYDPLQPELDSFKEELDKYFKNHTSPDVDLGDISGINASVVNIQKEIDRLNEVAKNLNESLIDLQELGKYEQYIKGGSGYIPEAPRDGQAYVRKDGEWVLLSTFL

SEQ ID NO: 6411 - protein, 1241 aa, Artificial Sequence
  SARS-CoV-2/USA/WA-UW292/2020__EPI_ISL_418077 spike protein (1-1211)(F970C_G999C) Foldon construct
MFVFLVLLPLVSSQCVNLTTRTQLPPAYTNSFTRGVYYPDKVFRSSVLHSTQDLFLPFFSNVTWFHAIHVSGTNGTKRFDNPVLPFNDGVYFASTEKSNIIRGWIFGTTLDSKTQSLLIVNNATNVVIKVCEFQFCNDPFLGVYYHKNNKSWMESEFRVYSSANNCTFEYVSQPFLMDLEGKQGNFKNLREFVFKNIDGYFKIYSKHTPINLVRDLPQGFSALEPLVDLPIGINITRFQTLLALHRSYLTPGDSSSGWTAGAAAYYVGYLQPRTFLLKYNENGTITDAVDCALDPLSETKCTLKSFTVEKGIYQTSNFRVQPTESIVRFPNITNLCPFGEVFNATRFASVYAWNRKRISNCVADYSVLYNSASFSTFKCYGVSPTKLNDLCFTNVYADSFVIRGDEVRQIAPGQTGKIADYNYKLPDDFTGCVIAWNSNNLDSKVGGNYNYLYRLFRKSNLKPFERDISTEIYQASSTPCNGVEGFNCYFPLQSYGFQPTNGVGYQPYRVVVLSFELLHAPATVCGPKKSTNLVKNKCVNFNFNGLTGTGVLTESNKKFLPFQQFGRDIADTTDAVRDPQTLEILDITPCSFGGVSVITPGTNTSNQVAVLYQDVNCTEVPVAIHADQLTPTWRVYSTGSNVFQTRAGCLIGAEHVNNSYECDIPIGAGICASYQTQTNSPRRARSVASQSIIAYTMSLGAENSVAYSNNSIAIPTNFTISVTTEILPVSMTKTSVDCTMYICGDSTECSNLLLQYGSFCTQLNRALTGIAVEQDKNTQEVFAQVKQIYKTPPIKDFGGFNFSQILPDPSKPSKRSFIEDLLFNKVTLADAGFIKQYGDCLGDIAARDLICAQKFNGLTVLPPLLTDEMIAQYTSALLAGTITSGWTFGAGAALQIPFAMQMAYRFNGIGVTQNVLYENQKLIANQFNSAIGKIQDSLSSTASALGKLQDVVNQNAQALNTLVKQLSSNCGAISSVLNDILSRLDKVEAEVQIDRLITCRLQSLQTYVTQQLIRAAEIRASANLAATKMSECVLGQSKRVDFCGKGYHLMSFPQSAPHGVVFLHVTYVPAQEKNFTTAPAICHDGKAHFPREGVFVSNGTHWFVTQRNFYEPQIITTDNTFVSGNCDVVIGIVNNTVYDPLQPELDSFKEELDKYFKNHTSPDVDLGDISGINASVVNIQKEIDRLNEVAKNLNESLIDLQELGKYEQYIKGGSGYIPEAPRDGQAYVRKDGEWVLLSTFL

SEQ ID NO: 6412 - protein, 1241 aa, Artificial Sequence
  SARS-CoV-2/Iceland/192/2020__EPI_ISL_417819 spike protein (1-1211)(F970C_G999C) Foldon construct
MFVFFVLLPLVSSQCVNLTTRTQLPPAYTNSFTRGVYYPDKVFRSSVLHSTQDLFLPFFSNVTWFHAIHVSGTNGTKRFDNPVLPFNDGVYFASTEKSNIIRGWIFGTTLDSKTQSLLIVNNATNVVIKVCEFQFCNDPFLGVYYHKNNKSWMESEFRVYSSANNCTFEYVSQPFLMDLEGKQGNFKNLREFVFKNIDGYFKIYSKHTPINLVRDLPQGFSALEPLVDLPIGINITRFQTLLALHRSYLTPGDSSSGWTAGAAAYYVGYLQPRTFLLKYNENGTITDAVDCALDPLSETKCTLKSFTVEKGIYQTSNFRVQPTESIVRFPNITNLCPFGEVFNATRFASVYAWNRKRISNCVADYSVLYNSASFSTFKCYGVSPTKLNDLCFTNVYADSFVIRGDEVRQIAPGQTGKIADYNYKLPDDFTGCVIAWNSNNLDSKVGGNYNYLYRLFRKSNLKPFERDISTEIYQAGSTPCNGVEGFNCYFPLQSYGFQPTNGVGYQPYRVVVLSFELLHAPATVCGPKKSTNLVKNKCVNFNFNGLTGTGVLTESNKKFLPFQQFGRDIADTTDAVRDPQTLEILDITPCSFGGVSVITPGTNTSNQVAVLYQGVNCTEVPVAIHADQLTPTWRVYSTGSNVFQTRAGCLIGAEHVNNSYECDIPIGAGICASYQTQTNSPRRARSVASQSIIAYTMSLGAENSVAYSNNSIAIPTNFTISVTTEILPVSMTKTSVDCTMYICGDSTECSNLLLQYGSFCTQLNRALTGIAVEQDKNTQEVFAQVKQIYKTPPIKDFGGFNFSQILPDPSKPSKRSFIEDLLFNKVTLADAGFIKQYGDCLGDIAARDLICAQKFNGLTVLPPLLTDEMIAQYTSALLAGTITSGWTFGAGAALQIPFAMQMAYRFNGIGVTQNVLYENQKLIANQFNSAIGKIQDSLSSTASALGKLQDVVNQNAQALNTLVKQLSSNCGAISSVLNDILSRLDKVEAEVQIDRLITCRLQSLQTYVTQQLIRAAEIRASANLAATKMSECVLGQSKRVDFCGKGYHLMSFPQSAPHGVVFLHVTYVPAQEKNFTTAPAICHDGKAHFPREGVFVSNGTHWFVTQRNFYEPQIITTDNTFVSGNCDVVIGIVNNTVYDPLQPELDSFKEELDKYFKNHTSPDVDLGDISGINASVVNIQKEIDRLNEVAKNLNESLIDLQELGKYEQYIKGGSGYIPEAPRDGQAYVRKDGEWVLLSTFL

SEQ ID NO: 6413 - protein, 1241 aa, Artificial Sequence
  SARS-CoV-2/Belgium/ULG-6939/2020__EPI_ISL_417020 spike protein (1-1211)(F970C_G999C) Foldon construct
MFVFLVLLPLVSSQCVNLTTRTQLPPAYTNSFTRGVYYPDKVFRSSVLHSTQDLFLPFFSNVTWFHAIHVSGTNGTKRFDNPVLPFNDGVYFASTEKSNIIRGWIFGTTLDSKTQSLLIVNNATNVVIKVCEFQFCNDPFLGVYYHKNNKSWMESEFRVYSSANNCTFEYVSQPFLMDLEGKQGNFKNLREFVFKNIDGYFKIYSKHTPINLVRDLPQGFSALEPLVDLPIGINITRFQTLLALHRSYLTPGDSSSGWTAGAAAYYVGYLQPRTFLLKYNENGTITDAVDCALDPLSETKCTLKSFTVEKGIYQTSNFRVQPTESIVRFPNITNLCPFGEVFNATRFASVYAWNRKRISNCVADYSVLYNSASFSTFKCYGVSPTKLNDLCFTNVYADSFVIRGDEVRQIAPGQTGKIADYNYKLPDDFTGCVIAWNSNNLDSKVGGNYNYLYRLFRKSNLKPFERDISTEIYQAGSTPCNGVEGFNCYFPLQSYGFQPTNGVGYQPYRVVVLSFELLHAPATVCGPKKSTNLVKNKCVNFNFNGLTGTGVLTESNKKFLPFQQFGRDIADTTDAVRDPQTLEILDITPCSFGGVSVITPGTNTSNQVAVLYQGVNCTEVPVAIHADQLTPTWRVYSTGSNVFQTRAGCLIGAEHVNNSYECDIPIGAGICASYQTQTNSPRRARSVASQSIIAYTMSLGAENSVVYSNNSIAIPTNFTISVTTEILPVSMTKTSVDCTMYICGDSTECSNLLLQYGSFCTQLNRALTGIAVEQDKNTQEVFAQVKQIYKTPPIKDFGGFNFSQILPDPSKPSKRSFIEDLLFNKVTLADAGFIKQYGDCLGDIAARDLICAQKFNGLTVLPPLLTDEMIAQYTSALLAGTITSGWTFGAGAALQIPFAMQMAYRFNGIGVTQNVLYENQKLIANQFNSAIGKIQDSLSSTASALGKLQDVVNQNAQALNTLVKQLSSNCGAISSVLNDILSRLDKVEAEVQIDRLITCRLQSLQTYVTQQLIRAAEIRASANLAATKMSECVLGQSKRVDFCGKGYHLMSFPQSAPHGVVFLHVTYVPAQEKNFTTAPAICHDGKAHFPREGVFVSNGTHWFVTQRNFYEPQIITTDNTFVSGNCDVVIGIVNNTVYDPLQPELDSFKEELDKYFKNHTSPDVDLGDISGINASVVNIQKEIDRLNEVAKNLNESLIDLQELGKYEQYIKGGSGYIPEAPRDGQAYVRKDGEWVLLSTFL

SEQ ID NO: 6414 - protein, 1241 aa, Artificial Sequence
  SARS-CoV-2/France/HF2496/2020__EPI_ISL_418231 spike protein (1-1211)(F970C_G999C) Foldon construct
MFVFLVLLPLVSSQCVNLTTRTQLPPAYTNSFTRGVYYPDKVFRSSVLHSTQDLFLPFFSNVTWFHAIHVSGTNGTKRFDNPVLPFNDGVYFASTEKSNIIRGWIFGTTLDSKTQSLLIVNNATNVVIKVCEFQFCNDPFLGVYYHKNNKSWMESEFRVYSSANNCTFEYVSQPFLMDLEGKQGNFKNLREFVFKNIDGYFKIYSKHTPINLVRDLPQGFSALEPLVDLPIGINITRFQTLLALHRSYLTPGDSSSGWTAGAAAYYVGYLQPRTFLLKYNENGTITDAVDCALDPLSETKCTLKSFTVEKGIYQTSNFRVQPTESIVRFPNITNLCPFGEVFNATRFASVYAWNRKRISNCVADYSVLYNSASFSTFKCYGVSPTKLNDLCFTNVYADSFVIRGDEVRQIAPGQTGKIADYNYKLPDDFTGCVIAWNSNNLDSKVGGNYNYLYRLFRKSNLKPFERDISTEIYQAGSTPCNGVEGFNCYFPLQSYGFQPTNGVGYQPYRVVVLSFELLHAPATVCGPKKSTNLVKNKCVNFNFNGLTGTGVLTESNKKFLPFQQFGRDIADTTDAVRDPQTLEILDITPCSFGGVSVITPGTNTSNQVAVLYQGVNCTEVPVAIHADQLTPTWRVYSTGSNVFQTRAGCLIGAEHVNNSYECDIPIGAGICASYQTQTNSPRRARSVASQSIIAYTMSLGAENSVAYSNNSIAIPTNFTISVTTEILPVSMTKTSVDCTMYICGDSTECSNLLLQYGSFCTQLNRALTGIAVEQDKNTQEVFAQVKQIYKTPPIKDFGGFNFSQILPDPSKPSKRSFIEDLLFNKVTLADAGFIKQYGDCLGDIVARDLICAQKFNGLTVLPPLLTDEMIAQYTSALLAGTITSGWTFGAGAALQIPFAMQMAYRFNGIGVTQNVLYENQKLIANQFNSAIGKIQDSLSSTASALGKLQDVVNQNAQALNTLVKQLSSNCGAISSVLNDILSRLDKVEAEVQIDRLITCRLQSLQTYVTQQLIRAAEIRASANLAATKMSECVLGQSKRVDFCGKGYHLMSFPQSAPHGVVFLHVTYVPAQEKNFTTAPAICHDGKAHFPREGVFVSNGTHWFVTQRNFYEPQIITTDNTFVSGNCDVVIGIVNNTVYDPLQPELDSFKEELDKYFKNHTSPDVDLGDISGINASVVNIQKEIDRLNEVAKNLNESLIDLQELGKYEQYIKGGSGYIPEAPRDGQAYVRKDGEWVLLSTFL

SEQ ID NO: 6415 - protein, 1241 aa, Artificial Sequence
  SARS-CoV-2/USA/WA-UW291/2020__EPI_ISL_418076 spike protein (1-1211)(F970C_G999C) Foldon construct
MFVFLVLLPLVSSQCVNLTTRTQLPPAYTNSFTRGVYYPDKVFRSSVLHSTQDLFLPFFSNVTWFHAIHVSGTNGTKRFDNPVLPFNDGVYFASTEKSNIIRGWIFGTTLDSKTQSLLIVNNATNVVIKVCEFQFCNDPFLGVYYHKNNKSWMESEFRVYSSANNCTFEYVSQPFLMDLEGKQGNFKNLREFVFKNIDGYFKIYSKHTPINLVRDLPQGFSALEPLVDLPIGINITRFQTLLALHRSYLTPGDSSSGWTAGAAAYYVGYLQPRTFLLKYNENGTITDAVDCALDPLSETKCTLKSFTVEKGIYQTSNFRVQPTESIVRFPNITNLCPFGEVFNATRFASVYAWNRKRISNCVADYSVLYNSASFSTFKCYGVSPTKLNDLCFTNVYADSFVIRGDEVRQIAPGQTGKIADYNYKLPDDFTGCVIAWNSNNLDSKVGGNYNYLYRLFRKSNLKPFERDISTEIYQAGSTPCNGVEGFNCYFPLQSYGFQPTNGVGYQPYRVVVLSFELLHAPATVCGPKKSTNLVKNKCVNFNFNGLTGTGVLTESNKKFLPFQQFGRDIADTTDAVRDPQTLEILDITPCSFGGVSVITPGTNTSNQVAVLYQGVNCTEVPVAIHADQLTPTWRVYSTGSNVFQTRAGCLIGAEHVNNSYECDIPIGAGICASYQTQTNSPRRARSVASQSIIAYTMSLGAENSVAYSNNSIAIPTNFTISVTTEILPVSMTKTSVDCTMYICGDSTECSNLLLQYGSFCTQLNRALTGIAVEQDKNTQEVFAQVKQIYKTPPIKDFGGFNFSQILPDPSKPSKRSFIEDLLFNKVTLADAGFIKQYGDCLGDIAARDLICAQKFNGLTVLPPLLTDEMIAQYTSALLAGTITSGWTFGAGAALQIPFAMQMAYRFNGIGVTQNVLYENQKLIANQFNSAIGKIQYSLSSTASALGKLQDVVNQNAQALNTLVKQLSSNCGAISSVLNDILSRLDKVEAEVQIDRLITCRLQSLQTYVTQQLIRAAEIRASANLAATKMSECVLGQSKRVDFCGKGYHLMSFPQSAPHGVVFLHVTYVPAQEKNFTTAPAICHDGKAHFPREGVFVSNGTHWFVTQRNFYEPQIITTDNTFVSGNCDVVIGIVNNTVYDPLQPELDSFKEELDKYFKNHTSPDVDLGDISGINASVVNIQKEIDRLNEVAKNLNESLIDLQELGKYEQYIKGGSGYIPEAPRDGQAYVRKDGEWVLLSTFL

SEQ ID NO: 6416 - protein, 1241 aa, Artificial Sequence; identical to SEQ ID NO: 6379
  SARS-CoV-2/Portugal/PT0034/2020__EPI_ISL_418019 spike protein (1-1211)(F970C_G999C) Foldon construct

SEQ ID NO: 6417 - protein, 1241 aa, Artificial Sequence
  SARS-CoV-2/Iceland/202/2020__EPI_ISL_417750 spike protein (1-1211)(F970C_G999C) Foldon construct
MFVFLVLLPLVSSQCVNLTTRTQLPPAYTNSFTRGVYYPDKVFRSSVLHSTQDLFLPFFSNVTWFHAIHVSGTNGTKRFDNPVLPFNDGVYFASTEKSNIIRGWIFGTTLDSKTQSLLIVNNATNVVIKVCEFQFCNDPFLGVYYHKNNKSWMESEFRVYSSANNCTFEYVSQPFLMDLEGKQGNFKNLREFVFKNIDGYFKIYSKHTPINLVRDLPQGFSALEPLVDLPIGINITRFQTLLALHRSYLTPGDSSSGWTAGAAAYYVGYLQPRTFLLKYNENGTITDAVDCALDPLSETKCTLKSFTVEKGIYQTSNFRVQPTESIVRFPNITNLCPFGEVFNATRFASVYAWNRKRISNCVADYSVLYNSASFSTFKCYGVSPTKLNDLCFTNVYADSFVIRGDEVRQIAPGQTGKIADYNYKLPDDFTGCVIAWNSNNLDSKVGGNYNYLYRLFRKSNLKPFERDISTEIYQAGSTPCNGVEGFNCYFPLQSYGFQPTNGVGYQPYRVVVLSFELLHAPATVCGPKKSTNLVKNKCVNFNFNGLTGTGVLTESNKKFLPFQQFGRDIADTTDAVRDPQTLEILDITPCSFGGVSVITPGTNTSNQVAVLYQDVNCTEVPVAIHADQLTPTWRVYSTGSNVFQTRAGCLIGAEHVNNSYECDIPIGAGICASYQTQTNSPRRARSVASQSIIAYTMSLGAENSVAYSNNSIAIPTNFTISVTTEILPVSMTKTSVDCTMYICGDSTECSNLLLQYGSFCTQLNRALTGIAVEQDKNTQEVFAQVKQIYKTPPIKDFGGFNFSQILPDPSKPSKRSFIEDLLFNKVTLADAGFIKQYGDCLGDIAARDLICAQKFNGLTVLPPLLTDEMIAQYTSALLAGTITSGWTFGAGAALQIPFAMQMAYRFNGIGVTQNVLYENQKLIANQFNSAIGKIQDSLSSTASALGKLQDVVNQNAQALNTLVKQLSSNCGAISSVLNDILSRLDKVEAEVQIDRLITCRLQSLQTYVTQQLIRAAEIRASANLAATKMSECVLGQSKRVDFCGKGYHLMSFPQSAPHGVVFLHVTYVPAQEKNFTTAPAICHDGKAHFPREGVFVSNGTHWFVTQRNFYEPQIITTDNTFVSGNCDVVIGIVNNTVYDPLQPELDSFKEELDKYFKNHTSPDVDLGDIPGINASVVNIQKEIDRLNEVAKNLNESLIDLQELGKYEQYIKGGSGYIPEAPRDGQAYVRKDGEWVLLSTFL

SEQ ID NO: 6418 - protein, 1241 aa, Artificial Sequence
  SARS-CoV-2/USA/WA-UW261/2020__EPI_ISL_418046 spike protein (1-1211)(F970C_G999C) Foldon construct
MFVFLVLLPLVSSQCVNLTTRTQLPPAYTNSFTRGVYYPDKVFRSSVLHSTQDLFLPFFSNVTWFHAIHVSGTNGTKRFDNPVLPFNDGVYFASTEKSNIIRGWIFGTTLDSKTQSLLIVNNATNVVIKVCEFQFCNDPFLGVYYHKNNKSWMESEFRVYSSANNCTFEYVSQPFLMDLEGKQGNFKNLREFVFKNIDGYFKIYSKHTPINLVRDLPQGFSALEPLVDLPIGINITRFQTLLALHRSYLTPGDSSSGWTAGAAAYYVGYLQPRTFLLKYNENGTITDAVDCALDPLSETKCTLKSFTVEKGIYQTSNFRVQPTESIVRFPNITNLCPFGEVFNATRFTSVYAWNRKRISNCVADYSVLYNSASFSTFKCYGVSPTKLNDLCFTNVYADSFVIRGDEVRQIAPGQTGKIADYNYKLPDDFTGCVIAWNSNNLDSKVGGNYNYLYRLFRKSNLKPFERDISTEIYQAGSTPCNGVEGFNCYFPLQSYGFQPTNGVGYQPYRVVVLSFELLHAPATVCGPKKSTNLVKNKCVNFNFNGLTGTGVLTESNKKFLPFQQFGRDIADTTDAVRDPQTLEILDITPCSFGGVSVITPGTNTSNQVAVLYQDVNCTEVPVAIHADQLTPTWRVYSTGSNVFQTRAGCLIGAEHVNNSYECDIPIGAGICASYQTQTNSPRRARSVASQSIIAYTMSLGAENSVAYSNNSIAIPTNFTISVTTEILPVSMTKTSVDCTMYICGDSTECSNLLLQYGSFCTQLNRALTGIAVEQDKNTQEVFAQVKQIYKTPPIKDFGGFNFSQILPDPSKPSKRSFIEDLLFNKVTLADAGFIKQYGDCLGDIAARDLICAQKFNGLTVLPPLLTDEMIAQYTSALLAGTITSGWTFGAGAALQIPFAMQMAYRFNGIGVTQNVLYENQKLIANQFNSAIGKIQDSLSSTASALGKLQDVVNQNAQALNTLVKQLSSNCGAISSVLNDILSRLDKVEAEVQIDRLITCRLQSLQTYVTQQLIRAAEIRASANLAATKMSECVLGQSKRVDFCGKGYHLMSFPQSAPHGVVFLHVTYVPAQEKNFTTAPAICHDGKAHFPREGVFVSNGTHWFVTQRNFYEPQIITTDNTFVSGNCDVVIGIVNNTVYDPLQPELDSFKEELDKYFKNHTSPDVDLGDISGINASVVNIQKEIDRLNEVAKNLNESLIDLQELGKYEQYIKGGSGYIPEAPRDGQAYVRKDGEWVLLSTFL

SEQ ID NO: 6419 - protein, 1241 aa, Artificial Sequence
  SARS-CoV-2/Portugal/PT0035/2020__EPI_ISL_418020 spike protein (1-1211)(F970C_G999C) Foldon construct
MFVFLVLLPLVSSQCVNLTTRTQLPPAYTNSFTRGVYYPDKVFRSSVLHSTQDLFLPFFSNVTWFHAIHVSGTNGTKRFDNPVLPFNDGVYFASTEKSNIIRGWIFGTTLDSKTQSLLIVNNATNVVIKVCEFQFCNDPFLGVYYHKNNKSWMESEFRVYSSANNCTFEYVSQPFLMDLEGKQGNFKNLREFVFKNIDGYFKIYSKHTPINLVRDLPQGFSALEPLVDLPIGINITRFQTLLALHRSYLTPGDSSSGWTAGAAAYYVGYLQPRTFLLKYNENGTITDAVDCALDPLSETKCTLKSFTVEKGIYQTSNFRVQPTESIVRFPNITNLCPFGEVFNATRFASVYAWNRKRISNCVADYSVLYNSASFSTFKCYGVSPTKLNDLCFTNVYADSFVIRGDEVRQIAPGQTGKIADYNYKLPDDFTGCVIAWNSNNLDSKVGGNYNYLYRLFRKSNLKPFERDISTEIYQAGSTPCNGVEGFNCYFPLQSYGFQPTNGVGYQPYRVVVLSFELLHAPATVCGPKKSTNLVKNKCVNFNFNGLTGTGVLTESNKKFLPFQQFGRDIADTTDAVRDPQTLEILDITPCSFGGVSVITPGTNTSNQVAVLYQDVNCTEVPVAIHADQLTPTWRVYSTGSNVFQTRAGCLIGAEHVNNSYECDIPIGAGICASYQTQTNSPRRARSVASQSIIAYTMSLGAENSVAYSNNSIAIPTNFTISVTTEILPVSMTKTSVDCTMYICGDSTECSNLLLQYGSFCTQLNRALTGIAVEQDKNTQEVFAQVKQIYKTPPIKDFGGFNFSQILPDPSKPSKRSFIEDLLFNKVTLADAGFIKQYGDCLGDISARDLICAQKFNGLTVLPPLLTDEMIAQYTSALLAGTITSGWTFGAGAALQIPFAMQMAYRFNGIGVTQNVLYENQKLIANQFNSAIGKIQDSLSSTASALGKLQDVVNQNAQALNTLVKQLSSNCGAISSVLNDILSRLDKVEAEVQIDRLITCRLQSLQTYVTQQLIRAAEIRASANLAATKMSECVLGQSKRVDFCGKGYHLMSFPQSAPHGVVFLHVTYVPAQEKNFTTAPAICHDGKAHFPREGVFVSNGTHWFVTQRNFYEPQIITTDNTFVSGNCDVVIGIVNNTVYDPLQPELDSFKEELDKYFKNHTSPDVDLGDISGINASVVNIQKEIDRLNEVAKNLNESLIDLQELGKYEQYIKGGSGYIPEAPRDGQAYVRKDGEWVLLSTFL

SEQ ID NO: 6420 - protein, 1241 aa, Artificial Sequence
  SARS-CoV-2/USA/NY-NYUMC7/2020__EPI_ISL_418192 spike protein (1-1211)(F970C_G999C) Foldon construct
MFVFLVLLPLVSSQCVNLTTRTQLPPAYTNSFTRGVYYPDKVFRSSVLHSTQDLFLPFFSNVTWFHAIHVSGTNGTKRFDNPVLPFNDGVYFASTEKSNIIRGWIFGTTLDSKTQSLLIVNNATNVVIKVCEFQFCNDPFLGVYHHKNNKSWMESEFRVYSSANNCTFEYVSQPFLMDLEGKQGNFKNLREFVFKNIDGYFKIYSKHTPINLVRDLPQGFSALEPLVDLPIGINITRFQTLLALHRSYLTPGDSSSGWTAGAAAYYVGYLQPRTFLLKYNENGTITDAVDCALDPLSETKCTLKSFTVEKGIYQTSNFRVQPTESIVRFPNITNLCPFGEVFNATRFASVYAWNRKRISNCVADYSVLYNSASFSTFKCYGVSPTKLNDLCFTNVYADSFVIRGDEVRQIAPGQTGKIADYNYKLPDDFTGCVIAWNSNNLDSKVGGNYNYLYRLFRKSNLKPFERDISTEIYQAGSTPCNGVEGFNCYFPLQSYGFQPTNGVGYQPYRVVVLSFELLHAPATVCGPKKSTNLVKNKCVNFNFNGLTGTGVLTESNKKFLPFQQFGRDIADTTDAVRDPQTLEILDITPCSFGGVSVITPGTNTSNQVAVLYQGVNCTEVPVAIHADQLTPTWRVYSTGSNVFQTRAGCLIGAEHVNNSYECDIPIGAGICASYQTQTNSPRRARSVASQSIIAYTMSLGAENSVAYSNNSIAIPTNFTISVTTEILPVSMTKTSVDCTMYICGDSTECSNLLLQYGSFCTQLNRALTGIAVEQDKNTQEVFAQVKQIYKTPPIKDFGGFNFSQILPDPSKPSKRSFIEDLLFNKVTLADAGFIKQYGDCLGDIAARDLICAQKFNGLTVLPPLLTDEMIAQYTSALLAGTITSGWTFGAGAALQIPFAMQMAYRFNGIGVTQNVLYENQKLIANQFNSAIGKIQDSLSSTASALGKLQDVVNQNAQALNTLVKQLSSNCGAISSVLNDILSRLDKVEAEVQIDRLITCRLQSLQTYVTQQLIRAAEIRASANLAATKMSECVLGQSKRVDFCGKGYHLMSFPQSAPHGVVFLHVTYVPAQEKNFTTAPAICHDGKAHFPREGVFVSNGTHWFVTQRNFYEPQIITTDNTFVSGNCDVVIGIVNNTVYDPLQPELDSFKEELDKYFKNHTSPDVDLGDISGINASVVNIQKEIDRLNEVAKNLNESLIDLQELGKYEQYIKGGSGYIPEAPRDGQAYVRKDGEWVLLSTFL

SEQ ID NO: 6421 - protein, 1241 aa, Artificial Sequence
  SARS-CoV-2/Iceland/189/2020__EPI_ISL_417709 spike protein (1-1211)(F970C_G999C) Foldon construct
MFVFLVLLPLVSSQCVNLTTRTQLPPAYTNSFTRGVYYPDKVFRSSVLHSTQDLFLPFFSNVTWFHAIHVSGTNGTKRFDNPVLPFNDGVYFASTEKSNIIRGWIFGTTLDSKTQSLLIVNNATNVVIKVCEFQFCNDPFLGVYYHKNNKSWMESEFRVYSSANNCTFEYVSQPFLMDLEGKQGNFKNLREFVFKNIDGYFKIYSKHTPINLVRDLPQGFSALEPLVDLPIGINITRFQTLLALHRSYLTPGDSSSGWTAGAAAYYVGYLQPRTFLLKYNENGTITDAVDCALDPLSETKCTLKSFTVEKGIYQTSNFRVQPTESIVRFPNITNLCPFGEVFNATRFASVYAWNRKRISNCVADYSVLYNSASFSTFKCYGVSPTKLNDLCFTNVYADSFVIRGDEVRQIAPGQTGKIADYNYKLPDDFTGCVIAWNSNNLDSKVGGNYNYLYRLFRKSNLKPFERDISTEIYQAGSTPCNGVEGFNCYFPLQSYGFQPTNGVGYQPYRVVVLSFELLHAPATVCGPKKSTNLVKNKCVNFNFNGLTGTGVLTESNKKFLPFQQFGRDIADTTDAVRDPQTLEILDITPCSFGGVSVITPGTNTSNQVAVLYQGVNCTEVPVAIHADQLTPTWRVYSTGSNVFQTRAGCLIGAEHVNNSYECDIPIGAGICASYQTQTNSPRRARSVASQSIIAYTMSLGAENSVAYSNNSIAIPTNFTISVTTEILPVSMTKTSVDCTMYICGDSTECSNLLLQYGSFCTQLNRALTGIAVEQDKNTQEVFAQVKQIYKTPPIKDFGGFNFSQILPDPSKPSKRSFIEDLLFNKVTLADAGFTKQYGDCLGDIAARDLICAQKFNGLTVLPPLLTDEMIAQYTSALLAGTITSGWTFGAGAALQIPFAMQMAYRFNGIGVTQNVLYENQKLIANQFNSAIGKIQDSLSSTASALGKLQDVVNQNAQALNTLVKQLSSNCGAISSVLNDILSRLDKVEAEVQIDRLITCRLQSLQTYVTQQLIRAAEIRASANLAATKMSECVLGQSKRVDFCGKGYHLMSFPQSAPHGVVFLHVTYVPAQEKNFTTAPAICHDGKAHFPREGVFVSNGTHWFVTQRNFYEPQIITTDNTFVSGNCDVVIGIVNNTVYDPLQPELDSFKEELDKYFKNHTSPDVDLGDISGINASVVNIQKEIDRLNEVAKNLNESLIDLQELGKYEQYIKGGSGYIPEAPRDGQAYVRKDGEWVLLSTFL

SEQ ID NO: 6422 - protein, 1241 aa, Artificial Sequence
  SARS-CoV-2/Australia/NSW56/2020__EPI_ISL_417408 spike protein (1-1211)(F970C_G999C) Foldon construct
MFVFLVLLPLVSSQCVNLTTRTQLPPAYTNSFTRGVYYPDKVFRSSVLHSTQDLFLPFFSNVTWFHAIHVSGTNGTKRFDNPVLPFNDGVYFASTEKSNIIRGWIFGTTLDSKTQSLLIVNNATNVVIKVCEFQFCNDPFLGVYYHKNNKSWMESEFRVYSSANNCTFEYVSQPFLMDLEGKQGNFKNLREFVFKNIDGYFKIYSKHTPINLVRDLPQGFSALEPLVDLPIGINITRFQTLLALHRSYLTPGDSSSGWTAGAAAYYVGYLQPRTFLLKYNENGTITDAVDCALDPLSETKCTLKSFTVEKGIYQTSNFRVQPTESIVRFPNITNLCPFGEVFNATRFASVYAWNRKRISNCVADYSVLYNSASFSTFKCYGVSPTKLNDLCFTNVYADSFVIRGDEVRQIAPGQTGKIADYNYKLPDDFTGCVIAWNSNNLDSKVGGNYNYLYRLFRKSNLKPFERDISTEIYQAGSTPCNGVEGFNCYFPLQSYGFQPTNGVGYQPYRVVVLSFELLHAPATVCGPKKSTNLVKNKCVNFNFNGLTGTGVLTESNKKFLPFQQFGRDIADTTDAVRDPQTLEILDITPCSFGGVSVITPGTNTSNQVAVLYQDVNCTEVPVAIHADQLTPTWRVYSTGSNVFQTRAGCLIGAEHVNNSYECDIPIGAGICASYQTQTNSPRRARSVASQSIIAYTMSLGAENSVAYSNNSIAIPTNFTISVTTEILPVSMTKTSVDCTMYICGDSTECSNLLLQYGSFCTQLNRALTGIAVEQDKNTQEVFAQVKQIYKTPPIKDFGGFNFSQILPDSSKPSKRSFIEDLLFNKVTLADAGFIKQYGDCLGDIAARDLICAQKFNGLTVLPPLLTDEMIAQYTSALLAGTITSGWTFGAGAALQIPFAMQMAYRFNGIGVTQNVLYENQKLIANQFNSAIGKIQDSLSSTASALGKLQDVVNQNAQALNTLVKQLSSNCGAISSVLNDILSRLDKVEAEVQIDRLITCRLQSLQTYVTQQLIRAAEIRASANLAATKMSECVLGQSKRVDFCGKGYHLMSFPQSAPHGVVFLHVTYVPAQEKNFTTAPAICHDGKAHFPREGVFVSNGTHWFVTQRNFYEPQIITTDNTFVSGNCDVVIGIVNNTVYDPLQPELDSFKEELDKYFKNHTSPDVDLGDISGINASVVNIQKEIDRLNEVAKNLNESLIDLQELGKYEQYIKGGSGYIPEAPRDGQAYVRKDGEWVLLSTFL

SEQ ID NO: 6423 - protein, 1241 aa, Artificial Sequence
  SARS-CoV-2/Iceland/280/2020__EPI_ISL_417608 spike protein (1-1211)(F970C_G999C) Foldon construct
MFVFLVLLPLVSSQCVNLTTRTQLPPAYTNSFTRGVYYPDKVFRSSVLHSTQDLFLPFFSNVTWFHAIHVSGTNGTKRFDNPVLPFNDGVYFASTEKSNIIRGWIFGTTLDSKTQSLLIVNNATNVVIKVCEFQFCNDPFLGVYYHKNNKSWMESEFRVYSSANNCTFEYVSQPFLMDLEGKQGNFKNLREFVFKNIDGYFKIYSKHTPINLVRDLPQGFSALEPLVDLPIGINITRFQTLLALHRSYLTPGDSSSGWTAGAAAYYVGYLQPRTFLLKYNENGTITDAVDCALDPLSETKCTLKSFTVEKGIYQTSNFRVQPTESIVRFPNITNLCPFGEVFNATRFASVYAWNRKRISNCVADYSVLYNSASFSTFKCYGVSPTKLNDLCFTNVYADSFVIRGDEVRQIAPGQTGKIADYNYKLPDDFTGCVIAWNSNNLDSKVGGNYNYLYRLFRKSNLKPFERDISTEIYQAGSTPCNGVEGFNCYFPLQSYGFQPTNGVGYQPYRVVVLSFELLHAPATVCGPKKSTNLVKNKCVNFNFNGLTGTGVLTESNKKFLPFQQFGRDIADTTDAVRDPQTLEILDITPCSFGGVSVITPGTNTSNQVAVLYQGVNCTEVPVAIHADQLTPTWRVYSTGSNVFQTRAGCLIGAEHVNNSYECDIPIGAGICASYHTQTNSPRRARSVASQSIIAYTMSLGAENSVAYSNNSIAIPTNFTISVTTEILPVSMTKTSVDCTMYICGDSTECSNLLLQYGSFCTQLNRALTGIAVEQDKNTQEVFAQVKQIYKTPPIKDFGGFNFSQILPDPSKPSKRSFIEDLLFNKVTLADAGFIKQYGDCLGDIAARDLICAQKFNGLTVLPPLLTDEMIAQYTSALLAGTITSGWTFGAGAALQIPFAMQMAYRFNGIGVTQNVLYENQKLIANQFNSAIGKIQDSLSSTASALGKLQDVVNQNAQALNTLVKQLSSNCGAISSVLNDILSRLDKVEAEVQIDRLITCRLQSLQTYVTQQLIRAAEIRASANLAATKMSECVLGQSKRVDFCGKGYHLMSFPQSAPHGVVFLHVTYVPAQEKNFTTAPAICHDGKAHFPREGVFVSNGTHWFVTQRNFYEPQIITTDNTFVSGNCDVVIGIVNNTVYDPLQPELDSFKEELDKYFKNHTSPDVDLGDISGINASVVNIQKEIDRLNEVAKNLNESLIDLQELGKYEQYIKGGSGYIPEAPRDGQAYVRKDGEWVLLSTFL

SEQ ID NO: 6424 - protein, 1241 aa, Artificial Sequence; identical to SEQ ID NO: 6379
  SARS-CoV-2/Iceland/247/2020__EPI_ISL_417575 spike protein (1-1211)(F970C_G999C) Foldon construct

SEQ ID NO: 6425 - protein, 1241 aa, Artificial Sequence
  SARS-CoV-2/Iceland/238/2020__EPI_ISL_417566 spike protein (1-1211)(F970C_G999C) Foldon construct
MFVFLVLLPLVSSQCVNLTTRTQLPPAYTNSFTRGVYYPDKVFRSSVLHSTQDLFLPFFSNVTWFHAIHVSGTNGTKRFDNPVLPFNDGVYFASTEKSNIIRGWIFGTTLDSKTQSLLIVNNATNVVIKVCEFQFCNDPFLGVYYHKNNKSWMESEFRVYSSANNCTFEYVSQPFLMDLEGKQGNFKNLREFVFKNIDGYFKIYSKHTPINLVRDLPQGFSALEPLVDLPIGINITRFQTLLALHRSYLTPGDSSSGWTAGAAAYYVGYLQPRTFLLKYNENGTITDAVDCALDPLSETKCTLKSFTVEKGIYQTSNFRVQPTESIVRFPNITNLCPFGEVFNATRFASVYAWNRKRISNCVADYSVLYNSASFSTFKCYGVSPTKLNDLCFTNVYADSFVIRGDEVRQIAPGQTGKIADYNYKLPDDFTGCVIAWNSNNLDSKVGGNYNYLYRLFRKSNLKPFERDISTEIYQAGSTPCNGVEGFNCYFPLQSYGFQPTNGVGYQPYRVVVLSFELLHAPATVCGPKKSTNLVKNKCVNFNFNGLTGTGVLTESNKKFLPFQQFGRDIADTTDAVRDPQTLEILDITPCSFGGVSVITPGTNTSNQVAVLYQGVNCTEVPVAIHADQLTPTWRVYSTGSNVFQTRAGCLIGAEHVNNSYECDIPIGAGICASYQTQTNSPRRARSVASQSIIAYTMSLGAENSVAYSNNSIAIPTNFTISVTTEILPVSMTKTSVDCTMYICGDSTECSNLLLQYGSFCTQLNRALTGIAVEQDKNTQEVFAQVKQIYKTPPIKDFGGFNFSQILPDPSKPSKRSFIEDLLFNKVTLADVGFIKQYGDCLGDIAARDLICAQKFNGLTVLPPLLTDEMIAQYTSALLAGTITSGWTFGAGAALQIPFAMQMAYRFNGIGVTQNVLYENQKLIANQFNSAIGKIQDSLSSTASALGKLQDVVNQNAQALNTLVKQLSSNCGAISSVLNDILSRLDKVEAEVQIDRLITCRLQSLQTYVTQQLIRAAEIRASANLAATKMSECVLGQSKRVDFCGKGYHLMSFPQSAPHGVVFLHVTYVPAQEKNFTTAPAICHDGKAHFPREGVFVSNGTHWFVTQRNFYEPQIITTDNTFVSGNCDVVIGIVNNTVYDPLQPELDSFKEELDKYFKNHTSPDVDLGDISGINASVVNIQKEIDRLNEVAKNLNESLIDLQELGKYEQYIKGGSGYIPEAPRDGQAYVRKDGEWVLLSTFL

SEQ ID NO: 6426 - protein, 1241 aa, Artificial Sequence
  SARS-CoV-2/Greece/16/2020__EPI_ISL_418265 spike protein (1-1211)(F970C_G999C) Foldon construct
MFVFLVLLPLVSSQCVNLTTRTQLPPAYTNSFTRGVYYPDKVFRSSVLHSTQDLFLPFFSNVTWFHAIHVSGTNGTKRFDNPVLPFNDGVYFASTEKSNIIRGWIFGTTLDSKTQSLLIVNNATNVVIKVCEFQFCNDPFLGVYYHKNNKSWMESEFRVYSSANNCTFEYVSQPFLMDLEGKQGNFKNLREFVFKNVDGYFKIYSKHTPINLVRDLPQGFSALEPLVDLPIGINITRFQTLLALHRSYLTPGDSSSGWTAGAAAYYVGYLQPRTFLLKYNENGTITDAVDCALDPLSETKCTLKSFTVEKGIYQTSNFRVQPTESIVRFPNITNLCPFGEVFNATRFASVYAWNRKRISNCVADYSVLYNSASFSTFKCYGVSPTKLNDLCFTNVYADSFVIRGDEVRQIAPGQTGKIADYNYKLPDDFTGCVIAWNSNNLDSKVGGNYNYLYRLFRKSNLKPFERDISTEIYQAGSTPCNGVEGFNCYFPLQSYGFQPTNGVGYQPYRVVVLSFELLHAPATVCGPKKSTNLVKNKCVNFNFNGLTGTGVLTESNKKFLPFQQFGRDIADTTDAVRDPQTLEILDITPCSFGGVSVITPGTNTSNQVAVLYQDVNCTEVPVAIHADQLTPTWRVYSTGSNVFQTRAGCLIGAEHVNNSYECDIPIGAGICASYQTQTNSPRRARSVASQSIIAYTMSLGAENSVAYSNNSIAIPTNFTISVTTEILPVSMTKTSVDCTMYICGDSTECSNLLLQYGSFCTQLNRALTGIAVEQDKNTQEVFAQVKQIYKTPPIKDFGGFNFSQILPDPSKPSKRSFIEDLLFNKVTLADAGFIKQYGDCLGDIAARDLICAQKFNGLTVLPPLLTDEMIAQYTSALLAGTITSGWTFGAGAALQIPFAMQMAYRFNGIGVTQNVLYENQKLIANQFNSAIGKIQDSLSSTASALGKLQDVVNQNAQALNTLVKQLSSNCGAISSVLNDILSRLDKVEAEVQIDRLITCRLQSLQTYVTQQLIRAAEIRASANLAATKMSECVLGQSKRVDFCGKGYHLMSFPQSAPHGVVFLHVTYVPAQEKNFTTAPAICHDGKAHFPREGVFVSNGTHWFVTQRNFYEPQIITTDNTFVSGNCDVVIGIVNNTVYDPLQPELDSFKEELDKYFKNHTSPDVDLGDISGINASVVNIQKEIDRLNEVAKNLNESLIDLQELGKYEQYIKGGSGYIPEAPRDGQAYVRKDGEWVLLSTFL

SEQ ID NO: 6427 - protein, 1241 aa, Artificial Sequence
  SARS-CoV-2/Iceland/319/2020__EPI_ISL_417648 spike protein (1-1211)(F970C_G999C) Foldon construct
MFVFLVLLPLVSSQCVNLTTRTQLPPAYTNSFTRGVYYPDKVFRSSVLHSTQDLFLPFFSNVTWFHAIHVSGTNGTKRFDNPVLPFNDGVYFASTEKSNIIRGWIFGTTLDSKTQSLLIVNNATNVVIKVCEFQFCNDPFLGVYYHKNNKSWMESEFRVYSSANNCTFEYVSQPFLIDLEGKQGNFKNLREFVFKNIDGYFKIYSKHTPINLVRDLPQGFSALEPLVDLPIGINITRFQTLLALHRSYLTPGDSSSGWTAGAAAYYVGYLQPRTFLLKYNENGTITDAVDCALDPLSETKCTLKSFTVEKGIYQTSNFRVQPTESIVRFPNITNLCPFGEVFNATRFASVYAWNRKRISNCVADYSVLYNSASFSTFKCYGVSPTKLNDLCFTNVYADSFVIRGDEVRQIAPGQTGKIADYNYKLPDDFTGCVIAWNSNNLDSKVGGNYNYLYRLFRKSNLKPFERDISTEIYQAGSTPCNGVEGFNCYFPLQSYGFQPTNGVGYQPYRVVVLSFELLHAPATVCGPKKSTNLVKNKCVNFNFNGLTGTGVLTESNKKFLPFQQFGRDIADTTDAVRDPQTLEILDITPCSFGGVSVITPGTNTSNQVAVLYQGVNCTEVPVAIHADQLTPTWRVYSTGSNVFQTRAGCLIGAEHVNNSYECDIPIGAGICASYQTQTNSPRRARSVASQSIIAYTMSLGAENSVAYSNNSIAIPTNFTISVTTEILPVSMTKTSVDCTMYICGDSTECSNLLLQYGSFCTQLNRALTGIAVEQDKNTQEVFAQVKQIYKTPPIKDFGGFNFSQILPDPSKPSKRSFIEDLLFNKVTLADAGFIKQYGDCLGDIAARDLICAQKFNGLTVLPPLLTDEMIAQYTSALLAGTITSGWTFGAGAALQIPFAMQMAYRFNGIGVTQNVLYENQKLIANQFNSAIGKIQDSLSSTASALGKLQDVVNQNAQALNTLVKQLSSNCGAISSVLNDILSRLDKVEAEVQIDRLITCRLQSLQTYVTQQLIRAAEIRASANLAATKMSECVLGQSKRVDFCGKGYHLMSFPQSAPHGVVFLHVTYVPAQEKNFTTAPAICHDGKAHFPREGVFVSNGTHWFVTQRNFYEPQIITTDNTFVSGNCDVVIGIVNNTVYDPLQPELDSFKEELDKYFKNHTSPDVDLGDISGINASVVNIQKEIDRLNEVAKNLNESLIDLQELGKYEQYIKGGSGYIPEAPRDGQAYVRKDGEWVLLSTFL

SEQ ID NO: 6428 - protein, 1241 aa, Artificial Sequence
  SARS-CoV-2/Congo/94/2020__EPI_ISL_417947 spike protein (1-1211)(F970C_G999C) Foldon construct
MFVFLVLLPLVSSQCVNLTTRTQLPPAYTNSFTRGVYYPDKVFRSSVLHSTQDLFLPFFSNVTWFHAIHVSGTNGTKRFDNPVLPFNDGVYFASTEKSNIIRGWIFGTTLDSKTQSLLIVNNATNVVIKVCEFQFCNDPFLGVYYHKNNKSWMESEFRVYSSANNCTFEYVSQPFLMDLEGKQGNFKNLREFVFKNIDGYFKIYSKHTPINLVRDLPQGFSALEPLVDLPIGINITRFQTLLALHRSYLTPGDSSSGWTAGAAAYYVGYLQPRTFLLKYNENGTITDAVDCALDPLSETKCTLKSFTVEKGIYQTSNFRVQPTESIVRFPNITNLCPFGEVFNATRFASVYAWNRKRISNCVADYSVLYNSASFSTFKCYGVSPTKLNDLCFTNVYADSFVIRGDEVRQIAPGQTGKIADYNYKLPDDFTGCVIAWNSNNLDSKVGGNYNYLYRLFRKSNLKPFERDISTEIYQAGSTPCNGVEGFNCYFPLQSYGFQPTNGVGYQPYRVVVLSFELLHAPATVCGPKKSTNLVKNKCVNFNFNGLTGTGVLTESNKKFLPFQQFGRDIADTTDAVRDPQTLEILDITPCSFGGVSVITPGTNTSNQVAVLYQGVNCTEVPVAIHADQLTPTWRVYSTGSNVFQTRAGCLIGAEHVNNSYECDIPIGAGICASYQTQTNSPRRARSVASQSIIAYTMSLGAENSVAYSNNSIAIPTNFTISVTTEILPVSMTKTSVDCTMYICGDSTECSNLLLQYGSFCTQLNRALTGIAVEQDKNTQEVFAQVKQIYKTPPIKDFGGFNFSQILPDPSKPSKRSFIEDILFNKVTLADAGFIKQYGDCLGDIAARDLICAQKFNGLTVLPPLLTDEMIAQYTSALLAGTITSGWTFGAGAALQIPFAMQMAYRFNGIGVTQNVLYENQKLIANQFNSAIGKIQDSLSSTASALGKLQDVVNQNAQALNTLVKQLSSNCGAISSVLNDILSRLDKVEAEVQIDRLITCRLQSLQTYVTQQLIRAAEIRASANLAATKMSECVLGQSKRVDFCGKGYHLMSFPQSAPHGVVFLHVTYVPAQEKNFTTAPAICHDGKAHFPREGVFVSNGTHWFVTQRNFYEPQIITTDNTFVSGNCDVVIGIVNNTVYDPLQPELDSFKEELDKYFKNHTSPDVDLGDISGINASVVNIQKEIDRLNEVAKNLNESLIDLQELGKYEQYIKGGSGYIPEAPRDGQAYVRKDGEWVLLSTFL

SEQ ID NO: 6429 - protein, 1241 aa, Artificial Sequence
  SARS-CoV-2/Congo/158/2020__EPI_ISL_417950 spike protein (1-1211)(F970C_G999C) Foldon construct
MFVFLVLLPLVSSQCVNLTTRTQLPPAYTNSFTRGVYYPDKVFRSSVLHSTQDLFLPFFSNVTWFHAIHVSGTNGTKRFDNPVLPFNDGVYFASTEKSNIIRGWIFGTTLDSKTQSLLIVNNATNVVIKVCEFQFCNDPFLGVYYHKNNKSWMESEFRVYSSANNCTFEYVSQPFLMDLEGKQGNFKNLREFVFKNIDGYFKIYSKHTPINLVRDLPQGFSALEPLVDLPIGINITRFQTLLALHRSYLTPGDSSSGWTAGAAAYYVGYLQPRTFLLKYNENGTITDAVDCALDPLSETKCTLKSFTVEKGIYQTSNFRVQPTESIVRFPNITNLCPFGEVFNATRFASVYAWNRKRISNCVADYSVLYNSASFSTFKCYGVSPTKLNDLCFTNVYADSFVIRGDEVRQIAPGQTGKIADYNYKLPDDFTGCVIAWNSNNLDSKVGGNYNYLYRLFRKSNLKPFERDISTEIYQAGSTPCNGVEGFNCYFPLQSYGFQPTNGVGYQPYRVVVLSFELLHAPATVCGPKKSTNLVKNKCVNFNFNGLTGTGVLTESNKKFLPFQQFGRDIADTTDAVRDPQTLEILDITPCSFGGVSVITPGTNTSNQVAVLYQDVNCTEVPVAIHADQLTPTWRVYSTGSNVFQTRAGCLIGAEHVNNSYECDIPIGAGICASYQTQTNSPRRARSVASQSIIAYTMSLGAENSVAYSNNSIAIPTNFTISVTTEILPVSMTKTSVDCTMYICGDSTECSNLLLQYGSFCTQLNRALTGIAVEQDKNTQEVFAQVKQIYKTPPIKDFGGFNFSQILPDPSKPSKRSFIEDLLFNKVTLADAGFIKQYGDCLGDIAARDLICAQKFNGLTVLPPLLTDEMIAQYTSALLAGTITSGWTFGAGAALQIPFAMQMAYRFNGIGVTQNVLYENQKLIANQFNSAIGKIQDSLSSTASALGKLQDVVNQNAQALNTLVKQLSSNCGAISSVLNDILSRLDKVEAEVQIDRLITCRLQSLQTYVTQQLIRAAEIRASANLAATKMSECVLGQSKRVDFCGKGYHLMSFPQSAPHGVVFLHVTYVPAQEKNFTTAPAICHDGKAHFPREGVFVSNGTHWFVTQRNFYEPQIITTDNTFLSGNCDVVIGIVNNTVYDPLQPELDSFKEELDKYFKNHTSPDVDLGDISGINASVVNIQKEIDRLNEVAKNLNESLIDLQELGKYEQYIKGGSGYIPEAPRDGQAYVRKDGEWVLLSTFL

SEQ ID NO: 6430 - protein, 1241 aa, Artificial Sequence
  SARS-CoV-2/USA/UT-00034/2020__EPI_ISL_417977 spike protein (1-1211)(F970C_G999C) Foldon construct
MFVFLVLLPLVSSQCVNLTTRTQLPPAYTNSFTRGVYYPDKVFRSSVLHSTQDLFLPFFSNVTWFHAIHVSGTNGTKRFDNPVLPFNDGVYFASTEKSNIIRGWIFGTTLDSKTQSLLIVNNATNVVIKVCEFQFCNDPFLGVYYYKNNKSWMESEFRVYSSANNCTFEYVSQPFLMDLEGKQGNFKNLREFVFKNIDGYFKIYSKHTPINLVRDLPQGFSALEPLVDLPIGINITRFQTLLALHRSYLTPGDSSSGWTAGAAAYYVGYLQPRTFLLKYNENGTITDAVDCALDPLSETKCTLKSFTVEKGIYQTSNFRVQPTESIVRFPNITNLCPFGEVFNATRFASVYAWNRKRISNCVADYSVLYNSASFSTFKCYGVSPTKLNDLCFTNVYADSFVIRGDEVRQIAPGQTGKIADYNYKLPDDFTGCVIAWNSNNLDSKVGGNYNYLYRLFRKSNLKPFERDISTEIYQAGSTPCNGVEGFNCYFPLQSYGFQPTNGVGYQPYRVVVLSFELLHAPATVCGPKKSTNLVKNKCVNFNFNGLTGTGVLTESNKKFLPFQQFGRDIADTTDAVRDPQTLEILDITPCSFGGVSVITPGTNTSNQVAVLYQGVNCTEVPVAIHADQLTPTWRVYSTGSNVFQTRAGCLIGAEHVNNSYECDIPIGAGICASYQTQTNSPRRARSVASQSIIAYTMSLGAENSVAYSNNSIAIPTNFTISVTTEILPVSMTKTSVDCTMYICGDSTECSNLLLQYGSFCTQLNRALTGIAVEQDKNTQEVFAQVKQIYKTPPIKDFGGFNFSQILPDPSKPSKRSFIEDLLFNKVTLADAGFIKQYGDCLGDIAARDLICAQKFNGLTVLPPLLTDEMIAQYTSALLAGTITSGWTFGAGAALQIPFAMQMAYRFNGIGVTQNVLYENQKLIANQFNSAIGKIQDSLSSTASALGKLQDVVNQNAQALNTLVKQLSSNCGAISSVLNDILSRLDKVEAEVQIDRLITCRLQSLQTYVTQQLIRAAEIRASANLAATKMSECVLGQSKRVDFCGKGYHLMSFPQSAPHGVVFLHVTYVPAQEKNFTTAPAICHDGKAHFPREGVFVSNGTHWFVTQRNFYEPQIITTDNTFVSGNCDVVIGIVNNTVYDPLQPELDSFKEELDKYFKNHTSPDVDLGDISGINASVVNIQKEIDRLNEVAKNLNESLIDLQELGKYEQYIKGGSGYIPEAPRDGQAYVRKDGEWVLLSTFL

SEQ ID NO: 6431 - protein, 1241 aa, Artificial Sequence
  SARS-CoV-2/USA/UT-00033/2020__EPI_ISL_417976 spike protein (1-1211)(F970C_G999C) Foldon construct
MFVFLVLLPLVSSQCVNLTTRTQLPPAYTNSFTRGVYYPDKVFRSSVLHSTQDLFLPFFSNVTWFHAIHVSGTNGTKRFDNPVLPFNDGVYFASTEKSNIIRGWIFGTTLDSKTQSLLIVNNATNVVIKVCEFQFCNDPFLGVYYHKNNKSWMESEFRVYSSANNCTFEYVSQPFLMDLEGKQGNFKNLREFVFKNIDGYFKIYSKHTPINLVRDLPQGFSALEPLVDLPIGINITRFQTLLALHRSYLTPGDSSSGLTAGAAAYYVGYLQPRTFLLKYNENGTITDAVDCALDPLSETKCTLKSFTVEKGIYQTSNFRVQPTESIVRFPNITNLCPFGEVFNATRFASVYAWNRKRISNCVADYSVLYNSASFSTFKCYGVSPTKLNDLCFTNVYADSFVIRGDEVRQIAPGQTGKIADYNYKLPDDFTGCVIAWNSNNLDSKVGGNYNYLYRLFRKSNLKPFERDISTEIYQAGSTPCNGVEGFNCYFPLQSYGFQPTNGVGYQPYRVVVLSFELLHAPATVCGPKKSTNLVKNKCVNFNFNGLTGTGVLTESNKKFLPFQQFGRDIADTTDAVRDPQTLEILDITPCSFGGVSVITPGTNTSNQVAVLYQGVNCTEVPVAIHADQLTPTWRVYSTGSNVFQTRAGCLIGAEHVNNSYECDIPIGAGICASYQTQTNSPRRARSVASQSIIAYTMSLGAENSVAYSNNSIAIPTNFTISVTTEILPVSMTKTSVDCTMYICGDSTECSNLLLQYGSFCTQLNRALTGIAVEQDKNTQEVFAQVKQIYKTPPIKDFGGFNFSQILPDPSKPSKRSFIEDLLFNKVTLADAGFIKQYGDCLGDIAARDLICAQKFNGLTVLPPLLTDEMIAQYTSALLAGTITSGWTFGAGAALQIPFAMQMAYRFNGIGVTQNVLYENQKLIANQFNSAIGKIQDSLSSTASALGKLQDVVNQNAQALNTLVKQLSSNCGAISSVLNDILSRLDKVEAEVQIDRLITCRLQSLQTYVTQQLIRAAEIRASANLAATKMSECVLGQSKRVDFCGKGYHLMSFPQSAPHGVVFLHVTYVPAQEKNFTTAPAICHDGKAHFPREGVFVSNGTHWFVTQRNFYEPQIITTDNTFVSGNCDVVIGIVNNTVYDPLQPELDSFKEELDKYFKNHTSPDVDLGDISGINASVVNIQKEIDRLNEVAKNLNESLIDLQELGKYEQYIKGGSGYIPEAPRDGQAYVRKDGEWVLLSTFL

SEQ ID NO: 6432 - protein, 1241 aa, Artificial Sequence
  SARS-CoV-2/USA/WI-13/2020__EPI_ISL_417516 spike protein (1-1211)(F970C_G999C) Foldon construct
MFVFLVLLPLVSSQCVNLTTRTQLPPAYTNSFTRGVYYPDKVFRSSVLHSTQDLFLPFFSNVTWFHAIHVSGTNGTKRFDNPVLPFNDGVYFASTEKSNIIRGWIFGTTLDSKTQSLLIVNNATNVVIKVCEFQFCNDPFLGVYYHKNNKSWMESEFRVYSSANNCTFEYVSQPFLMDLEGKQGNFKNLREFVFKNIDGYFKIYSKHTPINLVRDLPQGFSALEPLVDLPIGINITRFQTLLALHRSYLTPGDSSSGWTAGAAAYYVGYLQPRTFLLKYNENGTITDAVDCALDPLSETKCTLKSFTVEKGIYQTSNFRVLPTESIVRFPNITNLCPFGEVFNATRFASVYAWNRKRISNCVADYSVLYNSASFSTFKCYGVSPTKLNDLCFTNVYADSFVIRGDEVRQIAPGQTGKIADYNYKLPDDFTGCVIAWNSNNLDSKVGGNYNYLYRLFRKSNLKPFERDISTEIYQAGSTPCNGVEGFNCYFPLQSYGFQPTNGVGYQPYRVVVLSFELLHAPATVCGPKKSTNLVKNKCVNFNFNGLTGTGVLTESNKKFLPFQQFGRDIADTTDAVRDPQTLEILDITPCSFGGVSVITPGTNTSNQVAVLYQGVNCTEVPVAIHADQLTPTWRVYSTGSNVFQTRAGCLIGAEHVNNSYECDIPIGAGICASYQTQTNSPRRARSVASQSIIAYTMSLGAENSVAYSNNSIAIPTNFTISVTTEILPVSMTKTSVDCTMYICGDSTECSNLLLQYGSFCTQLNRALTGIAVEQDKNTQEVFAQVKQIYKTPPIKDFGGFNFSQILPDPSKPSKRSFIEDLLFNKVTLADAGFIKQYGDCLGDIAARDLICAQKFNGLTVLPPLLTDEMIAQYTSALLAGTITSGWTFGAGAALQIPFAMQMAYRFNGIGVTQNVLYENQKLIANQFNSAIGKIQDSLSSTASALGKLQDVVNQNAQALNTLVKQLSSNCGAISSVLNDILSRLDKVEAEVQIDRLITCRLQSLQTYVTQQLIRAAEIRASANLAATKMSECVLGQSKRVDFCGKGYHLMSFPQSAPHGVVFLHVTYVPAQEKNFTTAPAICHDGKAHFPREGVFVSNGTHWFVTQRNFYEPQIITTDNTFVSGNCDVVIGIVNNTVYDPLQPELDSFKEELDKYFKNHTSPDVDLGDISGINASVVNIQKEIDRLNEVAKNLNESLIDLQELGKYEQYIKGGSGYIPEAPRDGQAYVRKDGEWVLLSTFL

SEQ ID NO: 6433 - protein, 1240 aa, Artificial Sequence
  SARS-CoV-2/India/1-27/2020__EPI_ISL_413522 spike protein (1-1210)(F969C_G998C) Foldon construct
MFVFLVLLPLVSSQCVNLTTRTQLPPAYTNSFTRGVYYPDKVFRSSVLHSTQDLFLPFFSNVTWFHAIHVSGTNGTKRFDNPVLPFNDGVYFASTEKSNIIRGWIFGTTLDSKTQSLLIVNNATNVVIKVCEFQFCNDPFLGVYHKNNKSWMESEFRVYSSANNCTFEYVSQPFLMDLEGKQGNFKNLREFVFKNIDGYFKIYSKHTPINLVRDLPQGFSALEPLVDLPIGINITRFQTLLALHRSYLTPGDSSSGWTAGAAAYYVGYLQPRTFLLKYNENGTITDAVDCALDPLSETKCTLKSFTVEKGIYQTSNFRVQPTESIVRFPNITNLCPFGEVFNATRFASVYAWNRKRISNCVADYSVLYNSASFSTFKCYGVSPTKLNDLCFTNVYADSFVIRGDEVIQIAPGQTGKIADYNYKLPDDFTGCVIAWNSNNLDSKVGGNYNYLYRLFRKSNLKPFERDISTEIYQAGSTPCNGVEGFNCYFPLQSYGFQPTNGVGYQPYRVVVLSFELLHAPATVCGPKKSTNLVKNKCVNFNFNGLTGTGVLTESNKKFLPFQQFGRDIADTTDAVRDPQTLEILDITPCSFGGVSVITPGTNTSNQVAVLYQDVNCTEVPVAIHADQLTPTWRVYSTGSNVFQTRAGCLIGAEHVNNSYECDIPIGAGICASYQTQTNSPRRARSVASQSIIAYTMSLGAENSVAYSNNSIAIPTNFTISVTTEILPVSMTKTSVDCTMYICGDSTECSNLLLQYGSFCTQLNRALTGIAVEQDKNTQEVFAQVKQIYKTPPIKDFGGFNFSQILPDPSKPSKRSFIEDLLFNKVTLADAGFIKQYGDCLGDIAARDLICAQKFNGLTVLPPLLTDEMIAQYTSALLAGTITSGWTFGAGAALQIPFAMQMAYRFNGIGVTQNVLYENQKLIANQFNSAIGKIQDSLSSTASALGKLQDVVNQNAQALNTLVKQLSSNCGAISSVLNDILSRLDKVEAEVQIDRLITCRLQSLQTYVTQQLIRAAEIRASANLAATKMSECVLGQSKRVDFCGKGYHLMSFPQSAPHGVVFLHVTYVPAQEKNFTTAPAICHDGKAHFPREGVFVSNGTHWFVTQRNFYEPQIITTDNTFVSGNCDVVIGIVNNTVYDPLQPELDSFKEELDKYFKNHTSPDVDLGDISGINASVVNIQKEIDRLNEVAKNLNESLIDLQELGKYEQYIKGGSGYIPEAPRDGQAYVRKDGEWVLLSTFL

SEQ ID NO: 6434 - protein, 1235 aa, Artificial Sequence
  SARS-CoV-2/pangolin/Guangxi/P4L/2017__EPI_ISL_410538 spike protein (1-1205)(F964C_G993C) Foldon construct
MFVFLFVLPLVSSQCVNLTTRTGIPPGYTNSSTRGVYYPDKVFRSSILHLTQDLFLPFFSNVTWFNTINYQGGFKKFDNPVLPFNDGVYFASTEKSNIIRGWIFGTTLDARTQSLLIVNNATNVVIKVCEFQFCTDPFLGVYYHNNNKTWVENEFRVYSSANNCTFEYISQPFLMDLEGKQGNFKNLREFVFKNVDGYFKIYSKHTPIDLVRDLPRGFAALEPLVDLPIGINITRFQTLLALHRSYLTPGNLESGWTTGAAAYYVGYLQQRTFLLSYNQNGTITDAVDCSLDPLSETKCTLKSLTVEKGIYQTSNFRVQPTISIVRFPNITNLCPFGEVFNASKFASVYAWNRKRISNCVADYSVLYNSTSFSTFKCYGVSPTKLNDLCFTNVYADSFVVKGDEVRQIAPGQTGVIADYNYKLPDDFTGCVIAWNSVKQDALTGGNYGYLYRLFRKSKLKPFERDISTEIYQAGSTPCNGQVGLNCYYPLERYGFHPTTGVNYQPFRVVVLSFELLNGPATVCGPKLSTTLVKDKCVNFNFNGLTGTGVLTTSKKQFLPFQQFGRDISDTTDAVRDPQTLEILDITPCSFGGVSVITPGTNTSNQVAVLYQDVNCTEVPMAIHAEQLTPAWRVYSAGANVFQTRAGCLVGAEHVNNSYECDIPVGAGICASYHSMSSLRSVNQRSIIAYTMSLGAENSVAYSNNSIAIPTNFTISVTTEILPVSMTKTSVDCTMYICGDSIECSNLLLQYGSFCTQLNRALTGIAVEQDKNTQEVFAQVKQIYKTPPIKDFGGFNFSQILPDPSKPSKRSFIEDLLFNKVTLADAGFIKQYGDCLGDIAARDLICAQKFNGLTVLPPLLTDEMIAQYTSALLAGTITSGWTFGAGAALQIPFAMQMAYRFNGIGVTQNVLYENQKLIANQFNSAIGKIQDSLSSTASALGKLQDVVNQNAQALNTLVKQLSSNCGAISSVLNDILSRLDKVEAEVQIDRLITCRLQSLQTYVTQQLIRAAEIRASANLAATKMSECVLGQSKRVDFCGKGYHLMSFPQSAPHGVVFLHVTYVPAQEKNFTTAPAICHEGKAHFPREGVFVSNGTHWFITQRNFYEPQIITTDNTFVSGSCDVVIGIVNNTVYDPLQPELDSFKEELDKYFKNHTSPDVDLGDISGINASVVNIQKEIDRLNEVAKNLNESPIDLQELGKYEQYIKGGSGYIPEAPRDGQAYVRKDGEWVLLSTFL

SEQ ID NO: 6435 - protein, 1235 aa, Artificial Sequence
  SARS-CoV-2/pangolin/Guangxi/P5L/2017__EPI_ISL_410540 spike protein (1-1205)(F964C_G993C) Foldon construct
MFVFLFVLPLVSSQCVNLTTRTGIPPGYTNSSTRGVYYPDKVFRSSILHLTQDLFLPFFSNVTWFNTINYQGGFKKFDNPVLPFNDGVYFASTEKSNIIRGWIFGTTLDARTQSLLIVNNATNVVIKVCEFQFCTDPFLGVYYHNNNKTWVENEFRVYSSANNCTFEYISQPFLMDLEGKQGNFKNLREFVFKNVDGYFKIYSKHTPIDLVRDLPRGFAALEPLVDLPIGINITRFQTLLALHRSYLTPGKLESGWTTGAAAYYVGYLQQRTFLLSYNQNGTITDAVDCSLDPLSETKCTLKSLTVEKGIYQTSNFRVQPTISIVRFPNITNLCPFGEVFNASKFASVYAWNRKRISNCVADYSVLYNSTSFSTFKCYGVSPTKLNDLCFTNVYADSFVVKGDEVRQIAPGQTGVIADYNYKLPDDFTGCVIAWNSVKQDALTGGNYGYLYRLFRKSKLKPFERDISTEIYQAGSTPCNGQVGLNCYYPLERYGFHPTTGVNYQPFRVVVLSFELLNGPATVCGPKLSTTLVKDKCVNFNFNGLTGTGVLTTSKKQFLPFQQFGRDISDTTDAVRDPQTLEILDITPCSFGGVSVITPGTNTSNQVAVLYQDVNCTEVPMAIHAEQLTPAWRVYSAGANVFQTRAGCLVGAEHVNNSYECDIPVGAGICASYHSMSSFRSVNQRSIIAYTMSLGAENSVAYSNNSIAIPTNFTISVTTEILPVSMTKTSVDCTMYICGDSIECSNLLLQYGSFCTQLNRALTGIAVEQDKNTQEVFAQVKQIYKTPPIKDFGGFNFSQILPDPSKPSKRSFIEDLLFNKVTLADAGFIKQYGDCLGDIAARDLICAQKFNGLTVLPPLLTDEMIAQYTSALLAGTITSGWTFGAGAALQIPFAMQMAYRFNGIGVTQNVLYENQKLIANQFNSAIGKIQDSLSSTASALGKLQDVVNQNAQALNTLVKQLSSNCGAISSVLNDILSRLDKVEAEVQIDRLITCRLQSLQTYVTQQLIRAAEIRASANLAATKMSECVLGQSKRVDFCGKGYHLMSFPQSAPHGVVFLHVTYVPAQEKNFTTAPAICHEGKAHFPREGVFVSNGTHWFITQRNFYEPQIITTDNTFVSGSCDVVIGIVNNTVYDPLQPELDSFKEELDKYFKNHTSPDVDLGDISGINASVVNIQKEIDRLNEVAKNLNESLIDLQELGKYEQYIKGGSGYIPEAPRDGQAYVRKDGEWVLLSTFL

SEQ ID NO: 6436 - protein, 1235 aa, Artificial Sequence
  SARS-CoV-2/pangolin/Guangxi/P5E/2017__EPI_ISL_410541 spike protein (1-1205)(F964C_G993C) Foldon construct
MFVFLFVLPLVSSQCVNLTTRTGIPPGYTNSSTRGVYYPDKVFRSSILHLTQDLFLPFFSNVTWFNTITYQGGSKKFDNPVLPFNDGVYFASTEKSNIIRGWIFGTTLDARTQSLLIVNNATNVVIKVCEFQFCTDPFLGVYYHNNNKTWVENEFRVYSSANNCTFEYISQPFLMDLEGKQGNFKNLREFVFKNVDGYFKIYSKHTPIDLVRDLPRGFAALEPLVDLPIGINITRFQTLLALHRSYLTPGKLESGWTTGAAAYYVGYLQQRTFLLSYNQNGTITDAVDCSLDPLSETKCTLKSLTVEKGIYQTSNFRVQPTISIVRFPNITNLCPFGEVFNASKFASVYAWNRKRISNCVADYSVLYNSTSFSTFKCYGVSPTKLNDLCFTNVYADSFVVKGDEVRQIAPGQTGVIADYNYKLPDDFTGCVIAWNSVKQDALTGDNYGYLYRLFRKSKLKPFERDISTEIYQAGSTPCNGQVGLNCYYPLERYGFHPTTGVNYQPFRVVVLSFELLNGPATVCGPKLSTTLVKDKCVNFNFNGLTGTGVLTTSKKQFLPFQQFGRDISDTTDAVRDPQTLEILDITPCSFGGVSVITPGTNTSNQVAVLYQDVNCTEVPMAIHAEQLTPAWRVYSAGANVFQTRAGCLVGAEHVNNSYECDIPVGAGICASYHSMSSFRSVNQRSIIAYTMSLGAENSVAYSNNSIAIPTNFTISVTTEILPVSMTKTSVDCTMYICGDSIECSNLLLQYGSFCTQLNRALTGIAVEQDKNTQEVFAQVKQIYKTPPIKDFGGFNFSQILPDPSKPSKRSFIEDLLFNKVTLADAGFIKQYGDCLGDIAARDLICAQKFNGLTVLPPLLTDEMIAQYTSALLAGTITSGWTFGAGAALQIPFAMQMAYRFNGIGVTQNVLYENQKLIANQFNSAIGKIQDSLSSTASALGKLQDVVNQNAQALNTLVKQLSSNCGAISSVLNDILSRLDKVEAEVQIDRLITCRLQSLQTYVTQQLIRAAEIRASANLAATKMSECVLGQSKRVDFCGKGYHLMSFPQSAPHGVVFLHVTYVPAQEKNFTTAPAICHEGKAHFPREGVFVSNGTHWFITQRNFYEPQIITTDNTFVSGSCDVVIGIVNNTVYDPLQPELDSFKEELDKYFKNHTSPDVDLGDISGINASVVNIQKEIDRLNEVAKNLNESLIDLQELGKYEQYIKGGSGYIPEAPRDGQAYVRKDGEWVLLSTFL

SEQ ID NO: 6437 - protein, 1233 aa, Artificial Sequence
  SARS-CoV-2/pangolin/Guangxi/P1E/2017__EPI_ISL_410539 spike protein (1-1203)(F962C_G991C) Foldon construct
MFVFLFVLPLVSSQCVNLTTRTGIQPGYTNSSTRGVYYPDKVFRSSILHLTQDLFLPFFSNVTWFNTINYQGGFKKFDNPVLPFNDGVYFASTEKSNIIRGWIFGTTLDARTQSLLIVNNATNVVIKVCEFQFCTDPFLGVYYHNNNKTWVENEFRVYSSANNCTFEYISQPFLMDLEGKQGNFKNLREFVFKNVDGYFKIYSKHTPIDLVRDLPRGFAALEPLVDLPIGINITRFQTLLALHRSYLTPGKLESGWTTGAAAYYVGYLQQRTFLLSYNQNGTITDAVDCSLDPLSETKCTLKSLTVEKGIYQTSNFRVQPTISIVRFPNITNLCPFGEVFNASKFASVYAWNRKRISNCVADYSVLYNSTSFSTFKCYGVSPTKLNDLCFTNVYADSFVVKGDEVRQIAPGQTGVIADYNYKLPDDFTGCVIAWNSVKQDALTGGNYLYRLFRKSKLKPFERDISTEIYQAGSTPCNGQVGLNCYYPLERYGFHPTTGVNYQPFRVVVLSFELLNGPATVCGPKLSTTLVKDKCVNFNFNGLTGTGVLTTSKKQFLPFQQFGRDISDTTDAVRDPQTLEILDITPCSFGGVSVITPGTNTSNQVAVLYQDVNCTEVPMAIHAEQLTPAWRVYSAGANVFQTRAGCLVGAEHVNNSYECDIPVGAGICASYHSMSSLRSVNQRSIIAYTMSLGAENSVAYSNNSIAIPTNFTISVTTEILPVSMTKTSVDCTMYICGDSIECSNLLLQYGSFCTQLNRALTGIAVEQDKNTQEVFAQVKQIYKTPPIKDFGGFNFSQILPDPSKPSKRSFIEDLLFNKVTLADAGFIKQYGDCLGDIAARDLICAQKFNGLTVLPPLLTDEMIAQYTSALLAGTITSGWTFGAGAALQIPFAMQMAYRFNGIGVTQNVLYENQKLIANQFNSAIGKIQDSLSSTASALGKLQDVVNQNAQALNTLVKQLSSNCGAISSVLNDILSRLDKVEAEVQIDRLITCRLQSLQTYVTQQLIRAAEIRASANLAATKMSECVLGQSKRVDFCGKGYHLMSFPQSAPHGVVFLHVTYVPAQEKNFTTAPAICHEGKAHFPREGVFVSNGTHWFITQRNFYEPQIITTDNTFVSGSCDVVIGIVNNTVYDPLQPELDSFKEELDKYFKNHTSPDVDLGDISGINASVVNIQKEIDRLNEVAKNLNESLIDLQELGKYEQYIKGGSGYIPEAPRDGQAYVRKDGEWVLLSTFL

SEQ ID NO: 6438 - protein, 1241 aa, Artificial Sequence
  SARS-CoV-2/Wuhan/WIV05/2019__EPI_ISL_402128 spike protein (1-1211)(A972C_R995C) Foldon construct
MFVFLVLLPLVSSQCVNLTTRTQLPPAYTNSFTRGVYYPDKVFRSSVLHSTQDLFLPFFSNVTWFHAIHVSGTNGTKRFDNPVLPFNDGVYFASTEKSNIIRGWIFGTTLDSKTQSLLIVNNATNVVIKVCEFQFCNDPFLGVYYHKNNKSWMESEFRVYSSANNCTFEYVSQPFLMDLEGKQGNFKNLREFVFKNIDGYFKIYSKHTPINLVRDLPQGFSALEPLVDLPIGINITRFQTLLALHRSYLTPGDSSSGWTAGAAAYYVGYLQPRTFLLKYNENGTITDAVDCALDPLSETKCTLKSFTVEKGIYQTSNFRVQPTESIVRFPNITNLCPFGEVFNATRFASVYAWNRKRISNCVADYSVLYNSASFSTFKCYGVSPTKLNDLCFTNVYADSFVIRGDEVRQIAPGQTGKIADYNYKLPDDFTGCVIAWNSNNLDSKVGGNYNYLYRLFRKSNLKPFERDISTEIYQAGSTPCNGVEGFNCYFPLQSYGFQPTNGVGYQPYRVVVLSFELLHAPATVCGPKKSTNLVKNKCVNFNFNGLTGTGVLTESNKKFLPFQQFGRDIADTTDAVRDPQTLEILDITPCSFGGVSVITPGTNTSNQVAVLYQDVNCTEVPVAIHADQLTPTWRVYSTGSNVFQTRAGCLIGAEHVNNSYECDIPIGAGICASYQTQTNSPRRARSVASQSIIAYTMSLGAENSVAYSNNSIAIPTNFTISVTTEILPVSMTKTSVDCTMYICGDSTECSNLLLQYGSFCTQLNRALTGIAVEQDKNTQEVFAQVKQIYKTPPIKDFGGFNFSQILPDPSKPSKRSFIEDLLFNKVTLADAGFIKQYGDCLGDIAARDLICAQKFNGLTVLPPLLTDEMIAQYTSALLAGTITSGWTFGAGAALQIPFAMQMAYRFNGIGVTQNVLYENQKLIANQFNSAIGKIQDSLSSTASALGKLQDVVNQNAQALNTLVKQLSSNFGCISSVLNDILSRLDKVEAEVQIDCLITGRLQSLQTYVTQQLIRAAEIRASANLAATKMSECVLGQSKRVDFCGKGYHLMSFPQSAPHGVVFLHVTYVPAQEKNFTTAPAICHDGKAHFPREGVFVSNGTHWFVTQRNFYEPQIITTDNTFVSGNCDVVIGIVNNTVYDPLQPELDSFKEELDKYFKNHTSPDVDLGDISGINASVVNIQKEIDRLNEVAKNLNESLIDLQELGKYEQYIKGGSGYIPEAPRDGQAYVRKDGEWVLLSTFL

SEQ ID NO: 6439 - protein, 1237 aa, Artificial Sequence
  SARS-CoV-2/bat/Yunnan/RaTG13/2013__EPI_ISL_402131 spike protein (1-1207)(A968C_R991C) Foldon construct
MFVFLVLLPLVSSQCVNLTTRTQLPPAYTNSSTRGVYYPDKVFRSSVLHLTQDLFLPFFSNVTWFHAIHVSGTNGIKRFDNPVLPFNDGVYFASTEKSNIIRGWIFGTTLDSKTQSLLIVNNATNVVIKVCEFQFCNDPFLGVYYHKNNKSWMESEFRVYSSANNCTFEYVSQPFLMDLEGKQGNFKNLREFVFKNIDGYFKIYSKHTPINLVRDLPPGFSALEPLVDLPIGINITRFQTLLALHRSYLTPGDSSSGWTAGAAAYYVGYLQPRTFLLKYNENGTITDAVDCALDPLSETKCTLKSFTVEKGIYQTSNFRVQPTDSIVRFPNITNLCPFGEVFNATTFASVYAWNRKRISNCVADYSVLYNSTSFSTFKCYGVSPTKLNDLCFTNVYADSFVITGDEVRQIAPGQTGKIADYNYKLPDDFTGCVIAWNSKHIDAKEGGNFNYLYRLFRKANLKPFERDISTEIYQAGSKPCNGQTGLNCYYPLYRYGFYPTDGVGHQPYRVVVLSFELLNAPATVCGPKKSTNLVKNKCVNFNFNGLTGTGVLTESNKKFLPFQQFGRDIADTTDAVRDPQTLEILDITPCSFGGVSVITPGTNASNQVAVLYQDVNCTEVPVAIHADQLTPTWRVYSTGSNVFQTRAGCLIGAEHVNNSYECDIPIGAGICASYQTQTNSRSVASQSIIAYTMSLGAENSVAYSNNSIAIPTNFTISVTTEILPVSMTKTSVDCTMYICGDSTECSNLLLQYGSFCTQLNRALTGIAVEQDKNTQEVFAQVKQIYKTPPIKDFGGFNFSQILPDPSKPSKRSFIEDLLFNKVTLADAGFIKQYGDCLGDIAARDLICAQKFNGLTVLPPLLTDEMIAQYTSALLAGTITSGWTFGAGAALQIPFAMQMAYRFNGIGVTQNVLYENQKLIANQFNSAIGKIQDSLSSTASALGKLQDVVNQNAQALNTLVKQLSSNFGCISSVLNDILSRLDKVEAEVQIDCLITGRLQSLQTYVTQQLIRAAEIRASANLAATKMSECVLGQSKRVDFCGKGYHLMSFPQSAPHGVVFLHVTYVPAQEKNFTTAPAICHDGKAHFPREGVFVSNGTHWFVTQRNFYEPQIITTDNTFVSGSCDVVIGIVNNTVYDPLQPELDSFKEELDKYFKNHTSPDVDLGDISGINASVVNIQKEIDRLNEVAKNLNESLIDLQELGKYEQYIKGGSGYIPEAPRDGQAYVRKDGEWVLLSTFL

SEQ ID NO: 6440 - protein, 1241 aa, Artificial Sequence
  SARS-CoV-2/Wuhan/HBCDC-HB-01/2019__EPI_ISL_402132 spike protein (1-1211)(A972C_R995C) Foldon construct
MFVFLVLLPLVSSQCVNLTTRTQLPPAYTNSITRGVYYPDKVFRSSVLHSTQDLFLPFFSNVTWFHAIHVSGTNGTKRFDNPVLPFNDGVYFASTEKSNIIRGWIFGTTLDSKTQSLLIVNNATNVVIKVCEFQFCNDPFLGVYYHKNNKSWMESEFRVYSSANNCTFEYVSQPFLMDLEGKQGNFKNLREFVFKNIDGYFKIYSKHTPINLVRDLPQGFSALEPLVDLPIGINITRFQTLLALHRSYLTPGDSSSGWTAGAAAYYVGYLQPRTFLLKYNENGTITDAVDCALDPLSETKCTLKSFTVEKGIYQTSNFRVQPTESIVRFPNITNLCPFGEVFNATRFASVYAWNRKRISNCVADYSVLYNSASFSTFKCYGVSPTKLNDLCFTNVYADSFVIRGDEVRQIAPGQTGKIADYNYKLPDDFTGCVIAWNSNNLDSKVGGNYNYLYRLFRKSNLKPFERDISTEIYQAGSTPCNGVEGFNCYFPLQSYGFQPTNGVGYQPYRVVVLSFELLHAPATVCGPKKSTNLVKNKCVNFNFNGLTGTGVLTESNKKFLPFQQFGRDIADTTDAVRDPQTLEILDITPCSFGGVSVITPGTNTSNQVAVLYQDVNCTEVPVAIHADQLTPTWRVYSTGSNVFQTRAGCLIGAEHVNNSYECDIPIGAGICASYQTQTNSPRRARSVASQSIIAYTMSLGAENSVAYSNNSIAIPTNFTISVTTEILPVSMTKTSVDCTMYICGDSTECSNLLLQYGSFCTQLNRALTGIAVEQDKNTQEVFAQVKQIYKTPPIKDFGGFNFSQILPDPSKPSKRSFIEDLLFNKVTLADAGFIKQYGDCLGDIAARDLICAQKFNGLTVLPPLLTDEMIAQYTSALLAGTITSGWTFGAGAALQIPFAMQMAYRFNGIGVTQNVLYENQKLIANQFNSAIGKIQDSLSSTASALGKLQDVVNQNAQALNTLVKQLSSNFGCISSVLNDILSRLDKVEAEVQIDCLITGRLQSLQTYVTQQLIRAAEIRASANLAATKMSECVLGQSKRVDFCGKGYHLMSFPQSAPHGVVFLHVTYVPAQEKNFTTAPAICHDGKAHFPREGVFVSNGTHWFVTQRNFYEPQIITTDNTFVSGNCDVVIGIVNNTVYDPLQPELDSFKEELDKYFKNHTSPDVDLGDISGINASVVNIQKEIDRLNEVAKNLNESLIDLQELGKYEQYIKGGSGYIPEAPRDGQAYVRKDGEWVLLSTFL

SEQ ID NO: 6441 - protein, 1241 aa, Artificial Sequence
  SARS-CoV-2/Guangdong/20SF028/2020__EPI_ISL_403936 spike protein (1-1211)(A972C_R995C) Foldon construct
MFVFLVLLPLVSSQCVNLTTRTQLPPAYTNSFTRGVYYPDKVFRSSVLYSTQDLFLPFFSNVTWFHAIHVSGTNGTKRFDNPVLPFNDGVYFASTEKSNIIRGWIFGTTLDSKTQSLLIVNNATNVVIKVCEFQFCNDPFLGVYYHKNNKSWMESEFRVYSSANNCTFEYVSQPFLMDLEGKQGNFKNLREFVFKNIDGYFKIYSKHTPINLVRDLPQGFSALEPLVDLPIGINITRFQTLLALHRSYLTPGDSSSGWTAGAAAYYVGYLQPRTFLLKYNENGTITDAVDCALDPLSETKCTLKSFTVEKGIYQTSNFRVQPTESIVRFPNITNLCPFGEVFNATRFASVYAWNRKRISNCVADYSVLYNSASFSTFKCYGVSPTKLNDLCFTNVYADSFVIRGDEVRQIAPGQTGKIADYNYKLPDDFTGCVIAWNSNNLDSKVGGNYNYLYRLFRKSNLKPFERDISTEIYQAGSTPCNGVEGFNCYFPLQSYGFQPTNGVGYQPYRVVVLSFELLHAPATVCGPKKSTNLVKNKCVNFNFNGLTGTGVLTESNKKFLPFQQFGRDIADTTDAVRDPQTLEILDITPCSFGGVSVITPGTNTSNQVAVLYQDVNCTEVPVAIHADQLTPTWRVYSTGSNVFQTRAGCLIGAEHVNNSYECDIPIGAGICASYQTQTNSPRRARSVASQSIIAYTMSLGAENSVAYSNNSIAIPTNFTISVTTEILPVSMTKTSVDCTMYICGDSTECSNLLLQYGSFCTQLNRALTGIAVEQDKNTQEVFAQVKQIYKTPPIKDFGGFNFSQILPDPSKPSKRSFIEDLLFNKVTLADAGFIKQYGDCLGDIAARDLICAQKFNGLTVLPPLLTDEMIAQYTSALLAGTITSGWTFGAGAALQIPFAMQMAYRFNGIGVTQNVLYENQKLIANQFNSAIGKIQDSLSSTASALGKLQDVVNQNAQALNTLVKQLSSNFGCISSVLNDILSRLDKVEAEVQIDCLITGRLQSLQTYVTQQLIRAAEIRASANLAATKMSECVLGQSKRVDFCGKGYHLMSFPQSAPHGVVFLHVTYVPAQEKNFTTAPAICHDGKAHFPREGVFVSNGTHWFVTQRNFYEPQIITTDNTFVSGNCDVVIGIVNNTVYDPLQPELDSFKEELDKYFKNHTSPDVDLGDISGINASVVNIQKEIDRLNEVAKNLNESLIDLQELGKYEQYIKGGSGYIPEAPRDGQAYVRKDGEWVLLSTFL

SEQ ID NO: 6442 - protein, 1241 aa, Artificial Sequence
  SARS-CoV-2/Shenzhen/SZTH-001/2020__EPI_ISL_406592 spike protein (1-1211)(A972C_R995C) Foldon construct
MFVFLVLLPLVSSQCVNLTTRTQLPPAYTNSFTRGVYYPDKVFRSSVLHSTQDLFLPFFSNVTWFHAIHVSGTNGTKRFDNPVLPFNDGVYFASTEKSNIIRGWIFGTTLDSKTQSLLIVNNATNVVIKVCEFQFCNDPFLGVYYHKNNKSWMESEFRVYSSANNCTFEYVSQPFLMDLEGKQGNFKNLREFVFKNIDGYFKIYSKHTPINLVRDLPQGFSALEPLVDLPIGINITRFQTLLALHRSYLTPGDSSSGWTAGAAAYYVGYLQPRTFLLKYNENGTITDAVDCALDPLSETKCTLKSFTVEKGIYQTSNFRVQPTESIVRFPNITNLCPFGEVFNATRFASVYAWNRKRISNCVADYSVLYNSASFSTFKCYGVSPTKLNDLCFTNVYADSFVIRGDEVRQIAPGQTGKIADYNYKLPDDFTGCVIAWNSNNLDSKVGGNYNYLYRLFRKSNLKPFERDISTEIYQAGSTPCNGVEGFNCYFPLQSYGFQPTNGVGYQPYRVVVLSFELLHAPATVCGPKKSTNLVKNKCVNFNFNGLTGTGVLTESNKKFLPFQQFGRDIADTTDAVRDPQTLEILDITPCSFGGVSVITPGTNTSNQVAVLYQDVNCTEVPVAIHADQLTPTWRVYSTGSNVFQTRAGCLIGAEHVNNSYECDIPIGAGICASYQTQTNSPRRARSVASQSIIAYTMSLGAENSVAYSNNSIAIPTNFTISVTTEILPVSMTKTSVDCTMYICGDSTECSNLLLQYGSFCTQLNRALTGIAVEQDKNTQEVFAQVKQIYKTPPIKDFGGFNFSQILPDPSKPSKRSFIEDLLFNKVTLADAGFIKQYGDCLGDIAARDLICAQKFNGLTVLPPLLTDEMIAQYTSALLAGTITSGWTFGAGAALQIPFAMQMAYRFNGIGVTQNVLYENQKLIANQFNSAIGKIQDSLSSTASALGKLQDVVNQNAQALNTLVKQLSSNFGCISSVLNDILSRLDKVEAEVQIDCLITGRLQSLQTYVTQQLIRAAEIRASANLAATKMSECVLGQSKRVDFCGKGYHLMSFPQSAPHGVVFLHVTYVPAQEKNFTTAPAICHDGKAHFPREGVFVSNGTHWFVTQRNFYEPQIITTDNTFVSGNCDVLIGIVNNTVYDPLQPELDSFKEELDKYFKNHTSPDVDLGDISGINASVVNIQKEIDRLNEVAKNLNESLIDLQELGKYEQYIKGGSGYIPEAPRDGQAYVRKDGEWVLLSTFL

SEQ ID NO: 6443 - protein, 1241 aa, Artificial Sequence
  SARS-CoV-2/Shenzhen/SZTH-004/2020__EPI_ISL_406595 spike protein (1-1211)(A972C_R995C) Foldon construct
MFVFLVLLPLVSSQCVNLTTRTQLPPAYTNSFTRGVYYPDKVFRSSVLHSTQDLFLPFFSNVTWFHAIHVSGTNGTKRFDNPVLPFNDGVYFASTEKSNIIRGWIFGTTLDSKTQSLLIVNNATNVVIKVCEFQFCNDPFLGVYYHKNNKSWMESEFRVYSSANNCTFEYVSQPFLMDLEGKQGNFKNLREFVFKNIDGYFKIYSKHTPINLVRDLPQGFSALEPLVDLPIGINITRFQTLLALHRSYLTPGDSSSGWTAGAAAYYVGYLQPRTFLLKYNENGTITDAVDCALDPLSETKCTLKSFTVEKGIYQTSNFRVQPTESIVRFPNITNLCPFGEVFNATRFASVYAWDRKRISNCVAYYSVLYNSASFSTFKCYGVSPTKLNDLCFTNVYADSFVIRGDEVRQIAPGQTGKIADYNYKLPDDFTGCVIAWNSNNLDSKVGGNYNYLYRLFRKSNLKPFERDISTEIYQAGSTPCNGVEGFNCYFPLQSYGFQPTNGVGYQPYRVVVLSFELLHAPATVCGPKKSTNLVKNKCVNFNFNGLTGTGVLTESNKKFLPFQQFGRDIADTTDAVRDPQTLEILDITPCSFGGVSVITPGTNTSNQVAVLYQDVNCTEVPVAIHADQLTPTWRVYSTGSNVFQTRAGCLIGAEHVNNSYECDIPIGAGICASYQTQTNSPRRARSVASQSIIAYTMSLGAENSVAYSNNSIAIPTNFTISVTTEILPVSMTKTSVDCTMYICGDSTECSNLLLQYGSFCTQLNRALTGIAVEQDKNTQEVFAQVKQIYKTPPIKDFGGFNFSQILPDPSKPSKRSFIEDLLFNKVTLADAGFIKQYGDCLGDIAARDLICAQKFNGLTVLPPLLTDEMIAQYTSALLAGTITSGWTFGAGAALQIPFAMQMAYRFNGIGVTQNVLYENQKLIANQFNSAIGKIQDSLSSTASALGKLQDVVNQNAQALNTLVKQLSSNFGCISSVLNDILSRLDKVEAEVQIDCLITGRLQSLQTYVTQQLIRAAEIRASANLAATKMSECVLGQSKRVDFCGKGYHLMSFPQSAPHGVVFLHVTYVPAQEKNFTTAPAICHDGKAHFPREGVFVSNGTHWFVTQRNFYEPQIITTDNTFVSGNCDVVIGIVNNTVYDPLQPELDSFKEELDKYFKNHTSPDVDLGDISGINASVVNIQKEIDRLNEVAKNLNESLIDLQELGKYEQYIKGGSGYIPEAPRDGQAYVRKDGEWVLLSTFL

SEQ ID NO: 6444 - protein, 1241 aa, Artificial Sequence
  SARS-CoV-2/France/IDF0372/2020__EPI_ISL_406596 spike protein (1-1211)(A972C_R995C) Foldon construct
MFVFLVLLPLVSSQCVNLTTRTQLPPAYTNSFTRGVYYPDKVFRSSVLHSTQDLFLPFFSNVTWFHAIHVSGTNGTKRFDNPVLPFNDGVYFASTEKSNIIRGWIFGTTLDSKTQSLLIVNNATNVVIKVCEFQFCNDPFLGVYYHKNNKSWMESEFRVYSSANNCTFEYVSQPFLMDLEGKQGNFKNLREFVFKNIDGYFKIYSKHTPINLVRDLPQGFSALEPLVDLPIGINITRFQTLLALHRSYLTPGDSSSGWTAGAAAYYVGYLQPRTFLLKYNENGTITDAVDCALDPLSETKCTLKSFTVEKGIYQTSNFRVQPTESIVRFPNITNLCPFGEVFNATRFASVYAWNRKRISNCVADYSFLYNSASFSTFKCYGVSPTKLNDLCFTNVYADSFVIRGDEVRQIAPGQTGKIADYNYKLPDDFTGCVIAWNSNNLDSKVGGNYNYLYRLFRKSNLKPFERDISTEIYQAGSTPCNGVEGFNCYFPLQSYGFQPTNGVGYQPYRVVVLSFELLHAPATVCGPKKSTNLVKNKCVNFNFNGLTGTGVLTESNKKFLPFQQFGRDIADTTDAVRDPQTLEILDITPCSFGGVSVITPGTNTSNQVAVLYQDVNCTEVPVAIHADQLTPTWRVYSTGSNVFQTRAGCLIGAEHVNNSYECDIPIGAGICASYQTQTNSPRRARSVASQSIIAYTMSLGAENSVAYSNNSIAIPTNFTISVTTEILPVSMTKTSVDCTMYICGDSTECSNLLLQYGSFCTQLNRALTGIAVEQDKNTQEVFAQVKQIYKTPPIKDFGGFNFSQILPDPSKPSKRSFIEDLLFNKVTLADAGFIKQYGDCLGDIAARDLICAQKFNGLTVLPPLLTDEMIAQYTSALLAGTITSGWTFGAGAALQIPFAMQMAYRFNGIGVTQNVLYENQKLIANQFNSAIGKIQDSLSSTASALGKLQDVVNQNAQALNTLVKQLSSNFGCISSVLNDILSRLDKVEAEVQIDCLITGRLQSLQTYVTQQLIRAAEIRASANLAATKMSECVLGQSKRVDFCGKGYHLMSFPQSAPHGVVFLHVTYVPAQEKNFTTAPAICHDGKAHFPREGVFVSNGTHWFVTQRNFYEPQIITTDNTFVSGNCDVVIGIVNNTVYDPLQPELDSFKEELDKYFKNHTSPDVDLGDISGINASVVNIQKEIDRLNEVAKNLNESLIDLQELGKYEQYIKGGSGYIPEAPRDGQAYVRKDGEWVLLSTFL

SEQ ID NO: 6445 - protein, 1241 aa, Artificial Sequence
  SARS-CoV-2/Australia/VIC01/2020__EPI_ISL_406844 spike protein (1-1211)(A972C_R995C) Foldon construct
MFVFLVLLPLVSSQCVNLTTRTQLPPAYTNSFTRGVYYPDKVFRSSVLHSTQDLFLPFFSNVTWFHAIHVSGTNGTKRFDNPVLPFNDGVYFASTEKSNIIRGWIFGTTLDSKTQSLLIVNNATNVVIKVCEFQFCNDPFLGVYYHKNNKSWMESEFRVYSSANNCTFEYVSQPFLMDLEGKQGNFKNLREFVFKNIDGYFKIYSKHTPINLVRDLPQGFSALEPLVDLPIGINITRFQTLLALHRRYLTPGDSSSGWTAGAAAYYVGYLQPRTFLLKYNENGTITDAVDCALDPLSETKCTLKSFTVEKGIYQTSNFRVQPTESIVRFPNITNLCPFGEVFNATRFASVYAWNRKRISNCVADYSVLYNSASFSTFKCYGVSPTKLNDLCFTNVYADSFVIRGDEVRQIAPGQTGKIADYNYKLPDDFTGCVIAWNSNNLDSKVGGNYNYLYRLFRKSNLKPFERDISTEIYQAGSTPCNGVEGFNCYFPLQSYGFQPTNGVGYQPYRVVVLSFELLHAPATVCGPKKSTNLVKNKCVNFNFNGLTGTGVLTESNKKFLPFQQFGRDIADTTDAVRDPQTLEILDITPCSFGGVSVITPGTNTSNQVAVLYQDVNCTEVPVAIHADQLTPTWRVYSTGSNVFQTRAGCLIGAEHVNNSYECDIPIGAGICASYQTQTNSPRRARSVASQSIIAYTMSLGAENSVAYSNNSIAIPTNFTISVTTEILPVSMTKTSVDCTMYICGDSTECSNLLLQYGSFCTQLNRALTGIAVEQDKNTQEVFAQVKQIYKTPPIKDFGGFNFSQILPDPSKPSKRSFIEDLLFNKVTLADAGFIKQYGDCLGDIAARDLICAQKFNGLTVLPPLLTDEMIAQYTSALLAGTITSGWTFGAGAALQIPFAMQMAYRFNGIGVTQNVLYENQKLIANQFNSAIGKIQDSLSSTASALGKLQDVVNQNAQALNTLVKQLSSNFGCISSVLNDILSRLDKVEAEVQIDCLITGRLQSLQTYVTQQLIRAAEIRASANLAATKMSECVLGQSKRVDFCGKGYHLMSFPQSAPHGVVFLHVTYVPAQEKNFTTAPAICHDGKAHFPREGVFVSNGTHWFVTQRNFYEPQIITTDNTFVSGNCDVVIGIVNNTVYDPLQPELDSFKEELDKYFKNHTSPDVDLGDISGINASVVNIQKEIDRLNEVAKNLNESLIDLQELGKYEQYIKGGSGYIPEAPRDGQAYVRKDGEWVLLSTFL

SEQ ID NO: 6446 - protein, 1241 aa, Artificial Sequence
  SARS-CoV-2/Germany/BavPat1/2020__EPI_ISL_406862 spike protein (1-1211)(A972C_R995C) Foldon construct
MFVFLVLLPLVSSQCVNLTTRTQLPPAYTNSFTRGVYYPDKVFRSSVLHSTQDLFLPFFSNVTWFHAIHVSGTNGTKRFDNPVLPFNDGVYFASTEKSNIIRGWIFGTTLDSKTQSLLIVNNATNVVIKVCEFQFCNDPFLGVYYHKNNKSWMESEFRVYSSANNCTFEYVSQPFLMDLEGKQGNFKNLREFVFKNIDGYFKIYSKHTPINLVRDLPQGFSALEPLVDLPIGINITRFQTLLALHRSYLTPGDSSSGWTAGAAAYYVGYLQPRTFLLKYNENGTITDAVDCALDPLSETKCTLKSFTVEKGIYQTSNFRVQPTESIVRFPNITNLCPFGEVFNATRFASVYAWNRKRISNCVADYSVLYNSASFSTFKCYGVSPTKLNDLCFTNVYADSFVIRGDEVRQIAPGQTGKIADYNYKLPDDFTGCVIAWNSNNLDSKVGGNYNYLYRLFRKSNLKPFERDISTEIYQAGSTPCNGVEGFNCYFPLQSYGFQPTNGVGYQPYRVVVLSFELLHAPATVCGPKKSTNLVKNKCVNFNFNGLTGTGVLTESNKKFLPFQQFGRDIADTTDAVRDPQTLEILDITPCSFGGVSVITPGTNTSNQVAVLYQGVNCTEVPVAIHADQLTPTWRVYSTGSNVFQTRAGCLIGAEHVNNSYECDIPIGAGICASYQTQTNSPRRARSVASQSIIAYTMSLGAENSVAYSNNSIAIPTNFTISVTTEILPVSMTKTSVDCTMYICGDSTECSNLLLQYGSFCTQLNRALTGIAVEQDKNTQEVFAQVKQIYKTPPIKDFGGFNFSQILPDPSKPSKRSFIEDLLFNKVTLADAGFIKQYGDCLGDIAARDLICAQKFNGLTVLPPLLTDEMIAQYTSALLAGTITSGWTFGAGAALQIPFAMQMAYRFNGIGVTQNVLYENQKLIANQFNSAIGKIQDSLSSTASALGKLQDVVNQNAQALNTLVKQLSSNFGCISSVLNDILSRLDKVEAEVQIDCLITGRLQSLQTYVTQQLIRAAEIRASANLAATKMSECVLGQSKRVDFCGKGYHLMSFPQSAPHGVVFLHVTYVPAQEKNFTTAPAICHDGKAHFPREGVFVSNGTHWFVTQRNFYEPQIITTDNTFVSGNCDVVIGIVNNTVYDPLQPELDSFKEELDKYFKNHTSPDVDLGDISGINASVVNIQKEIDRLNEVAKNLNESLIDLQELGKYEQYIKGGSGYIPEAPRDGQAYVRKDGEWVLLSTFL

SEQ ID NO: 6447 - protein, 1241 aa, Artificial Sequence
  SARS-CoV-2/Wuhan/HBCDC-HB-02/2020__EPI_ISL_412978 spike protein (1-1211)(A972C_R995C) Foldon construct
MFVFLVLLPLVSSQCVNLTTRTQLPPAYTNSFTRGVYYPDKVFRSSVLHSTQDLFLPFFSNVTWFHAIHVSGTNGTKRFDNPVLPFNDGVYFASTEKSNIIRGWIFGTTLDSKTQSLLIVNNATNVVIKVCEFQFCNDPFLGVYYHKNNKSWMESEFRVYSSANNCTFEYVSQPFLMDLEGKQGNFKNLREFVFKNIDGYFKIYSKHTPINLVRDLPQGFSALEPLVDLPIGINITRFQTLLALHRSYLTPGDSSSGWTAGAAAYYVGYLQPRTFLLKYNENGTITDAVDCALDPLSETKCTLKSFTVEKGIYQTSNFRVQPTESIVRFPNITNLCPFGEVFNATRFASVYAWNRKRISNCVADYSVLYNSASFSTFKCYGVSPTKLNDLCFTNVYADSFVIRGDEVRQIAPGQTGKIADYNYKLPDDFTGCVIAWNSNNLDSKVGGNYNYLYRLFRKSNLKPFERDISTEIYQAGSTPCNGVEGFNCYFPLQSYGFQPTNGVGYQPYRVVVLSFELLHAPATVCGPKKSTNLVKNKCVNFNFNGLTGTGVLTESNKKFLPFQQFGRDIADTTDAVRDPQTLEILDITPCSFGGVSVITPGTNTSNQVAVLYQDVNCTEVPVAIHADQLTPTWRVYSTGSNVFQTRAGCLIGAEHVNNSYECDIPIGAGICASYQTQTNSPRRARSVASQSIIAYTMSLGAENSVAYSNNSIAIPTNFTISVTTEILPVSMTKTSVDCTMYICGDSTECSNFLLQYGSFCTQLNRALTGIAVEQDKNTQEVFAQVKQIYKTPPIKDFGGFNFSQILPDPSKPSKRSFIEDLLFNKVTLADAGFIKQYGDCLGDIAARDLICAQKFNGLTVLPPLLTDEMIAQYTSALLAGTITSGWTFGAGAALQIPFAMQMAYRFNGIGVTQNVLYENQKLIANQFNSAIGKIQDSLSSTASALGKLQDVVNQNAQALNTLVKQLSSNFGCISSVLNDILSRLDKVEAEVQIDCLITGRLQSLQTYVTQQLIRAAEIRASANLAATKMSECVLGQSKRVDFCGKGYHLMSFPQSAPHGVVFLHVTYVPAQEKNFTTAPAICHDGKAHFPREGVFVSNGTHWFVTQRNFYEPQIITTDNTFVSGNCDVVIGIVNNTVYDPLQPELDSFKEELDKYFKNHTSPDVDLGDISGINASVVNIQKEIDRLNEVAKNLNESLIDLQELGKYEQYIKGGSGYIPEAPRDGQAYVRKDGEWVLLSTFL

SEQ ID NO: 6448 - protein, 1241 aa, Artificial Sequence
  SARS-CoV-2/Australia/QLD02/2020__EPI_ISL_407896 spike protein (1-1211)(A972C_R995C) Foldon construct
MFVFLVLLPLVSSQCVNLTTRTQLPPAYTNSFTRGVYYPDKVFRSSVLHSTQDLFLPFFSNVTWFHAIHVSGTNGTKRFDNPVLPFNDGVYFASTEKSNIIRGWIFGTTLDSKTQSLLIVNNATNVVIKVCEFQFCNDPFLGVYYHKNNKSWMESEFRVYSSANNCTFEYVSQPFLMDLEGKQGNFKNLREFVFKNIDGYFKIYSKHTPINLVRDLPQGFSALEPLVDLPIGINITRFQTLLALHRSYLTPGDSSSGWTAGAAAYYVGYLQPRTFLLKYNENGTITDAVDCALDPLSETKCTLKSFTVEKGIYQTSNFRVQPTESIVRFPNITNLCPFGEVFNATRFASVYAWNRKRISNCVADYSVLYNSASFSTFKCYGVSPTKLNDLCFTNVYADSFVIRGDEVRQIAPGQTGKIADYNYKLPDDFTGCVIAWNSNNLDSKVGGNYNYLYRLFRKSNLKPFERDISTEIYQAGSTPCNGVEGFNCYFPLQSYGFQPTNGVGYQPYRVVVLSFELLHAPATVCGPKKSTNLVKNKCVNFNFNGLTGTGVLTESNKKFLPFQQFGRDIADTTDAVRDPQTLEILDITPCSFGGVSVITPGTNTSNQVAVLYQDVNCTEVPVAIHADQLTPTWRVYSTGSNVFQTRAGCLIGAEHVNNSYECDIPIGAGICASYQTQTNSPRRARSVASQSIIAYTMSLGAENSVAYSNNSIAIPTNFTISVTTEILPVSMTKTSVDCTMYICGDSTECSNLLLQYGSFCTQLNRALTGIAVEQDKNTQEVFAQVKQIYKTPPIKDFGGFNFSQILPDPSKPSKRSFIEDLLFNKVTLADAGFIKQYGDCLGDIAARDLICAQKFNGLTVLPPLLTDEMIAQYTSALLAGTITSGWTFGAGAALQIPFAMQMAYRFNGIGVTQNVLYENQKLIANQFNSAIGKIQDSLSSTASALGKLQDVVNQNAQALNTLVKQLSSNFGCISSVLNDILSRLDKVEAEVQIDCLITGRLQSLQTYVTQQLIRAAEIRASANLAATKMSECVLGQSKRVDFCGKGYHLMSFPQSAPHGVVFLHVTYVPAQEKNFTTAPAICHDGKAHFPREGVFVSNGTHWFVTQRNFYEPQIITTDNTFVSGNCDVVIGIVNNTVYDPLQLELDSFKEELDKYFKNHTSPDVDLGDISGINASVVNIQKEIDRLNEVAKNLNESLIDLQELGKYEQYIKGGSGYIPEAPRDGQAYVRKDGEWVLLSTFL

SEQ ID NO: 6449 - protein, 1241 aa, Artificial Sequence
  SARS-CoV-2/India/1-31/2020__EPI_ISL_413523 spike protein (1-1211)(A972C_R995C) Foldon construct
MFVFLVLLPLVSSQCVNLTTRTQLPPAYTNSFTRGVYYPDKVFRSSVLHSTQDLFLPFFSNVTWFHAIHVSGTNGTKRFDNPVLPFNDGVYFASTEKSNIIRGWIFGTTLDSKTQSLLIVNNATNVVIKVCEFQFCNDPFLGVYYHKNNKSWMESEFRVYSSANNCTFEYVSQPFLMDLEGKQGNFKNLREFVFKNIDGYFKIYSKHTPINLVRDLPQGFSALEPLVDLPIGINITRFQTLLALHRSYLTPGDSSSGWTAGAAAYYVGYLQPRTFLLKYNENGTITDAVDCALDPLSETKCTLKSFTVEKGIYQTSNFRVQPTESIVRFPNITNLCPFGEVFNATRFASVYAWNRKRISNCVADYSVLYNSASFSTFKCYGVSPTKLNDLCFTNVYADSFVIRGDEVRQIAPGQTGKIADYNYKLPDDFTGCVIAWNSNNLDSKVGGNYNYLYRLFRKSNLKPFERDISTEIYQAGSTPCNGVEGFNCYFPLQSYGFQPTNGVGYQPYRVVVLSFELLHAPATVCGPKKSTNLVKNKCVNFNFNGLTGTGVLTESNKKFLPFQQFGRDIADTTDAVRDPQTLEILDITPCSFGGVSVITPGTNTSNQVAVLYQDVNCTEVPVAIHADQLTPTWRVYSTGSNVFQTRAGCLIGAEHVNNSYECDIPIGAGICASYQTQTNSPRRARSVASQSIIAYTMSLGAENSVAYSNNSIAIPTNFTISVTTEILPVSMTKTSVDCTMYICGDSTECSNLLLQYGSFCTQLNRALTGIAVEQDKNTQEVFAQVKQIYKTPPIKDFGGFNFSQILPDPSKPSKRSFIEDLLFNKVTLADAGFIKQYGDCLGDIAARDLICAQKFNGLTVLPPLLTDEMIAQYTSALLAGTITSGWTFGAGAALQIPFAMQMAYRFNGIGVTQNVLYENQKLIANQFNSVIGKIQDSLSSTASALGKLQDVVNQNAQALNTLVKQLSSNFGCISSVLNDILSRLDKVEAEVQIDCLITGRLQSLQTYVTQQLIRAAEIRASANLAATKMSECVLGQSKRVDFCGKGYHLMSFPQSAPHGVVFLHVTYVPAQEKNFTTAPAICHDGKAHFPREGVFVSNGTHWFVTQRNFYEPQIITTDNTFVSGNCDVVIGIVNNTVYDPLQPELDSFKEELDKYFKNHTSPDVDLGDISGINASVVNIQKEIDRLNEVAKNLNESLIDLQELGKYEQYIKGGSGYIPEAPRDGQAYVRKDGEWVLLSTFL

SEQ ID NO: 6450 - protein, 1241 aa, Artificial Sequence
  SARS-CoV-2/Guangdong/GD2020087-P0008/2020__EPI_ISL_413863 spike protein (1-1211)(A972C_R995C) Foldon construct
MFVFLVLLPLVSSQCVNLTTRTQLPPAYTNSFTRGVYYPDKVFRSSVLHSTQDLFLPFFSNVTWFHAIHVSGTNGTKRFDNPVLPFNDGVYFASTEKSNIIRGWIFGTTLDSKTQSLLIVNNATNVVIKVCEFQFCNDPFLGVYYHKNNKSWMESEFRVYSSANNCTFEYVSQPFLMDLEGKQGNFKNLREFVFKNIDGYFKIYSKHTPINLVRDLPQGFSALEPLVDLPIGINITRFQTLLALHRSYLTPGDSSSGWTAGAAAYYVGYLQPRTFLLKYNENGTITDAVDCALDPLSETKCTLKSFTVEKGIYQTSNFRVQPTESIVRFPNITNLCPFGEVFNATRFASVYAWNRKRISNCVADYSVLYNSASFSTFKCYGVSPTKLNDLCFTNVYADSFVIRGDEVREIAPGQTGKIADYNYKLPDDFTGCVIAWNSNNLDSKVGGNYNYLYRLFRKSNLKPFERDISTEIYQAGSTPCNGVEGFNCYFPLQSYGFQPTNGVGYQPYRVVVLSFELLHAPATVCGPKKSTNLVKNKCVNFNFNGLTGTGVLTESNKKFLPFQQFGRDIADTTDAVRDPQTLEILDITPCSFGGVSVITPGTNTSNQVAVLYQDVNCTEVPVAIHADQLTPTWRVYSTGSNVFQTRAGCLIGAEHVNNSYECDIPIGAGICASYQTQTNSPRRARSVASQSIIAYTMSLGAENSVAYSNNSIAIPTNFTISVTTEILPVSMTKTSVDCTMYICGDSTECSNLLLQYGSFCTQLNRALTGIAVEQDKNTQEVFAQVKQIYKTPPIKDFGGFNFSQILPDPSKPSKRSFIEDLLFNKVTLADAGFIKQYGDCLGDIAARDLICAQKFNGLTVLPPLLTDEMIAQYTSALLAGTITSGWTFGAGAALQIPFAMQMAYRFNGIGVTQNVLYENQKLIANQFNSAIGKIQDSLSSTASALGKLQDVVNQNAQALNTLVKQLSSNFGCISSVLNDILSRLDKVEAEVQIDCLITGRLQSLQTYVTQQLIRAAEIRASANLAATKMSECVLGQSKRVDFCGKGYHLMSFPQSAPHGVVFLHVTYVPAQEKNFTTAPAICHDGKAHFPREGVFVSNGTHWFVTQRNFYEPQIITTDNTFVSGNCDVVIGIVNNTVYDPLQPELDSFKEELDKYFKNHTSPDVDLGDISGINASVVNIQKEIDRLNEVAKNLNESLIDLQELGKYEQYIKGGSGYIPEAPRDGQAYVRKDGEWVLLSTFL

SEQ ID NO: 6451 - protein, 1241 aa, Artificial Sequence
  SARS-CoV-2/Sweden/01/2020__EPI_ISL_411951 spike protein (1-1211)(A972C_R995C) Foldon construct
MFVFLVLLPLVSSQCVNLTTRTQLPPAYTNSFTRGVYYPDKVFRSSVLHSTQDLFLPFFSNVTWFHAIHVSGTNGTKRFDNPVLPFNDGVYFASTEKSNIIRGWIFGTTLDSKTQSLLIVNNATNVVIKVCEFQFCNDPFLGVYYHKNNKSWMESEFRVYSSANNCTFEYVSQPFLMDLEGKQGNFKNLREFVFKNIDGYFKIYSKHTPINLVRDLPQGFSALEPLVDLPIGINITRFQTLLALHRSYLTPGDSSSGWTAGAAAYYVGYLQPRTFLLKYNENGTITDAVDCALDPLSETKCTLKSFTVEKGIYQTSNFRVQPTESIVRFPNITNLCPFGEVFNATRFASVYAWNRKRISNCVADYSVLYNSASFSTFKCYGVSPTKLNDLCFTNVYADSFVIRGDEVRQIAPGQTGKIADYNYKLPDDFTGCVIAWNSNNLDSKVGGNYNYLYRLFRKSNLKPFERDISTEIYQAGSTPCNGVEGFNCYFPLQSYGFQPTNGVGYQPYRVVVLSFELLHAPATVCGPKKSTNLVKNKCVNFNFNGLTGTGVLTESNKKFLPFQQFGRDIADTTDAVRDPQTLEILDITPCSFGGVSVITPGTNTSNQVAVLYQDVNCTEVPVAIHADQLTPTWRVYSTGSNVFQTRAGCLIGAEHVNNSYECDIPIGAGICASYQTQTNSPRRARSVASQSIIAYTMSLGAENSVAYSNNSIAIPTNFTISVTTEILPVSMTKTSVDCTMYICGDSTECSNLLLQYGSFCTQLNRALTGIAVEQDKNTQEVFAQVKQIYKTPPIKDCGGFNFSQILPDPSKPSKRSFIEDLLFNKVTLADAGFIKQYGDCLGDIAARDLICAQKFNGLTVLPPLLTDEMIAQYTSALLAGTITSGWTFGAGAALQIPFAMQMAYRFNGIGVTQNVLYENQKLIANQFNSAIGKIQDSLSSTASALGKLQDVVNQNAQALNTLVKQLSSNFGCISSVLNDILSRLDKVEAEVQIDCLITGRLQSLQTYVTQQLIRAAEIRASANLAATKMSECVLGQSKRVDFCGKGYHLMSFPQSAPHGVVFLHVTYVPAQEKNFTTAPAICHDGKAHFPREGVFVSNGTHWFVTQRNFYEPQIITTDNTFVSGNCDVVIGIVNNTVYDPLQPELDSFKEELDKYFKNHTSPDVDLGDISGINASVVNIQKEIDRLNEVAKNLNESLIDLQELGKYEQYIKGGSGYIPEAPRDGQAYVRKDGEWVLLSTFL

SEQ ID NO: 6452 - protein, 1241 aa, Artificial Sequence
  SARS-CoV-2/Tianmen/HBCDC-HB-07/2020__EPI_ISL_412983 spike protein (1-1211)(A972C_R995C) Foldon construct
MFVFLVLLPLVSSQCVNLTTRTQLPPAYTNSFTRGVYYPDKVFRSSVLHSTQDLFLPFFSNVTWFHAIHVSGTNGTKRFDNPVLPFNDGVYFASTEKSNIIRGWIFGTTLDSKTQSLLIVNNATNVVIKVCEFQFCNDPFLGVYYHKNNKSWMESEFRVYSSANNCTFEYVSQPFLMDLEGKQGNFKNLREFVFKNIDGYFKIYSKHTPINLVRDLPQGFSALEPLVDLPIGINITRFQTLLALHRSYLTPGDSSSGWTAGAAAYYVGYLQPRTFLLKYNENGTITDAVDCALDPLSETKCTLKSFTVEKGIYQTSNFRVQPTESIVRFPNITNLCPFGEVFNATRFASVYAWNRKRISNCVADYSVLYNSASFSTFKCYGVSPTKLNDLCFTNVYADSFVIRGDEVRQIAPGQTGKIADYNYKLPDDFTGCVIAWNSNNLDSKVGGNYNYLYRLFRKSNLKPFERDISTEIYQAGSTPCNGVEGFNCYFPLQSYGFQPTNGVGYQPYRVVVLSFELLHAPATVCGPKKSTNLVKNKCVNFNFNGLTGTGVLTESNKKFLPFQQFGRDIADTTDAVRDPQTLEILDITPCSFGGVSVITPGTNTSNQVAVLYQDLNCTEVPVAIHADQLTPTWRVYSTGSNVFQTRAGCLIGAEHVNNSYECDIPIGAGICASYQTQTNSPRRARSVASQSIIAYTMSLGAENSVAYSNNSIAIPTNFTISVTTEILPVSMTKTSVDCTMYICGDSTECSNLLLQYGSFCTQLNRALTGIAVEQDKNTQEVFAQVKQIYKTPPIKDFGGFNFSQILPDPSKPSKRSFIEDLLFNKVTLADAGFIKQYGDCLGDIAARDLICAQKFNGLTVLPPLLTDEMIAQYTSALLAGTITSGWTFGAGAALQIPFAMQMAYRFNGIGVTQNVLYENQKLIANQFNSAIGKIQDSLSSTASALGKLQDVVNQNAQALNTLVKQLSSNFGCISSVLNDILSRLDKVEAEVQIDCLITGRLQSLQTYVTQQLIRAAEIRASANLAATKMSECVLGQSKRVDFCGKGYHLMSFPQSAPHGVVFLHVTYVPAQEKNFTTAPAICHDGKAHFPREGVFVSNGTHWFVTQRNFYEPQIITTDNTFVSGNCDVVIGIVNNTVYDPLQPELDSFKEELDKYFKNHTSPDVDLGDISGINASVVNIQKEIDRLNEVAKNLNESLIDLQELGKYEQYIKGGSGYIPEAPRDGQAYVRKDGEWVLLSTFL

SEQ ID NO: 6453 - protein, 1241 aa, Artificial Sequence
  SARS-CoV-2/Hong Kong/case42_VM20002493/2020__EPI_ISL_414527 spike protein (1-1211)(A972C_R995C) Foldon construct
MFVFLVLLPLVSSQCVNLTTRTQLPPAYTNSFTRGVYYPDKVFRSSVLHSTQDLFLPFFSNVTWFHAIHVSGTNGTKRFDNPVLPFNDGVYFASTEKSNIIRGWIFGTTLDSKTQSLLIVNNATNVVIKVCEFQFCNDPFLGVYYHKNNKSWMESEFRVYSSANNCTFEYVSQPFLMDLEGKQGNFKNLREFVFKNIDGYFKIYSKHTPINLVRDLPQGFSALEPLVDLPIGINITRFQTLLALHRSYLTPGDSSSGWTAGAAAYYVGYLQPRTFLLKYNENGTITDAVDCALDPLSETKCTLKSFTVEKGIYQTSNFRVQPTESIVRFPNITNLCPFGEVFNATRFASVYAWNRKRISNCVADYSVLYNSASFSTFKCYGVSPTKLNDLCFTNVYADSFVIRGDEVRQIAPGQTGKIADYNYKLPDDFTGCVIAWNSNNLDSKVGGNYNYLYRLFRKSNLKPFERDISTEIYQAGSTPCNGVEGFNCYFPLQSYGFQPTNGVGYQPYRVVVLSFELLHAPATVCGPKKSTNLVKNKCVNFNFNGLTGTGVLTESNKKFLPFQQFGRDIADTTDAVRDPQTLEILDITPCSFGGVSVITPGTNTSNQVAVLYQDVNCTEVPVAIHADQLTPTWRVYSTGSNVFQTRAGCLIGAEHVNNSYECDIPIGAGICASYQTQTNSPRRARSVASQSIIAYTMSLGAENSVAYSNNSIAIPTNFAISVTTEILPVSMTKTSVDCTMYICGDSTECSNLLLQYGSFCTQLNRALTGIAVEQDKNTQEVFAQVKQIYKTPPIKDFGGFNFSQILPDPSKPSKRSFIEDLLFNKVTLADAGFIKQYGDCLGDIAARDLICAQKFNGLTVLPPLLTDEMIAQYTSALLAGTITSGWTFGAGAALQIPFAMQMAYRFNGIGVTQNVLYENQKLIANQFNSAIGKIQDSLSSTASALGKLQDVVNQNAQALNTLVKQLSSNFGCISSVLNDILSRLDKVEAEVQIDCLITGRLQSLQTYVTQQLIRAAEIRASANLAATKMSECVLGQSKRVDFCGKGYHLMSFPQSAPHGVVFLHVTYVPAQEKNFTTAPAICHDGKAHFPREGVFVSNGTHWFVTQRNFYEPQIITTDNTFVSGNCDVVIGIVNNTVYDPLQPELDSFKEELDKYFKNHTSPDVDLGDISGINASVVNIQKEIDRLNEVAKNLNESLIDLQELGKYEQYIKGGSGYIPEAPRDGQAYVRKDGEWVLLSTFL

SEQ ID NO: 6454 - protein, 1241 aa, Artificial Sequence
  SARS-CoV-2/USA/CruiseA-23/2020__EPI_ISL_414482 spike protein (1-1211)(A972C_R995C) Foldon construct
MFVFLVLLPLVSSQCVNLTTRTQLPPAYTNSFTRGVYYPDKVFRSSVLHSTQDLFLPFFSNVTWFHAIHVSGTNGTKRFDNPVLPFNDGVYFASTEKSNIIRGWIFGTTLDSKTQSLLIVNNATNVVIKVCEFQFCNDPFLGVYYHKNNKSWMESEFRVYSSANNCTFEYVSQPFLMDLEVKQGNFKNLREFVFKNIDGYFKIYSKHTPINLVRDLPQGFSALEPLVDLPIGINITRFQTLLALHRSYLTPGDSSSGWTAGAAAYYVGYLQPRTFLLKYNENGTITDAVDCALDPLSETKCTLKSFTVEKGIYQTSNFRVQPTESIVRFPNITNLCPFGEVFNATRFASVYAWNRKRISNCVADYSVLYNSASFSTFKCYGVSPTKLNDLCFTNVYADSFVIRGDEVRQIAPGQTGKIADYNYKLPDDFTGCVIAWNSNNLDSKVGGNYNYLYRLFRKSNLKPFERDISTEIYQAGSTPCNGVEGFNCYFPLQSYGFQPTNGVGYQPYRVVVLSFELLHAPATVCGPKKSTNLVKNKCVNFNFNGLTGTGVLTESNKKFLPFQQFGRDIADTTDAVRDPQTLEILDITPCSFGGVSVITPGTNTSNQVAVLYQDVNCTEVPVAIHADQLTPTWRVYSTGSNVFQTRAGCLIGAEHVNNSYECDIPIGAGICASYQTQTNSPRRARSVASQSIIAYTMSLGAENSVAYSNNSIAIPTNFTISVTTEILPVSMTKTSVDCTMYICGDSTECSNLLLQYGSFCTQLNRALTGIAVEQDKNTQEVFAQVKQIYKTPPIKDFGGFNFSQILPDPSKPSKRSFIEDLLFNKVTLADAGFIKQYGDCLGDIAARDLICAQKFNGLTVLPPLLTDEMIAQYTSALLAGTITSGWTFGAGAALQIPFAMQMAYRFNGIGVTQNVLYENQKLIANQFNSAIGKIQDSLSSTASALGKLQDVVNQNAQALNTLVKQLSSNFGCISSVLNDILSRLDKVEAEVQIDCLITGRLQSLQTYVTQQLIRAAEIRASANLAATKMSECVLGQSKRVDFCGKGYHLMSFPQSAPHGVVFLHVTYVPAQEKNFTTAPAICHDGKAHFPREGVFVSNGTHWFVTQRNFYEPQIITTDNTFVSGNCDVVIGIVNNTVYDPLQPELDSFKEELDKYFKNHTSPDVDLGDISGINASVVNIQKEIDRLNEVAKNLNESLIDLQELGKYEQYIKGGSGYIPEAPRDGQAYVRKDGEWVLLSTFL

SEQ ID NO: 6455 - protein, 1241 aa, Artificial Sequence
  SARS-CoV-2/Hong Kong/case85_VM20002868/2020__EPI_ISL_414519 spike protein (1-1211)(A972C_R995C) Foldon construct
MFVFLVLVPLVSSQCVNLTTRTQLPPAYTNSFTRGVYYPDKVFRSSVLHSTQDLFLPFFSNVTWFHAIHVSGTNGTKRFDNPVLPFNDGVYFASTEKSNIIRGWIFGTTLDSKTQSLLIVNNATNVVIKVCEFQFCNDPFLGVYYHKNNKSWMESEFRVYSSANNCTFEYVSQPFLMDLEGKQGNFKNLREFVFKNIDGYFKIYSKHTPINLVRDLPQGFSALEPLVDLPIGINITRFQTLLALHRSYLTPGDSSSGWTAGAAAYYVGYLQPRTFLLKYNENGTITDAVDCALDPLSETKCTLKSFTVEKGIYQTSNFRVQPTESIVRFPNITNLCPFGEVFNATRFASVYAWNRKRISNCVADYSVLYNSASFSTFKCYGVSPTKLNDLCFTNVYADSFVIRGDEVRQIAPGQTGKIADYNYKLPDDFTGCVIAWNSNNLDSKVGGNYNYLYRLFRKSNLKPFERDISTEIYQAGSTPCNGVEGFNCYFPLQSYGFQPTNGVGYQPYRVVVLSFELLHAPATVCGPKKSTNLVKNKCVNFNFNGLTGTGVLTESNKKFLPFQQFGRDIADTTDAVRDPQTLEILDITPCSFGGVSVITPGTNTSNQVAVLYQDVNCTEVPVAIHADQLTPTWRVYSTGSNVFQTRAGCLIGAEHVNNSYECDIPIGAGICASYQTQTNSPRRARSVASQSIIAYTMSLGAENSVAYSNNSIAIPTNFTISVTTEILPVSMTKTSVDCTMYICGDSTECSNLLLQYGSFCTQLNRALTGIAVEQDKNTQEVFAQVKQIYKTPPIKDFGGFNFSQILPDPSKPSKRSFIEDLLFNKVTLADAGFIKQYGDCLGDIAARDLICAQKFNGLTVLPPLLTDEMIAQYTSALLAGTITSGWTFGAGAALQIPFAMQMAYRFNGIGVTQNVLYENQKLIANQFNSAIGKIQDSLSSTASALGKLQDVVNQNAQALNTLVKQLSSNFGCISSVLNDILSRLDKVEAEVQIDCLITGRLQSLQTYVTQQLIRAAEIRASANLAATKMSECVLGQSKRVDFCGKGYHLMSFPQSAPHGVVFLHVTYVPAQEKNFTTAPAICHDGKAHFPREGVFVSNGTHWFVTQRNFYEPQIITTDNTFVSGNCDVVIGIVNNTVYDPLQPELDSFKEELDKYFKNHTSPDVDLGDISGINASVVNIQKEIDRLNEVAKNLNESLIDLQELGKYEQYIKGGSGYIPEAPRDGQAYVRKDGEWVLLSTFL

SEQ ID NO: 6456 - protein, 1241 aa, Artificial Sequence; identical to SEQ ID NO: 6446
  SARS-CoV-2/England/200990660/2020__EPI_ISL_414523 spike protein (1-1211)(A972C_R995C) Foldon construct

SEQ ID NO: 6457 - protein, 1241 aa, Artificial Sequence
  SARS-CoV-2/Australia/NSW09/2020__EPI_ISL_413595 spike protein (1-1211)(A972C_R995C) Foldon construct
MFVFLVLLPLVSSQCVNLTTRTQLPPAYTNSFTRGVYYPDKVFRSSVLHSTQDLFLPFFSNVTWFHAIHVSGTNGTKRFDNPVLPFNDGVYFASTEKSNIIRGWIFGTTLDSKTQSLLIVNNATNVVIKVCEFQFCNDPFLGVYYHKNNKSWMESEFRVYSSANNCTFEYVSQPFLMDLEGKQGNFKNLREFVFKNIDGYFKIYSKHTPINLVRDLPQGFSALEPLVDLPIGINITRFQTLLALHRSYLTPGDSSSGWTAGAAAYYVGYLQPRTFLLKYNENGTITDAVDCALDPLSETKCTLKSFTVEKGIYQTSNFRVQPTESIVRFPNITNLCPFGEVFNATRFASVYAWNRKRISNCVADYSVLYNSASFSTFKCYGVSPTKLNDLCFTNVYADSFVIRGDEVRQIAPGQTGKIADYNYKLPDDFTGCVIAWNSNNLDSKVGGNYNYLYRLFRKSNLKPFERDISTEIYQAGSTPCNGVEGFNCYFPLQSYGFQPTNGVGYQPYRVVVLSFELLHAPATVCGPKKSTNLVKNKCVNFNFNGLTGTGVLTESNKKFLPFQQFGRDIADTTDAVRDPQTLEILDITPCSFGGVSVITPGTNTSNQVAVLYQDVNCTEVPVAIHADQLTPTWRVYSTGSNVFQTRAGCLIGAEHVNNSYECDIPIGAGICASYQTQTNSPRRARSVASQSIIAYTMSLGAENSVAYSNNSIAIPTNFTISVTTEILPVSMTKTSVDCTMYICGDSTECSNLLLQYGSFCTQLNRALTGIAVEQDKNTQEVFAQVKQIYKTPPIKDFGGFNFSQILPDPSKPSKRSFIEDLLFNKVTLADAGFIKQYGDCLGDIAARDLICAQKFNGLTVLPPLLTDEMIAQYTSALLAGTITSGWTFGAGAALQIPFAMQMAYRFNGIGVTQNVLYENQKLIANQFNSAIGKIQDSLSFTASALGKLQDVVNQNAQALNTLVKQLSSNFGCISSVLNDILSRLDKVEAEVQIDCLITGRLQSLQTYVTQQLIRAAEIRASANLAATKMSECVLGQSKRVDFCGKGYHLMSFPQSAPHGVVFLHVTYVPAQEKNFTTAPAICHDGKAHFPREGVFVSNGTHWFVTQRNFYEPQIITTDNTFVSGNCDVVIGIVNNTVYDPLQPELDSFKEELDKYFKNHTSPDVDLGDISGINASVVNIQKEIDRLNEVAKNLNESLIDLQELGKYEQYIKGGSGYIPEAPRDGQAYVRKDGEWVLLSTFL

SEQ ID NO: 6458 - protein, 1241 aa, Artificial Sequence; identical to SEQ ID NO: 6438
  SARS-CoV-2/Australia/NSW10/2020__EPI_ISL_413596 spike protein (1-1211)(A972C_R995C) Foldon construct

SEQ ID NO: 6459 - protein, 1241 aa, Artificial Sequence
  SARS-CoV-2/Switzerland/1000477797/2020__EPI_ISL_413023 spike protein (1-1211)(A972C_R995C) Foldon construct
MFVFLVLLPLVSSQCVNLTTRTQLPPAYTNSFTRGVYYPDKVFRSSVLHSTQDLFLPFFSNVTWFHAIHVSGTNGTKRFDNPVLPFNDGVYFASTEKSNIIRGWIFGTTLDSKTQSLLIVNNATNVVIKVCEFQFCNDPFLGVYYHKNNKSWMESEFRVYSSANNCTFEYVSQPFLMDLEGKQGNFKNLREFVFKNIDGYFNIYSKHTPINLVRDLPQGFSALEPLVDLPIGINITRFQTLLALHRSYLTPGDSSSGWTAGAAAYYVGYLQPRTFLLKYNENGTITDAVDCALDPLSETKCTLKSFTVEKGIYQTSNFRVQPTESIVRFPNITNLCPFGEVFNATRFASVYAWNRKRISNCVADYSVLYNSASFSTFKCYGVSPTKLNDLCFTNVYADSFVIRGDEVRQIAPGQTGKIADYNYKLPDDFTGCVIAWNSNNLDSKVGGNYNYLYRLFRKSNLKPFERDISTEIYQAGSTPCNGVEGFNCYFPLQSYGFQPTNGVGYQPYRVVVLSFELLHAPATVCGPKKSTNLVKNKCVNFNFNGLTGTGVLTESNKKFLPFQQFGRDIADTTDAVRDPQTLEILDITPCSFGGVSVITPGTNTSNQVAVLYQGVNCTEVPVAIHADQLTPTWRVYSTGSNVFQTRAGCLIGAEHVNNSYECDIPIGAGICASYQTQTNSPRRARSVASQSIIAYTMSLGAENSVAYSNNSIAIPTNFTISVTTEILPVSMTKTSVDCTMYICGDSTECSNLLLQYGSFCTQLNRALTGIAVEQDKNTQEVFAQVKQIYKTPPIKDFGGFNFSQILPDPSKPSKRSFIEDLLFNKVTLADAGFIKQYGDCLGDIAARDLICAQKFNGLTVLPPLLTDEMIAQYTSALLAGTITSGWTFGAGAALQIPFAMQMAYRFNGIGVTQNVLYENQKLIANQFNSAIGKIQDSLSSTASALGKLQDVVNQNAQALNTLVKQLSSNFGCISSVLNDILSRLDKVEAEVQIDCLITGRLQSLQTYVTQQLIRAAEIRASANLAATKMSECVLGQSKRVDFCGKGYHLMSFPQSAPHGVVFLHVTYVPAQEKNFTTAPAICHDGKAHFPREGVFVSNGTHWFVTQRNFYEPQIITTDNTFVSGNCDVVIGIVNNTVYDPLQPELDSFKEELDKYFKNHTSPDVDLGDISGINASVVNIQKEIDRLNEVAKNLNESLIDLQELGKYEQYIKGGSGYIPEAPRDGQAYVRKDGEWVLLSTFL

SEQ ID NO: 6460 - protein, 1241 aa, Artificial Sequence
  SARS-CoV-2/Belgium/BA-02291/2020__EPI_ISL_415159 spike protein (1-1211)(A972C_R995C) Foldon construct
MFVFLVLLPLVSSQCVNLTTRTQLPPAYTNSFTRGVYYPDKVFRSSVLHSTQDLFLPFFSNVTWFHAIHVSGTNGTKRFDNPVLPFNDGVYFASTEKSNIIRGWIFGTTLDSKTQSLLIVNNATNVVIKVCEFQFCNDPFLGVYYHKNNKSWMESEFRVYSSANNCTFEYVSQPFLMDLEGKQGNFKNLREFVFKNIDGYFKIYSKHTPINLVRDLPQGFSALEPLVDLPIGINITRFQTLLALHRSYLTPGDSSSGWTAGAAAYYVGYLQPRTFLLKYNENGTITDAVDCALDPLSETKCTLKSFTVEKGIYQTSNFRVQPTESIVRFPNITNLCPFGEVFNATRFASVYAWNRKRISNCVADYSVLYNSASFSTFKCYGVSPTKLNDLCFTNVYADSFVIRGDEVRQIAPGQTGKIADYNYKLPDDFTGCVIAWNSNNLDSKVGGNYNYLYRLFRRSNLKPFERDISTEIYQAGSTPCNGVEGFNCYFPLQSYGFQPTNGVGYQPYRVVVLSFELLPAPATVCGPKKSTNLVKNKCVNFNFNGLTGTGVLTESNKKFLPFQQFGRDIADTTDAVRDPQTLEILDITPCSFGGVSVITPGTNTSNQVAVLYQGVNCTEVPVAIHADQLTPTWRVYSTGSNVFQTRAGCLIGAEHVNNSYECDIPIGAGICASYQTQTNSPRRARSVASQSIIAYTMSLGAENSVAYSNNSIAIPTNFTISVTTEILPVSMTKTSVDCTMYICGDSTECSNLLLQYGSFCTQLNRALTGIAVEQDKNTQEVFAQVKQIYKTPPIKDFGGFNFSQILPDPSKPSKRSFIEDLLFNKVTLADAGFIKQYGDCLGDIAARDLICAQKFNGLTVLPPLLTDEMIAQYTSALLAGTITSGWTFGAGAALQIPFAMQMAYRFNGIGVTQNVLYENQKLIANQFNSAIGKIQDSLSSAAPALGKLQDVVNQNAQALNTLVKQLSSNFGCISSVLNDILSRLDKVEAEVQIDCLITGRLQSLQTYVTQQLIRAAEIRASANLAATKMSECVLGQSKRVDFCGKGYHLMSFPQSAPHGVVFLHVTYVPAQEKNFTTAPAICHDGKAHFPREGVFVSNGTHWFVTQRNFYEPQIITTDNTFVSGNCDVVIGIVNNTVYDPLQPELDSFKEELDKYFKNHTSPDVDLGDISGINASVVNIQKEIDRLNEVAKNLNESLIDLQELGKYEQYIKGGSGYIPEAPRDGQAYVRKDGEWVLLSTFL

SEQ ID NO: 6461 - protein, 1241 aa, Artificial Sequence
  SARS-CoV-2/USA/WA8-UW5/2020__EPI_ISL_413486 spike protein (1-1211)(A972C_R995C) Foldon construct
MFVFLVLLPLVSSQCVNLTTRTQLPPAYTNSFTRGVYYPDKVFRSSVLHSTQDLFLPFFSNVTWFHAIHVSGTNGTKRFDNPVLPFNDGVYFASTEKSNIIRGWIFGTTLDSKTQSLLIVNNATNVVIKVCEFQFCNDPFLGVYYHKNNKSWMESEFRVYSSANNCTFEYVSQPFLMDLEGKQGNFKNLREFVFKNIDGYFKIYSKHTPINLVRDLPQGFSALEPLVDLPIGINITRFQTLLALHRSYLTPGDSSSGWTAGAAAYYVGYLQPRTFLLKYNENGTITDAVDCALDPLSETKCTLKSFTVEKGIYQTSNFRVQPTESIVRFPNITNLCPFGEVFNATRFASVYAWNRKRISNCVADYSVLYNSASFSTFKCYGVSPTKLNDLCFTNVYADSFVIRGDEVRQIAPGQTGKIADYNYKLPDDFTGCVIAWNSNNLDSKVGGNYNYLYRLFRKSNLKPFERDISTEIYQAGSTPCNGVEGFNCYFPLQSYGFQPTNGVGYQPYRVVVLSFELLHAPATVCGPKKSTNLVKNKCVNFNFNGLTGTGVLTESNKKFLPFQQFGRDIADTTDAVRDPQTLEILDITPCSFGGVSVITPGTNTSNQVAVLYQDVNCTEVPVAIHADQLTPTWRVYSTGSNVFQTRAGCLIGAEYVNNSYECDIPIGAGICASYQTQTNSPRRARSVASQSIIAYTMSLGAENSVAYSNNSIAIPTNFTISVTTEILPVSMTKTSVDCTMYICGDSTECSNLLLQYGSFCTQLNRALTGIAVEQDKNTQEVFAQVKQIYKTPPIKDFGGFNFSQILPDPSKPSKRSFIEDLLFNKVTLADAGFIKQYGDCLGDIAARDLICAQKFNGLTVLPPLLTDEMIAQYTSALLAGTITSGWTFGAGAALQIPFAMQMAYRFNGIGVTQNVLYENQKLIANQFNSAIGKIQDSLSSTASALGKLQDVVNQNAQALNTLVKQLSSNFGCISSVLNDILSRLDKVEAEVQIDCLITGRLQSLQTYVTQQLIRAAEIRASANLAATKMSECVLGQSKRVDFCGKGYHLMSFPQSAPHGVVFLHVTYVPAQEKNFTTAPAICHDGKAHFPREGVFVSNGTHWFVTQRNFYEPQIITTDNTFVSGNCDVVIGIVNNTVYDPLQPELDSFKEELDKYFKNHTSPDVDLGDISGINASVVNIQKEIDRLNEVAKNLNESLIDLQELGKYEQYIKGGSGYIPEAPRDGQAYVRKDGEWVLLSTFL

SEQ ID NO: 6462 - protein, 1241 aa, Artificial Sequence
  SARS-CoV-2/England/20102000506/2020__EPI_ISL_415147 spike protein (1-1211)(A972C_R995C) Foldon construct
MFVFLVLLPLVSSQCVNLTTRTQLPPAYTNSFTRGVYYPDKVFRSSVLHSTQDLFLPFFSNVTWFHAIHVSGTNGTKRFDNPVLPFNDGVYFASTEKSNIIRGWIFGTTLDSKTQSLLIVNNATNVVIKVCEFQFCNDPFLGVYYHKNNKSWMESEFRVYSSANNCTFEYVSQPFLMDLEGKQGNFKNLREFVFKNIDGYFKIYSKHTPINLVRDLPQGFSALEPLVDLPIGINITRFQTLLALHRSYLTPGDSSSGWTAGAAAYYVGYLQPRTFLLKYNENGTITDAVDCALDPLSETKCTLKSFTVEKGIYQTSNFRVQPTESIVRFPNITNLCPFGEVFNATRFASVYAWNRKRISNCVADYSVLYNSASFSTFKCYGVSPTKLNDLCFTNVYADSFVIRGDEVRQIAPGQTGKIADYNYKLPDDFTGCVIAWNSNNLDSKVGGNYNYLYRLFRKSNLKPFERDISTEIYQAGSTPCNGVEGFNCYFPLQSYGFQPTNGVGYQPYRVVVLSFELLHAPATVCGPKKSTNLVKNKCVNFNFNGLTGTGVLTESNKKFLPFQQFGRDIADTTDAVRDPQTLEILDITPCSFGGVSVITPGTNTSNQVAVLYQGVNCTEVPVAIHADQLTPTWRVYSTGSNVFQTRAGCLIGAEHVNNSYECDIPIGAGICASYQTQTNSPRRARSVASQSIIAYTMSLGAENSVAYSNNSIAIPTNFTISVTTEILPVSMTKTSVDCTMYICGDSTECSNLLLQYGSFCTQLNRALTGIAVEQDKNTQEVFAQVKQIYKTPPIKDFGGFNFSQILPDPSKPSKRSFIEDLLFNKVTLADAGFIKQYGYCLGDIAARDLICAQKFNGLTVLPPLLTDEMIAQYTSALLAGTITSGWTFGAGAALQIPFAMQMAYRFNGIGVTQNVLYENQKLIANQFNSAIGKIQDSLSSTASALGKLQDVVNQNAQALNTLVKQLSSNFGCISSVLNDILSRLDKVEAEVQIDCLITGRLQSLQTYVTQQLIRAAEIRASANLAATKMSECVLGQSKRVDFCGKGYHLMSFPQSAPHGVVFLHVTYVPAQEKNFTTAPAICHDGKAHFPREGVFVSNGTHWFVTQRNFYEPQIITTDNTFVSGNCDVVIGIVNNTVYDPLQPELDSFKEELDKYFKNHTSPDVDLGDISGINASVVNIQKEIDRLNEVAKNLNESLIDLQELGKYEQYIKGGSGYIPEAPRDGQAYVRKDGEWVLLSTFL

SEQ ID NO: 6463 - protein, 1241 aa, Artificial Sequence
  SARS-CoV-2/Belgium/VAG-03013/2020__EPI_ISL_415155 spike protein (1-1211)(A972C_R995C) Foldon construct
MFVFLVLLPLVSSQCVNLTTRTQLPPAYTNSFTRGVYYPDKVFRSSVLHSTQDLFLPFFSNVTWFHAIHVSGTNGTKRFDNPVLPFNDGVYFASTEKSNIIRGWIFGTTLDSKTQSLLIVNNATNVVIKVCEFQFCNDPFLGVYYHKNNKSWMESEFRVYSSANNCTFEYVSQPFLMDLEGKQGNFKNLREFVFKNIDGYFKIYSKHTPINLVRDLPQGFSALEPLVDLPIGINITRFQTLLALHRSYLTPGDSSSGWTAGAAAYYVGYLQPRTFLLKYNENGTITDAVDCALDPLSETKCTLKSFTVEKGIYQTSNFRVQPTESIVRFPNITNLCPFGEVFNATRFASVYAWNRKRISNCVADYSVLYNSASFSTFKCYGVSPTKLNDLCFTNVYADSFVIRGDEVRQIAPGQTGKIADYNYKLPDDFTGCVIAWNSNNLDSKVGGNYNYLYRLFRKSNLKPFERDISTEIYQAGSTPCNGVEGFNCYFPLQSYGFQPTNGVGYQPYRVVVLSFELLHAPATVCGPKKSTNLVKNKCVNFNFNGLTGTGVLTESNKKFLPFQQFGRDIADTTDAVRDPQTLEILDITPCSFGGVSVITPGTNTSNQVAVLYQGVNCTEVPVAIHADQLTPTWRVYSTGSNVFQTRAGCLIGAEHVNNSYECDIPIGAGICASYQTQTNSPRRARSVASQSIIAYTMSLGAENSVAYSNNSIAIPTNFTISVTTEILPVSMTKTSVDCTMYICGDSTECSNLLLQYGSFCTQLNRALTGIAVEQDKNTQEVFAQVKQIYKTPPIKDFGGFNFSQILPDPSKPSKRSFIEDLLFNKVTLADAGFIKQYGDCLGDIAARDLICAQKFNGLTVLPPLLTDEMIAQYTSALLAGTITSGWTFGAGAALQIPFAMQMAYRFNGIGVTQNVLYENQKLIANQFNSAIGKIQDSLSSTATALGKLQDVVNQNAQALNTLVKQLSSNFGCISSVLNDILSRLDKVEAEVQIDCLITGRLQSLQTYVTQQLIRAAEIRASANLAATKMSECVLGQSKRVDFCGKGYHLMSFPQSAPHGVVFLHVTYVPAQEKNFTTAPAICHDGKAHFPREGVFVSNGTHWFVTQRNFYEPQIITTDNTFVSGNCDVVIGIVNNTVYDPLQPELDSFKEELDKYFKNHTSPDVDLGDISGINASVVNIQKEIDRLNEVAKNLNESLIDLQELGKYEQYIKGGSGYIPEAPRDGQAYVRKDGEWVLLSTFL

SEQ ID NO: 6464 - protein, 1241 aa, Artificial Sequence
  SARS-CoV-2/Belgium/BC-03016/2020__EPI_ISL_415157 spike protein (1-1211)(A972C_R995C) Foldon construct
MFVFLVLLPLVSSQCVNLTTRTQLPPAYTNSFTRGVYYPDKVFRSSVLHSTQDLFLPFFSNVTWFHAIHVSGTNGTKRFDNPVLPFNDGVYFASTEKSNIIRGWIFGTTLDSKTQSLLIVNNATNVVIKVCEFQFCNDPFLGVYYHKNNKSWMESEFRVYSSANNCTFEYVSQPFLMDLEGKQGNFKNLREFVFKNIDGYFKIYSKHTPINLVRDLPQGFSALEPLVDLPIGINITRFQTLLALHRSYLTPGDSSSGWTAGAAAYYVGYLQPRTFLLKYNENGTITDAVDCALDPLSETKCTLKSFTVEKGIYQTSNFRVQPTESIVRFPNITNLCPFGEVFNATRFASVYAWNRKRISNCVADYSVLYNSASFSTFKCYGVSPTKLNDLCFTNVYADSFVIRGDEVRQIAPGQTGKIADYNYKLPDDFTGCVIAWNSNNLDSKVGGNYNYLYRLFRKSNLKPFERDISTEIYQAGSTPCNGVEGFNCYFPLQSYGFQPTNGVGYQPYRVVVLSFELLHAPATVCGPKKSTNLVKNKCVNFNFNGLTGTGVLTESNKKFLPFQQFGRDIADTTDAVRDPQTLEILDITPCSFGGVSVITPGTNTSNQVAVLYQGVNCTEVPVAIHADQLTPTWRVYSTGSNVFQTRAGCLIGAEHVNNSYECDIPIGAGICASYQTQTNSPRRARSVASQSIIAYTMSLGAENSVAYSNNSIAIPTNFTISVTTEILPVSMTKTSVDCTMYICGDSTECSNLLLQYGSFCTQLNRALTGIAVEQDKNTQEVFAQVKQIYKTPPIKDFGGFNFSQILPDPSKPSKRSFIEDLLFNKVTLADAGFIKQYGDCLGDIAARDLICAQKFNGLTVLPPLLTDEMIAQYTSALLAGTITSGWTFGAGAALQIPFAMQMAYRFNGIGVTQNVLYENQKLIANQFNSAIGKIQDSLSSTAPALGKLQDVVNQNAQALNTLVKQLSSNFGCISSVLNDILSRLDKVEAEVQIDCLITGRLQSLQTYVTQQLIRAAEIRASANLAATKMSECVLGQSKRVDFCGKGYHLMSFPQSAPHGVVFLHVTYVPAQEKNFTTAPAICHDGKAHFPREGVFVSNGTHWFVTQRNFYEPQIITTDNTFVSGNCDVVIGIVNNTVYDPLQPELDSFKEELDKYFKNHTSPDVDLGDISGINASVVNIQKEIDRLNEVAKNLNESLIDLQELGKYEQYIKGGSGYIPEAPRDGQAYVRKDGEWVLLSTFL

SEQ ID NO: 6465 - protein, 1241 aa, Artificial Sequence
  SARS-CoV-2/Germany/BavPat3/2020__EPI_ISL_414521 spike protein (1-1211)(A972C_R995C) Foldon construct
MFVFLVLLPLVSSQCVNLTTRTQLPPAYTNSFTRGVYYPDKVFRSSVLHSTQDLFLPFFSNVTWFHAIHVSGTNGTKRFDNPVLPFNDGVYFASTEKSNIIRGWIFGTTLDSKTQSLLIVNNATNVVIKVCEFQFCNDPFLGVYYHKNNKSWMESEFRVYSSANNCTFEYVSQPFLMDLEGKQGNFKNLREFVFKNIDGYFKIYSKHTPINLVRDLPQGFSALEPLVDLPIGINITRFQTLLALHRSYLTPGDSSSGWTAGAAAYYVGYLQPRTFLLKYNENGTITDAVDCALDPLSETKCTLKSFTVEKGIYQTSNFRVQPTESIVRFPNITNLCPFGEVFNATRFASVYAWNRKRISNCVADYSVLYNSASFSTFKCYGVSPTKLNDLCFTNVYADSFVIRGDEVRQIAPGQTGKIADYNYKLPDDFTGCVIAWNSNNLDSKVGGNYNYLYRLFRKSNLKPFERDISTEIYQAGSTPCNGVEGFNCYFPLQSYGFQPTNGVGYQPYRVVVLSFELLHAPATVCGPKKSTNLVKNKCVNFNFNGLTGTGVLTESNKKFLPFQQFGRDIADTTDAVRDPQTLEILDITPCSFGGVSVITPGTNTSNQVAVLYQDVNCTEVPVAIHADQLTPTWRVYSTGSNVFQTRAGCLIGAEHVNNSYECDIPIGAGICASYQTQTNSPRRARSVASQSIIAYTMSLGAENSVAYSNNSIAIPTNFTISVTTEILPVSMTKTSVDCTMYICGDSTECSNLLLQYGSFCTQLNRALTGIAVEQDKNTQQVFAQVKQIYKTPPIKDFGGFNFSQILPDPSKPSKRSFIEDLLFNKVTLADAGFIKQYGDCLGDIAARDLICAQKFNGLTVLPPLLTDEMIAQYTSALLAGTITSGWTFGAGAALQIPFAMQMAYRFNGIGVTQNVLYENQKLIANQFNSAIGKIQDSLSSTASALGKLQDVVNQNAQALNTLVKQLSSNFGCISSVLNDILSRLDKVEAEVQIDCLITGRLQSLQTYVTQQLIRAAEIRASANLAATKMSECVLGQSKRVDFCGKGYHLMSFPQSAPHGVVFLHVTYVPAQEKNFTTAPAICHDGKAHFPREGVFVSNGTHWFVTQRNFYEPQIITTDNTFVSGNCDVVIGIVNNTVYDPLQPELDSFKEELDKYFKNHTSPDVDLGDISGINASVVNIQKEIDRLNEVAKNLNESLIDLQELGKYEQYIKGGSGYIPEAPRDGQAYVRKDGEWVLLSTFL

SEQ ID NO: 6466 - protein, 1241 aa, Artificial Sequence
  SARS-CoV-2/France/HF1805/2020__EPI_ISL_414628 spike protein (1-1211)(A972C_R995C) Foldon construct
MFVFLVLLPLVSSQCVNLTTRTQLPPAYTNSFTRGVYYPDKVFRSSVLHSTQDLFLPFFSNVTWFHAIHVSGTNGTKRFDNPVLPFNDGVYFASTEKSNIIRGWIFGTTLDSKTQSLLIVNNATNVVIKVCEFQFCNDPFLGVYYHKNNKSWMESEFRVYSSANNCTFEYVSQPFLMDLEGKQGNFKNLREFVFKNIDGYFKIYSKHTPINLVRDLPQGFSALEPLVDLPIGINITRFQTLLALHRSYLTPGDSSSGWTAGAAAYYVGYLQPRTFLLKYNENGTITDAVDCALDPLSETKCTLKSFTVEKGIYQTSNFRVQPTESIVRFPNITNLCPFGEVFNATRFASVYAWNRKRISNCVADYSVLYNSASFSTFKCYGVSPTKLNDLCFTNVYADSFVIRGDEVRQIAPGQTGKIADYNYKLPDDFTGCVIAWNSNNLDSKVGGNYNYLYRLFRKSNLKPFERDISTEIYQAGSTPCNGVEGFNCYFPLQSYGFQPTNGVGYQPYRVVVLSFELLHAPATVCGPKKSTNLVKNKCVNFNFNGLTGTGVLTESNKKFLPFQQFGRDIADTTDAVRDPQTLEILDITPCSFGGVSVITPGTNTSNQVAVLYQGVNCTEVPVAIHADQLTPTWRVYSTGSNVFQTRAGCLIGAEHVNNSYECDIPIGAGICASYQTQTNSPRRARSVASQSIIAYTMSLGAENSVAYSNNSIAIPTNFTISVTTEILPVSMTKTSVDCTMYICGDSTECSNLLLQYGSFCTQLNRALTGIAVEQDKNTQEVFAQVKQIYKTPPIKDFGGFNFSQILPDPSKPSKRSFIEDLLFNKVTLADAGFIKQYGDCLGDIAARDLICAQKFNGLTVLPPLLTDEMIAQYTSALLAGTITSGWTFGAGAALQIPFAMQMAYRFNGIGVTQNVLYENQKLIANQFNSAIGKIQDSLSSTASALGKLQDVVNQNAQALNTLVKQLSSNFGCISSVLNDILSRLDKVEAEVQIDCLITGRLQSLQTYVTQQLIRAAEIRASANLAATKMSECVLGQSKRVDFCGKGYHLMSFPQSAPHGVVFLHVTYVPAQEKNFTTAPAICHDGKAHFPREGVFVSNGTHWFVTQRNFYEPQIITTDNTFVSGNCDVVIGVVNNTVYDPLQPELDSFKEELDKYFKNHTSPDVDLGDISGINASVVNIQKEIDRLNEVAKNLNESLIDLQELGKYEQYIKGGSGYIPEAPRDGQAYVRKDGEWVLLSTFL

SEQ ID NO: 6467 - protein, 1241 aa, Artificial Sequence
  SARS-CoV-2/Netherlands/ZuidHolland_9/2020__EPI_ISL_414445 spike protein (1-1211)(A972C_R995C) Foldon construct
MFVFLVLLPLVSSQCVNLTTRTQLPPAYTNSFTRGVYYPDKVFRSSVLHSTQDLFLPFFSNVTWFHAIHVSGTNGTKRFDNPVLPFNDGVYFASTEKSNIIRGWIFGTTLDSKTQSLLIVNNATNVVIKVCEFQFCNDPFLGVYYHKNNKSWMESEFRVYSSANNCTFEYVSQPFLMDLEGKQGNFKNLREFVFKNIDGYFKIYSKHTPINLVRDLPQGFSALEPLVDLPIGINITRFQTLLALHRSYLTPGDSSSGWTAGAAAYYVGYLQPRTFLLKYNENGTITDAVDCALDPLSETKCTLKSFTVEKGIYQTSNFRVQPTESIVRFPNITNLCPFGEVFNATRFASVYAWNRKRISNCVADYSVLYNSASFSTFKCYGVSPTKLNDLCFTNVYADSFVIRGDEVRQIAPGQTGKIADYNYKLPDDFTGCVIAWNSNNLDSKVGGNYNYLYRLFRKSNLKPFERDISTEIYQAGSTPCNGVEGFNCYFPLQSYGFQPTNGVGYQPYRVVVLSFELLHAPATVCGPKKSTNLVKNKCVNFNFNGLTGTGVLTESNKKFLPFQQFGRDIADTTDAVRDPQTLEILDITPCSFGGVSVITPGTNTSNQVAVLYQGVNCTEVPVAIHADQLTPTWRVYSTGSNVFQTRAGCLIGAEHVNNSYECDIPIGAGICASYQTQTNSPRRARSVASQSIIAYTMSLGAENSVAYSNNSIAIPTNFTISVTTEILPVSMTKTSVDCTMYICGDSTECSNLLLQYGSFCTQLNRALTGIAVEQDKNTQEVFAQVKQIYKTPPIKDFGGFNFSQILPDPSKPSKRSFIEDLLFNKVTLADAGFIKQYGDCLGDIAARDLICVQKFNGLTVLPPLLTDEMIAQYTSALLAGTITSGWTFGAGAALQIPFAMQMAYRFNGIGVTQNVLYENQKLIANQFNSAIGKIQDSLSSTASALGKLQDVVNQNAQALNTLVKQLSSNFGCISSVLNDILSRLDKVEAEVQIDCLITGRLQSLQTYVTQQLIRAAEIRASANLAATKMSECVLGQSKRVDFCGKGYHLMSFPQSAPHGVVFLHVTYVPAQEKNFTTAPAICHDGKAHFPREGVFVSNGTHWFVTQRNFYEPQIITTDNTFVSGNCDVVIGIVNNTVYDPLQPELDSFKEELDKYFKNHTSPDVDLGDISGINASVVNIQKEIDRLNEVAKNLNESLIDLQELGKYEQYIKGGSGYIPEAPRDGQAYVRKDGEWVLLSTFL

SEQ ID NO: 6468 - protein, 1241 aa, Artificial Sequence
  SARS-CoV-2/Finland/FIN03032020A/2020__EPI_ISL_413602 spike protein (1-1211)(A972C_R995C) Foldon construct
MFVFLVLLPLVSSQCVNLTTRTQLPPAYTNSFTRGVYYPDKVFRSSVLHSTQDLFLPFFSNVTWFHAIHVSGTNGTKRFDNPVLPFNDGVYFASTEKSNIIRGWIFGTTLDSKTQSLLIVNNATNVVIKVCEFQFCNDPFLGVYYHKNNKSWMESEFRVYSSANNCTFEYVSQPFLMDLEGKQGNFKNLREFVFKNIDGYFKIYSKHTPINLVRDLPQGFSALEPLVDLPIGINITRFQTLLALHRSYLTPGDSSSGWTAGAAAYYVGYLQPRTFLLKYNENGTITDAVDCALDPLSETKCTLKSFTVEKGIYQTSNFRVQPTESIVRFPNITNLCPFGEVFNATRFASVYAWNRKRISNCVADYSVLYNSASFSTFKCYGVSPTKLNDLCFTNVYADSFVIRGDEVRQIAPGQTGKIADYNYKLPDDFTGCVISWNSNNLDSKVGGNYNYLYRLFRKSNLKPFERDISTEIYQAGSTPCNGVEGFNCYFPLQSYGFQPTNGVGYQPYRVVVLSFELLHAPATVCGPKKSTNLVKNKCVNFNFNGLTGTGVLTESNKKFLPFQQFGRDIADTTDAVRDPQTLEILDITPCSFGGVSVITPGTNTSNQVAVLYQGVNCTEVPVAIHADQLTPTWRVYSTGSNVFQTRAGCLIGAEHVNNSYECDIPIGAGICASYQTQTNSPRRARSVASQSIIAYTMSLGAENSVAYSNNSIAIPTNFTISVTTEILPVSMTKTSVDCTMYICGDSTECSNLLLQYGSFCTQLNRALTGIAVEQDKNTQEVFAQVKQIYKTPPIKDFGGFNFSQILPDPSKPSKRSFIEDLLFNKVTLADAGFIKQYGDCLGDIAARDLICAQKFNGLTVLPPLLTDEMIAQYTSALLAGTITSGWTFGAGAALQIPFAMQMAYRFNGIGVTQNVLYENQKLIANQFNSAIGKIQDSLSSTASALGKLQDVVNQNAQALNTLVKQLSSNFGCISSVLNDILSRLDKVEAEVQIDCLITGRLQSLQTYVTQQLIRAAEIRASANLAATKMSECVLGQSKRVDFCGKGYHLMSFPQSAPHGVVFLHVTYVPAQEKNFTTAPAICHDGKAHFPREGVFVSNGTHWFVTQRNFYEPQIITTDNTFVSGNCDVVIGIVNNTVYDPLQPELDSFKEELDKYFKNHTSPDVDLGDISGINASVVNIQKEIDRLNEVAKNLNESLIDLQELGKYEQYIKGGSGYIPEAPRDGQAYVRKDGEWVLLSTFL

SEQ ID NO: 6469 - protein, 1241 aa, Artificial Sequence
  SARS-CoV-2/France/GE1977/2020__EPI_ISL_414632 spike protein (1-1211)(A972C_R995C) Foldon construct
MFVFLVLLPLVSSQCVNLTTRTQLPPAYTNSFTRGVYYPDKVFRSSVLHSTQDLFLPFFSNVTWFHAIHVSGTNGTKRFDNPVLPFNDGVYFASTEKSNIIRGWIFGTTLDSKTQSLLIVNNATNVVIKVCEFQFCNDPFLGVYYHKNNKSWMESEFRVYSSANNCTFEYVSQPFLMDLEGKQGNFKNLREFVFKNIDGYFKIYSKHTPINLVRDLPQGFSALEPLVDLPIGINITRFQTLLALHRSYLTPGDSSSGWTAGAAAYYVGYLQPRTFLLKYNENGTITDAVDCALDPLSETKCTLKSFTVEKGIYQTSNFRVQPTESIVRFPNITNLCPFGEVFNATRFASVYAWNRKRISNCVADYSVLYNSASFSTFKCYGVSPTKLNDLCFTNVYADSFVIRGDEVRQIAPGQTGKIADYNYKLPDDFTGCVIAWNSNNLDSKVGGNYNYLYRLFRKSNLKPFERDISTEIYQAGSTPCNGVEGFNCYFPLQSYGFQPTNGVGYQPYRVVVLSFELLHAPATVCGPKKSTNLVKNKCVNFNFNGLTGTGVLTESNKKFLPFQQFGRDIADTTDAVRDPQTLEILDITPCSFGGVSVITPGTNTSNQVAVLYQGVNCTEVPVAIHADQLTPTWRVYSTGSNVFQTRAGCLIGAEHVNNSYECDIPIGAGICASYQTQTNSPRRARSVASQSIIAYTMSLGAENSVAYSNNSIAIPTNFTISVTTEILPVSMTKTSVDCTMYICGDSTECSNLLLQYGSFCTQLNRALTGIAVEQDKNTQEVFAQVKQIYKTPPIKDFGGFNFSQILPDPSKPSKRSFIEDLLFNKVTLADAGFIKQYGDCLGDIAARDLICAQKFNGLTVLPPLLTDEMIAQYTSALLAGTITSGWTFGAGAALQIPFAMQMAYRFNGIGVTQNVLYENQKLIANQFNSAIGKIQDSLFSTASALGKLQDVVNQNAQALNTLVKQLSSNFGCISSVLNDILSRLDKVEAEVQIDCLITGRLQSLQTYVTQQLIRAAEIRASANLAATKMSECVLGQSKRVDFCGKGYHLMSFPQSAPHGVVFLHVTYVPAQEKNFTTAPAICHDGKAHFPREGVFVSNGTHWFVTQRNFYEPQIITTDNTFVSGNCDVVIGIVNNTVYDPLQPELDSFKEELDKYFKNHTSPDVDLGDISGINASVVNIQKEIDRLNEVAKNLNESLIDLQELGKYEQYIKGGSGYIPEAPRDGQAYVRKDGEWVLLSTFL

SEQ ID NO: 6470 - protein, 1241 aa, Artificial Sequence
  SARS-CoV-2/Finland/FIN-313/2020__EPI_ISL_414641 spike protein (1-1211)(A972C_R995C) Foldon construct
MFVFLVLLPLVSSQCVNLTTRTQLPPAYTNSFTRGVYYPDKVFRSSVLHSTQDLFLPFFSNVTWFHAIHVSGTNGTKRFDNPVLPFNDGVYFASTEKSNIIRGWIFGTTLDSKTQSLLIVNNATNVVIKVCEFQFCNDPFLGVYYHKNNKSWMESEFRVYSSANNCTFEYVSQPFLMDLEGKQGNFKNLREFVFKNIDGYFKIYSKHTPINLVRDLPQGFSALEPLVDLPIGINITRFKTLLALHRSYLTPGDSSSGWTAGAAAYYVGYLQPRTFLLKYNENGTITDAVDCALDPLSETKCTLKSFTVEKGIYQTSNFRVQPTESIVRFPNITNLCPFGEVFNATRFASVYAWNRKRISNCVADYSVLYNSASFSTFKCYGVSPTKLNDLCFTNVYADSFVIRGDEVRQIAPGQTGKIADYNYKLPDDFTGCVIAWNSNNLDSKVGGNYNYLYRLFRKSNLKPFERDISTEIYQAGSTPCNGVEGFNCYFPLQSYGFQPTNGVGYQPYRVVVLSFELLHAPATVCGPKKSTNLVKNKCVNFNFNGLTGTGVLTESNKKFLPFQQFGRDIADTTDAVRDPQTLEILDITPCSFGGVSVITPGTNTSNQVAVLYQGVNCTEVPVAIHADQLTPTWRVYSTGSNVFQTRAGCLIGAEHVNNSYECDIPIGAGICASYQTQTNSPRRARSVASQSIIAYTMSLGAENSVAYSNNSIAIPTNFTISVTTEILPVSMTKTSVDCTMYICGDSTECSNLLLQYGSFCTQLNRALTGIAVEQDKNTQEVFAQVKQIYKTPPIKDFGGFNFSQILPDPSKPSKRSFIEDLLFNKVTLADAGFIKQYGDCLGDIAARDLICAQKFNGLTVLPPLLTDEMIAQYTSALLAGTITSGWTFGAGAALQIPFAMQMAYRFNGIGVTQNVLYENQKLIANQFNSAIGKIQDSLSSTASALGKLQDVVNQNAQALNTLVKQLSSNFGCISSVLNDILSRLDKVEAEVQIDCLITGRLQSLQTYVTQQLIRAAEIRASANLAATKMSECVLGQSKRVDFCGKGYHLMSFPQSAPHGVVFLHVTYVPAQEKNFTTAPAICHDGKAHFPREGVFVSNGTHWFVTQRNFYEPQIITTDNTFVSGNCDVVIGIVNNTVYDPLQPELDSFKEELDKYFKNHTSPDVDLGDISGINASVVNIQKEIDRLNEVAKNLNESLIDLQELGKYEQYIKGGSGYIPEAPRDGQAYVRKDGEWVLLSTFL

SEQ ID NO: 6471 - protein, 1241 aa, Artificial Sequence
  SARS-CoV-2/Netherlands/ZuidHolland_2/2020__EPI_ISL_414556 spike protein (1-1211)(A972C_R995C) Foldon construct
MFVFLVLLPLVSSQCVNLTTRTQLPPAYTNSFTRGVYYPDKVFRSSVLHSTQDLFLPFFSNVTWFHAIHVSGTNGTKRFDNPVLPFNDGVYFASTEKSNIIRGWIFGTTLDSKTQSLLIVNNATNVVIKVCEFQFCNDPFLGVYYHKNNKSWMESEFRVYSSANNCTFEYVSQPFLMDLEGKQGNFKNLREFVFKNIDGYFKIYSKHTPINLVRDLPQGFSALEPLVDLPIGINITRFQTLLALHRSYLTPGDSSSGWTAGAAAYYVGYLQPRTFLLKYNENGTITDAVDCALDPLSETKCTLKSFTVEKGIYQTSNFRVQPTESIVRFPNITNLCPFGEVFNATRFASVYAWNRKRISNCVADYSVLYNSASFSTFKCYGVSPTKLNDLCFTNVYADSFVIRGDEVRQIAPGQTGKIADYNYKLPDDFTGCVIAWNSNNLDSKVGGNYNYLYRLFRKSNLKPFERDISTEIYQAGSTPCNGVEGFNCYFPLQSYGFQPTNGVGYQPYRVVVLSFELLHAPATVCGPKKSTNLVKNKCVNFNFNGLTGTGVLTESNKKFLPFQQFGRDIADTTDAVRDPQTLEILDITPCSFGGVSVITPGTNTSNQVAVLYQGVNCTEVPVAIHADQLTPTWRVYSTGSNVFQTRAGCLIGAEHVNNSYECDIPIGAGICASYQTQTNSPRRARSVASQSIIAYTMSLGAENSVAYSNNSIAIPTNFTISVTTEILPVSMTKTSVDCTMYICGDSTECSNLLLQYGSFCTQLNRALTGIALEQDKNTQEVFAQVKQIYKTPPIKDFGGFNFSQILPDPSKPSKRSFIEDLLFNKVTLADAGFIKQYGDCLGDIAARDLICAQKFNGLTVLPPLLTDEMIAQYTSALLAGTITSGWTFGAGAALQIPFAMQMAYRFNGIGVTQNVLYENQKLIANQFNSAIGKIQDSLSSTASALGKLQDVVNQNAQALNTLVKQLSSNFGCISSVLNDILSRLDKVEAEVQIDCLITGRLQSLQTYVTQQLIRAAEIRASANLAATKMSECVLGQSKRVDFCGKGYHLMSFPQSAPHGVVFLHVTYVPAQEKNFTTAPAICHDGKAHFPREGVFVSNGTHWFVTQRNFYEPQIITTDNTFVSGNCDVVIGIVNNTVYDPLQPELDSFKEELDKYFKNHTSPDVDLGDISGINASVVNIQKEIDRLNEVAKNLNESLIDLQELGKYEQYIKGGSGYIPEAPRDGQAYVRKDGEWVLLSTFL

SEQ ID NO: 6472 - protein, 1241 aa, Artificial Sequence
  SARS-CoV-2/USA/WA-UW31/2020__EPI_ISL_414618 spike protein (1-1211)(A972C_R995C) Foldon construct
MFVFLVLLPLVSSQCVNLTTRTQLPPAYTNSFTRGVYYPDKVFRSSVLHSTQDLFLPFFSNVTWFHAIHVSGTNGTKRFDNPVLPFNDGVYFASTEKSNIIRGWIFGTTLDSKTQSLLIVNNATNVVIKVCEFQFCNDPFLGVYYHKNNKSWMESEFRVYSSANNCTFEYVSQPFLMDLEGKQGNFKNLREFVFKNIDGYFKIYSKHTPINLVRDLPQGFSALEPLVDLPIGINITRFQTLLALHRSYLTPGDSSSGWTAGAAAYYVGYLQPRTFLLKYNENGTITDAVDCALDPLSETKCTLKSFTVEKGIYQTSNFRVQPTESIVRFPNITNLCPFGEVFNATRFASVYAWNRKRISNCVADYSVLYNSASFSTFKCYGVSPTKLNDLCFTNVYADSFVIRGDEVRQIAPGQTGKIADYNYKLPDDFTGCVIAWNSNNLDSKVGGNYNYLYRLFRKSNLKPFERDISTEIYQAGSTPCNGAEGFNCYFPLQSYGFQPTNGVGYQPYRVVVLSFELLHAPATVCGPKKSTNLVKNKCVNFNFNGLTGTGVLTESNKKFLPFQQFGRDIADTTDAVRDPQTLEILDITPCSFGGVSVITPGTNTSNQVAVLYQDVNCTEVPVAIHADQLTPTWRVYSTGSNVFQTRAGCLIGAEHVNNSYECDIPIGAGICASYQTQTNSPRRARSVASQSIIAYTMSLGAENSVAYSNNSIAIPTNFTISVTTEILPVSMTKTSVDCTMYICGDSTECSNLLLQYGSFCTQLNRALTGIAVEQDKNTQEVFAQVKQIYKTPPIKDFGGFNFSQILPDPSKPSKRSFIEDLLFNKVTLADAGFIKQYGDCLGDIAARDLICAQKFNGLTVLPPLLTDEMIAQYTSALLAGTITSGWTFGAGAALQIPFAMQMAYRFNGIGVTQNVLYENQKLIANQFNSAIGKIQDSLSSTASALGKLQDVVNQNAQALNTLVKQLSSNFGCISSVLNDILSRLDKVEAEVQIDCLITGRLQSLQTYVTQQLIRAAEIRASANLAATKMSECVLGQSKRVDFCGKGYHLMSFPQSAPHGVVFLHVTYVPAQEKNFTTAPAICHDGKAHFPREGVFVSNGTHWFVTQRNFYEPQIITTDNTFVSGNCDVVIGIVNNTVYDPLQPELDSFKEELDKYFKNHTSPDVDLGDISGINASVVNIQKEIDRLNEVAKNLNESLIDLQELGKYEQYIKGGSGYIPEAPRDGQAYVRKDGEWVLLSTFL

SEQ ID NO: 6473 - protein, 1241 aa, Artificial Sequence
  SARS-CoV-2/South Korea/SNU01/2020__EPI_ISL_411929 spike protein (1-1211)(A972C_R995C) Foldon construct
MFVFLVLLPLVSSQCVNLTTRTQLPPAYTNSFTRGVYYPDKVFRSSVLHSTQDLFLPFFSNVTWFHAIHVSGTNGTKRFDNPVLPFNDGVYFASTEKSNIIRGWIFGTTLDSKTQSLLIVNNATNVVIKVCEFQFCNDPFLGVYYHKNNKSWMESEFRVYSSANNCTFEYVSQPFLMDLEGKQGNFKNLREFVFKNIDGYFKIYSKHTPINLVRDLPQGFWALEPLVDLPIGINITRFQTLLALHRSYLTPGDSSSGWTAGAAAYYVGYLQPRTFLLKYNENGTITDAVDCALDPLSETKCTLKSFTVEKGIYQTSNFRVQPTESIVRFPNITNLCPFGEVFNATRFASVYAWNRKRISNCVADYSVLYNSASFSTFKCYGVSPTKLNDLCFTNVYADSFVIRGDEVRQIAPGQTGKIADYNYKLPDDFTGCVIAWNSNNLDSKVGGNYNYLYRLFRKSNLKPFERDISTEIYQAGSTPCNGVEGFNCYFPLQSYGFQPTNGVGYQPYRVVVLSFELLHAPATVCGPKKSTNLVKNKCVNFNFNGLTGTGVLTESNKKFLPFQQFGRDIADTTDAVRDPQTLEILDITPCSFGGVSVITPGTNTSNQVAVLYQDVNCTEVPVAIHADQLTPTWRVYSTGSNVFQTRAGCLIGAEHVNNSYECDIPIGAGICASYQTQTNSPRRARSVASQSIIAYTMSLGAENSVAYSNNSIAIPTNFTISVTTEILPVSMTKTSVDCTMYICGDSTECSNLLLQYGSFCTQLNRALTGIAVEQDKNTQEVFAQVKQIYKTPPIKDFGGFNFSQILPDPSKPSKRSFIEDLLFNKVTLADAGFIKQYGDCLGDIAARDLICAQKFNGLTVLPPLLTDEMIAQYTSALLAGTITSGWTFGAGAALQIPFAMQMAYRFNGIGVTQNVLYENQKLIANQFNSAIGKIQDSLSSTASALGKLQDVVNQNAQALNTLVKQLSSNFGCISSVLNDILSRLDKVEAEVQIDCLITGRLQSLQTYVTQQLIRAAEIRASANLAATKMSECVLGQSKRVDFCGKGYHLMSFPQSAPHGVVFLHVTYVPAQEKNFTTAPAICHDGKAHFPREGVFVSNGTHWFVTQRNFYEPQIITTDNTFVSGNCDVVIGIVNNTVYDPLQPELDSFKEELDKYFKNHTSPDVDLGDISGINASVVNIQKEIDRLNEVAKNLNESLIDLQELGKYEQYIKGGSGYIPEAPRDGQAYVRKDGEWVLLSTFL

SEQ ID NO: 6474 - protein, 1241 aa, Artificial Sequence
  SARS-CoV-2/China/WF0004/2020__EPI_ISL_413694 spike protein (1-1211)(A972C_R995C) Foldon construct
MFVFLVLLPLVSSQCVNLTTRTQLPPAYTNSFTRGVYYPDKVFRSSVLHSTQDLFLPFFSNVTWFHAIHVSGTNGTKRFDNPVLPFNDGVYFASTEKSNIIRGWIFGTTLDSKTQSLLIVNNATNVVIKVCEFQFCNDPFLGVYYHKNNKSWTESEFRVYSSANNCTFEYVSQPFLMDLEGKQGNFKNLREFVFKNIDGYFKIYSKHTPINLVRDLPQGFSALEPLVDLPIGINITRFQTLLALHRSYLTPGDSSSGWTAGAAAYYVGYLQPRTFLLKYNENGTITDAVDCALDPLSETKCTLKSFTVEKGIYQTSNFRVQPTESIVRFPNITNLCPFGEVFNATRFASVYAWNRKRISNCVADYSVLYNSASFSTFKCYGVSPTKLNDLCFTNVYADSFVIRGDEVRQIAPGQTGKIADYNYKLPDDFTGCVIAWNSNNLDSKVGGNYNYLYRLFRKSNLKPFERDISTEIYQAGSTPCNGVEGFNCYFPLQSYGFQPTNGVGYQPYRVVVLSFELLHAPATVCGPKKSTNLVKNKCVNFNFNGLTGTGVLTESNKKFLPFQQFGRDIADTTDAVRDPQTLEILDITPCSFGGVSVITPGTNTSNQVAVLYQDVNCTEVPVAIHADQLTPTWRVYSTGSNVFQTRAGCLIGAEHVNNSYECDIPIGAGICASYQTQTNSPRRARSVASQSIIAYTMSLGAENSVAYSNNSIAIPTNFTISVTTEILPVSMTKTSVDCTMYICGDSTECSNLLLQYGSFCTQLNRALTGIAVEQDKNTQEVFAQVKQIYKTPPIKDFGGFNFSQILPDPSKPSKRSFIEDLLFNKVTLADAGFIKQYGDCLGDIAARDLICAQKFNGLTVLPPLLTDEMIAQYTSALLAGTITSGWTFGAGAALQIPFAMQMAYRFNGIGVTQNVLYENQKLIANQFNSAIGKIQDSLSSTASALGKLQDVVNQNAQALNTLVKQLSSNFGCISSVLNDILSRLDKVEAEVQIDCLITGRLQSLQTYVTQQLIRAAEIRASANLAATKMSECVLGQSKRFDFCGKGYHLMSFPQSAPHGVVFLHVTYVPAQEKNFTTAPAICHDGKAHFPREGVFVSNGTHWFVTQRNFYEPQIITTDNTFVSGNCDVVIGIVNNTVYDPLQPELDSFKEELDKYFKNHTSPDVDLGDISGINASVVNIQKEIDRLNEVAKNLNESLIDLQELGKYEQYIKGGSGYIPEAPRDGQAYVRKDGEWVLLSTFL

SEQ ID NO: 6475 - protein, 1241 aa, Artificial Sequence
  SARS-CoV-2/China/WF0028/2020__EPI_ISL_413791 spike protein (1-1211)(A972C_R995C) Foldon construct
MFVFLVLLPLVSSQCVNLTTRTQLPPAYTNSFTRGVYYPDKVFRSSVLHSTQDLFLPFFSNVTWFHAIHVSGTNGTKRFDNPVLPFNDGVYFASTEKSNIIRGWIFGTTLDSKTQSLLIVNNATNVVIKVCEFQFCNDPFLGVYYHKNNKSWMESEFRVYSSANNCTFEYVSQPFLMDLEGKQGNFKNLREFVFKNIDGYFKIYSKHTPINLVRDLPQGFSALEPLVDLPIGINITRFQTLLALHRSYLTPGDSSSGWTAGAAAYYVGYLQPRTFLLKYNENGTITDAVDCALDPLSETKCTLKSFTVEKGIYQTSNFRVQPTESIVRFPNITNLCPFGEVFNATRFASVYAWNRKRISNCVADYSVLYNSASFSTFKCYGVSPTKLNDLCFTNVYADSFVIRGDEVRQIAPGQTGKIADYNYKLPDDFTGCVIAWNSNNLDSKVGGNYNYLYRLFRKSNLKPFERDISTEIYQAGSTPCNGVEGFNCYFPLQSYGFQPTNGVGYQPYRVVVLSFELLHAPATVCGPKKSTNLVKNKCVNFNFNGLTGTGVLTESNKKFLPFQQFGRDIADTTDAVRDPQTLEILDITPCSFGGVSVITPGTNTSNQVAVLYQDVNCTEVPVAIHADQLTPTWRVYSTGSNVFQTRAGCLIGAEHVNNSYECDIPIGAGICASYQTQTNSPRRARSVASQSIIAYTMSLGAENSVAYSNNSIAIPTNFTISVTTEILPVSMTKTSVDCTMYICGDSTECSNLLLQYGSFCTQLNRALTGIAVEQDKNTQEVFAQVKQIYKTPPIKDFGGFNFSQILPDPSKPSKRSFIEDLLFNKVTLADAGFIKQYGDCLGDIAARDLICAQKFNGLTVLPPLLTDEMIAQYTSALLAGTITSGWTFGAGAALQIPFAMQMAYRFNGIGVTQNVLYENQKLIANQFNSAIGKIQDSLSSTASALGKLQDVVNQNAQALNTLVKQLSSNFGCISSVLNDILSRLDKVEAEVQIDCLITGRLQSLQTYVTQQLIRAAEIRASANLAATKMSECVLGQSKRVDFCGKGYHLMSFPQSAPHGVVFLHVTYVPAQEKNFTTAPAICHDGKAHFPREGVFVSNGTHWFVTQRNFYEPQIITTDNTFVSGNCDVVIGIVNNTVYDPLQPELESFKEELDKYFKNHTSPDVDLGDISGINASVVNIQKEIDRLNEVAKNLNESLIDLQELGKYEQYIKGGSGYIPEAPRDGQAYVRKDGEWVLLSTFL

SEQ ID NO: 6476 - protein, 1241 aa, Artificial Sequence
  SARS-CoV-2/2019-nCoV/USA-CruiseA-18/2020__MT159716.1 spike protein (1-1211)(A972C_R995C) Foldon construct
MFVFLVLLPLVSSQCVNLTTRTQLPPAYTNSFTRGVYYPDKVFRSSVLHSTQDLFLPFFSNVTWFHAIHVSGTNGTKRFDNPVLPFNDGVYFASTEKSNIIRGWIFGTTLDSKTQSLLIVNNATNVVIKVCEFQFCNDPFLGVYYHKNNKSWMESELRVYSSANNCTFEYVSQPFLMDLEGKQGNFKNLREFVFKNIDGYFKIYSKHTPINLVRDLPQGFSALEPLVDLPIGINITRFQTLLALHRSYLTPGDSSSGWTAGAAAYYVGYLQPRTFLLKYNENGTITDAVDCALDPLSETKCTLKSFTVEKGIYQTSNFRVQPTESIVRFPNITNLCPFGEVFNATRFASVYAWNRKRISNCVADYSVLYNSASFSTFKCYGVSPTKLNDLCFTNVYADSFVIRGDEVRQIAPGQTGKIADYNYKLPDDFTGCVIAWNSNNLDSKVGGNYNYLYRLFRKSNLKPFERDISTEIYQAGSTPCNGVEGFNCYFPLQSYGFQPTNGVGYQPYRVVVLSFELLHAPATVCGPKKSTNLVKNKCVNFNFNGLTGTGVLTESNKKFLPFQQFGRDIADTTDAVRDPQTLEILDITPCSFGGVSVITPGTNTSNQVAVLYQDVNCTEVPVAIHADQLTPTWRVYSTGSNVFQTRAGCLIGAEHVNNSYECDIPIGAGICASYQTQTNSPRRARSVASQSIIAYTMSLGAENSVAYSNNSIAIPTNFTISVTTEILPVSMTKTSVDCTMYICGDSTECSNLLLQYGSFCTQLNRALTGIAVEQDKNTQEVFAQVKQIYKTPPIKDFGGFNFSQILPDPSKPSKRSFIEDLLFNKVTLADAGFIKQYGDCLGDIAARDLICAQKFNGLTVLPPLLTDEMIAQYTSALLAGTITSGWTFGAGAALQIPFAMQMAYRFNGIGVTQNVLYENQKLIANQFNSAIGKIQDSLSSTASALGKLQDVVNQNAQALNTLVKQLSSNFGCISSVLNDILSRLDKVEAEVQIDCLITGRLQSLQTYVTQQLIRAAEIRASANLAATKMSECVLGQSKRVDFCGKGYHLMSFPQSAPHGVVFLHVTYVPAQEKNFTTAPAICHDGKAHFPREGVFVSNGTHWFVTQRNFYEPQIITTDNTFVSGNCDVVIGIVNNTVYDPLQPELDSFKEELDKYFKNHTSPDVDLGDISGINASVVNIQKEIDRLNEVAKNLNESLIDLQELGKYEQYIKGGSGYIPEAPRDGQAYVRKDGEWVLLSTFL

SEQ ID NO: 6477 - protein, 1241 aa, Artificial Sequence
  SARS-CoV-2/SARS-CoV-2/Yunnan-01/human/2020/CHN__MT049951.1 spike protein (1-1211)(A972C_R995C) Foldon construct
MFVFLVLLPLVSSQCVNLTTRTQLPPANTNSFTRGVYYPDKVFRSSVLHSTQDLFLPFFSNVTWFHAIHVSGTNGTKRFDNPVLPFNDGVYFASTEKSNIIRGWIFGTTLDSKTQSLLIVNNATNVVIKVCEFQFCNDPFLGVYYHKNNKSWMESEFRVYSSANNCTFEYVSQPFLMDLEGKQGNFKNLREFVFKNIDGYFKIYSKHTPINLVRDLPQGFSALEPLVDLPIGINITRFQTLLALHRSYLTPGDSSSGWTAGAAAYYVGYLQPRTFLLKYNENGTITDAVDCALDPLSETKCTLKSFTVEKGIYQTSNFRVQPTESIVRFPNITNLCPFGEVFNATRFASVYAWNRKRISNCVADYSVLYNSASFSTFKCYGVSPTKLNDLCFTNVYADSFVIRGDEVRQIAPGQTGKIADYNYKLPDDFTGCVIAWNSNNLDSKVGGNYNYLYRLFRKSNLKPFERDISTEIYQAGSTPCNGVEGFNCYFPLQSYGFQPTNGVGYQPYRVVVLSFELLHAPATVCGPKKSTNLVKNKCVNFNFNGLTGTGVLTESNKKFLPFQQFGRDIADTTDAVRDPQTLEILDITPCSFGGVSVITPGTNTSNQVAVLYQDVNCTEVPVAIHADQLTPTWRVYSTGSNVFQTRAGCLIGAEHVNNSYECDIPIGAGICASYQTQTNSPRRARSVASQSIIAYTMSLGAENSVAYSNNSIAIPTNFTISVTTEILPVSMTKTSVDCTMYICGDSTECSNLLLQYGSFCTQLNRALTGIAVEQDKNTQEVFAQVKQIYKTPPIKDFGGFNFSQILPDPSKPSKRSFIEDLLFNKVTLADAGFIKQYGDCLGDIAARDLICAQKFNGLTVLPPLLTDEMIAQYTSALLAGTITSGWTFGAGAALQIPFAMQMAYRFNGIGVTQNVLYENQKLIANQFNSAIGKIQDSLSSTASALGKLQDVVNQNAQALNTLVKQLSSNFGCISSVLNDILSRLDKVEAEVQIDCLITGRLQSLQTYVTQQLIRAAEIRASANLAATKMSECVLGQSKRVDFCGKGYHLMSFPQSAPHGVVFLHVTYVPAQEKNFTTAPAICHDGKAHFPREGVFVSNGTHWFVTQRNFYEPQIITTDNTFVSGNCDVVIGIVNNTVYDPLQPELDSFKEELDKYFKNHTSPDVDLGDISGINASVVNIQKEIDRLNEVAKNLNESLIDLQELGKYEQYIKGGSGYIPEAPRDGQAYVRKDGEWVLLSTFL

SEQ ID NO: 6478 - protein, 1241 aa, Artificial Sequence
  SARS-CoV-2/USA/WA-UW292/2020__EPI_ISL_418077 spike protein (1-1211)(A972C_R995C) Foldon construct
MFVFLVLLPLVSSQCVNLTTRTQLPPAYTNSFTRGVYYPDKVFRSSVLHSTQDLFLPFFSNVTWFHAIHVSGTNGTKRFDNPVLPFNDGVYFASTEKSNIIRGWIFGTTLDSKTQSLLIVNNATNVVIKVCEFQFCNDPFLGVYYHKNNKSWMESEFRVYSSANNCTFEYVSQPFLMDLEGKQGNFKNLREFVFKNIDGYFKIYSKHTPINLVRDLPQGFSALEPLVDLPIGINITRFQTLLALHRSYLTPGDSSSGWTAGAAAYYVGYLQPRTFLLKYNENGTITDAVDCALDPLSETKCTLKSFTVEKGIYQTSNFRVQPTESIVRFPNITNLCPFGEVFNATRFASVYAWNRKRISNCVADYSVLYNSASFSTFKCYGVSPTKLNDLCFTNVYADSFVIRGDEVRQIAPGQTGKIADYNYKLPDDFTGCVIAWNSNNLDSKVGGNYNYLYRLFRKSNLKPFERDISTEIYQASSTPCNGVEGFNCYFPLQSYGFQPTNGVGYQPYRVVVLSFELLHAPATVCGPKKSTNLVKNKCVNFNFNGLTGTGVLTESNKKFLPFQQFGRDIADTTDAVRDPQTLEILDITPCSFGGVSVITPGTNTSNQVAVLYQDVNCTEVPVAIHADQLTPTWRVYSTGSNVFQTRAGCLIGAEHVNNSYECDIPIGAGICASYQTQTNSPRRARSVASQSIIAYTMSLGAENSVAYSNNSIAIPTNFTISVTTEILPVSMTKTSVDCTMYICGDSTECSNLLLQYGSFCTQLNRALTGIAVEQDKNTQEVFAQVKQIYKTPPIKDFGGFNFSQILPDPSKPSKRSFIEDLLFNKVTLADAGFIKQYGDCLGDIAARDLICAQKFNGLTVLPPLLTDEMIAQYTSALLAGTITSGWTFGAGAALQIPFAMQMAYRFNGIGVTQNVLYENQKLIANQFNSAIGKIQDSLSSTASALGKLQDVVNQNAQALNTLVKQLSSNFGCISSVLNDILSRLDKVEAEVQIDCLITGRLQSLQTYVTQQLIRAAEIRASANLAATKMSECVLGQSKRVDFCGKGYHLMSFPQSAPHGVVFLHVTYVPAQEKNFTTAPAICHDGKAHFPREGVFVSNGTHWFVTQRNFYEPQIITTDNTFVSGNCDVVIGIVNNTVYDPLQPELDSFKEELDKYFKNHTSPDVDLGDISGINASVVNIQKEIDRLNEVAKNLNESLIDLQELGKYEQYIKGGSGYIPEAPRDGQAYVRKDGEWVLLSTFL

SEQ ID NO: 6479 - protein, 1241 aa, Artificial Sequence
  SARS-CoV-2/Iceland/192/2020__EPI_ISL_417819 spike protein (1-1211)(A972C_R995C) Foldon construct
MFVFFVLLPLVSSQCVNLTTRTQLPPAYTNSFTRGVYYPDKVFRSSVLHSTQDLFLPFFSNVTWFHAIHVSGTNGTKRFDNPVLPFNDGVYFASTEKSNIIRGWIFGTTLDSKTQSLLIVNNATNVVIKVCEFQFCNDPFLGVYYHKNNKSWMESEFRVYSSANNCTFEYVSQPFLMDLEGKQGNFKNLREFVFKNIDGYFKIYSKHTPINLVRDLPQGFSALEPLVDLPIGINITRFQTLLALHRSYLTPGDSSSGWTAGAAAYYVGYLQPRTFLLKYNENGTITDAVDCALDPLSETKCTLKSFTVEKGIYQTSNFRVQPTESIVRFPNITNLCPFGEVFNATRFASVYAWNRKRISNCVADYSVLYNSASFSTFKCYGVSPTKLNDLCFTNVYADSFVIRGDEVRQIAPGQTGKIADYNYKLPDDFTGCVIAWNSNNLDSKVGGNYNYLYRLFRKSNLKPFERDISTEIYQAGSTPCNGVEGFNCYFPLQSYGFQPTNGVGYQPYRVVVLSFELLHAPATVCGPKKSTNLVKNKCVNFNFNGLTGTGVLTESNKKFLPFQQFGRDIADTTDAVRDPQTLEILDITPCSFGGVSVITPGTNTSNQVAVLYQGVNCTEVPVAIHADQLTPTWRVYSTGSNVFQTRAGCLIGAEHVNNSYECDIPIGAGICASYQTQTNSPRRARSVASQSIIAYTMSLGAENSVAYSNNSIAIPTNFTISVTTEILPVSMTKTSVDCTMYICGDSTECSNLLLQYGSFCTQLNRALTGIAVEQDKNTQEVFAQVKQIYKTPPIKDFGGFNFSQILPDPSKPSKRSFIEDLLFNKVTLADAGFIKQYGDCLGDIAARDLICAQKFNGLTVLPPLLTDEMIAQYTSALLAGTITSGWTFGAGAALQIPFAMQMAYRFNGIGVTQNVLYENQKLIANQFNSAIGKIQDSLSSTASALGKLQDVVNQNAQALNTLVKQLSSNFGCISSVLNDILSRLDKVEAEVQIDCLITGRLQSLQTYVTQQLIRAAEIRASANLAATKMSECVLGQSKRVDFCGKGYHLMSFPQSAPHGVVFLHVTYVPAQEKNFTTAPAICHDGKAHFPREGVFVSNGTHWFVTQRNFYEPQIITTDNTFVSGNCDVVIGIVNNTVYDPLQPELDSFKEELDKYFKNHTSPDVDLGDISGINASVVNIQKEIDRLNEVAKNLNESLIDLQELGKYEQYIKGGSGYIPEAPRDGQAYVRKDGEWVLLSTFL

SEQ ID NO: 6480 - protein, 1241 aa, Artificial Sequence
  SARS-CoV-2/Belgium/ULG-6939/2020__EPI_ISL_417020 spike protein (1-1211)(A972C_R995C) Foldon construct
MFVFLVLLPLVSSQCVNLTTRTQLPPAYTNSFTRGVYYPDKVFRSSVLHSTQDLFLPFFSNVTWFHAIHVSGTNGTKRFDNPVLPFNDGVYFASTEKSNIIRGWIFGTTLDSKTQSLLIVNNATNVVIKVCEFQFCNDPFLGVYYHKNNKSWMESEFRVYSSANNCTFEYVSQPFLMDLEGKQGNFKNLREFVFKNIDGYFKIYSKHTPINLVRDLPQGFSALEPLVDLPIGINITRFQTLLALHRSYLTPGDSSSGWTAGAAAYYVGYLQPRTFLLKYNENGTITDAVDCALDPLSETKCTLKSFTVEKGIYQTSNFRVQPTESIVRFPNITNLCPFGEVFNATRFASVYAWNRKRISNCVADYSVLYNSASFSTFKCYGVSPTKLNDLCFTNVYADSFVIRGDEVRQIAPGQTGKIADYNYKLPDDFTGCVIAWNSNNLDSKVGGNYNYLYRLFRKSNLKPFERDISTEIYQAGSTPCNGVEGFNCYFPLQSYGFQPTNGVGYQPYRVVVLSFELLHAPATVCGPKKSTNLVKNKCVNFNFNGLTGTGVLTESNKKFLPFQQFGRDIADTTDAVRDPQTLEILDITPCSFGGVSVITPGTNTSNQVAVLYQGVNCTEVPVAIHADQLTPTWRVYSTGSNVFQTRAGCLIGAEHVNNSYECDIPIGAGICASYQTQTNSPRRARSVASQSIIAYTMSLGAENSVVYSNNSIAIPTNFTISVTTEILPVSMTKTSVDCTMYICGDSTECSNLLLQYGSFCTQLNRALTGIAVEQDKNTQEVFAQVKQIYKTPPIKDFGGFNFSQILPDPSKPSKRSFIEDLLFNKVTLADAGFIKQYGDCLGDIAARDLICAQKFNGLTVLPPLLTDEMIAQYTSALLAGTITSGWTFGAGAALQIPFAMQMAYRFNGIGVTQNVLYENQKLIANQFNSAIGKIQDSLSSTASALGKLQDVVNQNAQALNTLVKQLSSNFGCISSVLNDILSRLDKVEAEVQIDCLITGRLQSLQTYVTQQLIRAAEIRASANLAATKMSECVLGQSKRVDFCGKGYHLMSFPQSAPHGVVFLHVTYVPAQEKNFTTAPAICHDGKAHFPREGVFVSNGTHWFVTQRNFYEPQIITTDNTFVSGNCDVVIGIVNNTVYDPLQPELDSFKEELDKYFKNHTSPDVDLGDISGINASVVNIQKEIDRLNEVAKNLNESLIDLQELGKYEQYIKGGSGYIPEAPRDGQAYVRKDGEWVLLSTFL

SEQ ID NO: 6481 - protein, 1241 aa, Artificial Sequence
  SARS-CoV-2/France/HF2496/2020__EPI_ISL_418231 spike protein (1-1211)(A972C_R995C) Foldon construct
MFVFLVLLPLVSSQCVNLTTRTQLPPAYTNSFTRGVYYPDKVFRSSVLHSTQDLFLPFFSNVTWFHAIHVSGTNGTKRFDNPVLPFNDGVYFASTEKSNIIRGWIFGTTLDSKTQSLLIVNNATNVVIKVCEFQFCNDPFLGVYYHKNNKSWMESEFRVYSSANNCTFEYVSQPFLMDLEGKQGNFKNLREFVFKNIDGYFKIYSKHTPINLVRDLPQGFSALEPLVDLPIGINITRFQTLLALHRSYLTPGDSSSGWTAGAAAYYVGYLQPRTFLLKYNENGTITDAVDCALDPLSETKCTLKSFTVEKGIYQTSNFRVQPTESIVRFPNITNLCPFGEVFNATRFASVYAWNRKRISNCVADYSVLYNSASFSTFKCYGVSPTKLNDLCFTNVYADSFVIRGDEVRQIAPGQTGKIADYNYKLPDDFTGCVIAWNSNNLDSKVGGNYNYLYRLFRKSNLKPFERDISTEIYQAGSTPCNGVEGFNCYFPLQSYGFQPTNGVGYQPYRVVVLSFELLHAPATVCGPKKSTNLVKNKCVNFNFNGLTGTGVLTESNKKFLPFQQFGRDIADTTDAVRDPQTLEILDITPCSFGGVSVITPGTNTSNQVAVLYQGVNCTEVPVAIHADQLTPTWRVYSTGSNVFQTRAGCLIGAEHVNNSYECDIPIGAGICASYQTQTNSPRRARSVASQSIIAYTMSLGAENSVAYSNNSIAIPTNFTISVTTEILPVSMTKTSVDCTMYICGDSTECSNLLLQYGSFCTQLNRALTGIAVEQDKNTQEVFAQVKQIYKTPPIKDFGGFNFSQILPDPSKPSKRSFIEDLLFNKVTLADAGFIKQYGDCLGDIVARDLICAQKFNGLTVLPPLLTDEMIAQYTSALLAGTITSGWTFGAGAALQIPFAMQMAYRFNGIGVTQNVLYENQKLIANQFNSAIGKIQDSLSSTASALGKLQDVVNQNAQALNTLVKQLSSNFGCISSVLNDILSRLDKVEAEVQIDCLITGRLQSLQTYVTQQLIRAAEIRASANLAATKMSECVLGQSKRVDFCGKGYHLMSFPQSAPHGVVFLHVTYVPAQEKNFTTAPAICHDGKAHFPREGVFVSNGTHWFVTQRNFYEPQIITTDNTFVSGNCDVVIGIVNNTVYDPLQPELDSFKEELDKYFKNHTSPDVDLGDISGINASVVNIQKEIDRLNEVAKNLNESLIDLQELGKYEQYIKGGSGYIPEAPRDGQAYVRKDGEWVLLSTFL

SEQ ID NO: 6482 - protein, 1241 aa, Artificial Sequence
  SARS-CoV-2/USA/WA-UW291/2020__EPI_ISL_418076 spike protein (1-1211)(A972C_R995C) Foldon construct
MFVFLVLLPLVSSQCVNLTTRTQLPPAYTNSFTRGVYYPDKVFRSSVLHSTQDLFLPFFSNVTWFHAIHVSGTNGTKRFDNPVLPFNDGVYFASTEKSNIIRGWIFGTTLDSKTQSLLIVNNATNVVIKVCEFQFCNDPFLGVYYHKNNKSWMESEFRVYSSANNCTFEYVSQPFLMDLEGKQGNFKNLREFVFKNIDGYFKIYSKHTPINLVRDLPQGFSALEPLVDLPIGINITRFQTLLALHRSYLTPGDSSSGWTAGAAAYYVGYLQPRTFLLKYNENGTITDAVDCALDPLSETKCTLKSFTVEKGIYQTSNFRVQPTESIVRFPNITNLCPFGEVFNATRFASVYAWNRKRISNCVADYSVLYNSASFSTFKCYGVSPTKLNDLCFTNVYADSFVIRGDEVRQIAPGQTGKIADYNYKLPDDFTGCVIAWNSNNLDSKVGGNYNYLYRLFRKSNLKPFERDISTEIYQAGSTPCNGVEGFNCYFPLQSYGFQPTNGVGYQPYRVVVLSFELLHAPATVCGPKKSTNLVKNKCVNFNFNGLTGTGVLTESNKKFLPFQQFGRDIADTTDAVRDPQTLEILDITPCSFGGVSVITPGTNTSNQVAVLYQGVNCTEVPVAIHADQLTPTWRVYSTGSNVFQTRAGCLIGAEHVNNSYECDIPIGAGICASYQTQTNSPRRARSVASQSIIAYTMSLGAENSVAYSNNSIAIPTNFTISVTTEILPVSMTKTSVDCTMYICGDSTECSNLLLQYGSFCTQLNRALTGIAVEQDKNTQEVFAQVKQIYKTPPIKDFGGFNFSQILPDPSKPSKRSFIEDLLFNKVTLADAGFIKQYGDCLGDIAARDLICAQKFNGLTVLPPLLTDEMIAQYTSALLAGTITSGWTFGAGAALQIPFAMQMAYRFNGIGVTQNVLYENQKLIANQFNSAIGKIQYSLSSTASALGKLQDVVNQNAQALNTLVKQLSSNFGCISSVLNDILSRLDKVEAEVQIDCLITGRLQSLQTYVTQQLIRAAEIRASANLAATKMSECVLGQSKRVDFCGKGYHLMSFPQSAPHGVVFLHVTYVPAQEKNFTTAPAICHDGKAHFPREGVFVSNGTHWFVTQRNFYEPQIITTDNTFVSGNCDVVIGIVNNTVYDPLQPELDSFKEELDKYFKNHTSPDVDLGDISGINASVVNIQKEIDRLNEVAKNLNESLIDLQELGKYEQYIKGGSGYIPEAPRDGQAYVRKDGEWVLLSTFL

SEQ ID NO: 6483 - protein, 1241 aa, Artificial Sequence; identical to SEQ ID NO: 6446
  SARS-CoV-2/Portugal/PT0034/2020__EPI_ISL_418019 spike protein (1-1211)(A972C_R995C) Foldon construct

SEQ ID NO: 6484 - protein, 1241 aa, Artificial Sequence
  SARS-CoV-2/Iceland/202/2020__EPI_ISL_417750 spike protein (1-1211)(A972C_R995C) Foldon construct
MFVFLVLLPLVSSQCVNLTTRTQLPPAYTNSFTRGVYYPDKVFRSSVLHSTQDLFLPFFSNVTWFHAIHVSGTNGTKRFDNPVLPFNDGVYFASTEKSNIIRGWIFGTTLDSKTQSLLIVNNATNVVIKVCEFQFCNDPFLGVYYHKNNKSWMESEFRVYSSANNCTFEYVSQPFLMDLEGKQGNFKNLREFVFKNIDGYFKIYSKHTPINLVRDLPQGFSALEPLVDLPIGINITRFQTLLALHRSYLTPGDSSSGWTAGAAAYYVGYLQPRTFLLKYNENGTITDAVDCALDPLSETKCTLKSFTVEKGIYQTSNFRVQPTESIVRFPNITNLCPFGEVFNATRFASVYAWNRKRISNCVADYSVLYNSASFSTFKCYGVSPTKLNDLCFTNVYADSFVIRGDEVRQIAPGQTGKIADYNYKLPDDFTGCVIAWNSNNLDSKVGGNYNYLYRLFRKSNLKPFERDISTEIYQAGSTPCNGVEGFNCYFPLQSYGFQPTNGVGYQPYRVVVLSFELLHAPATVCGPKKSTNLVKNKCVNFNFNGLTGTGVLTESNKKFLPFQQFGRDIADTTDAVRDPQTLEILDITPCSFGGVSVITPGTNTSNQVAVLYQDVNCTEVPVAIHADQLTPTWRVYSTGSNVFQTRAGCLIGAEHVNNSYECDIPIGAGICASYQTQTNSPRRARSVASQSIIAYTMSLGAENSVAYSNNSIAIPTNFTISVTTEILPVSMTKTSVDCTMYICGDSTECSNLLLQYGSFCTQLNRALTGIAVEQDKNTQEVFAQVKQIYKTPPIKDFGGFNFSQILPDPSKPSKRSFIEDLLFNKVTLADAGFIKQYGDCLGDIAARDLICAQKFNGLTVLPPLLTDEMIAQYTSALLAGTITSGWTFGAGAALQIPFAMQMAYRFNGIGVTQNVLYENQKLIANQFNSAIGKIQDSLSSTASALGKLQDVVNQNAQALNTLVKQLSSNFGCISSVLNDILSRLDKVEAEVQIDCLITGRLQSLQTYVTQQLIRAAEIRASANLAATKMSECVLGQSKRVDFCGKGYHLMSFPQSAPHGVVFLHVTYVPAQEKNFTTAPAICHDGKAHFPREGVFVSNGTHWFVTQRNFYEPQIITTDNTFVSGNCDVVIGIVNNTVYDPLQPELDSFKEELDKYFKNHTSPDVDLGDIPGINASVVNIQKEIDRLNEVAKNLNESLIDLQELGKYEQYIKGGSGYIPEAPRDGQAYVRKDGEWVLLSTFL

SEQ ID NO: 6485 - protein, 1241 aa, Artificial Sequence
  SARS-CoV-2/USA/WA-UW261/2020__EPI_ISL_418046 spike protein (1-1211)(A972C_R995C) Foldon construct
MFVFLVLLPLVSSQCVNLTTRTQLPPAYTNSFTRGVYYPDKVFRSSVLHSTQDLFLPFFSNVTWFHAIHVSGTNGTKRFDNPVLPFNDGVYFASTEKSNIIRGWIFGTTLDSKTQSLLIVNNATNVVIKVCEFQFCNDPFLGVYYHKNNKSWMESEFRVYSSANNCTFEYVSQPFLMDLEGKQGNFKNLREFVFKNIDGYFKIYSKHTPINLVRDLPQGFSALEPLVDLPIGINITRFQTLLALHRSYLTPGDSSSGWTAGAAAYYVGYLQPRTFLLKYNENGTITDAVDCALDPLSETKCTLKSFTVEKGIYQTSNFRVQPTESIVRFPNITNLCPFGEVFNATRFTSVYAWNRKRISNCVADYSVLYNSASFSTFKCYGVSPTKLNDLCFTNVYADSFVIRGDEVRQIAPGQTGKIADYNYKLPDDFTGCVIAWNSNNLDSKVGGNYNYLYRLFRKSNLKPFERDISTEIYQAGSTPCNGVEGFNCYFPLQSYGFQPTNGVGYQPYRVVVLSFELLHAPATVCGPKKSTNLVKNKCVNFNFNGLTGTGVLTESNKKFLPFQQFGRDIADTTDAVRDPQTLEILDITPCSFGGVSVITPGTNTSNQVAVLYQDVNCTEVPVAIHADQLTPTWRVYSTGSNVFQTRAGCLIGAEHVNNSYECDIPIGAGICASYQTQTNSPRRARSVASQSIIAYTMSLGAENSVAYSNNSIAIPTNFTISVTTEILPVSMTKTSVDCTMYICGDSTECSNLLLQYGSFCTQLNRALTGIAVEQDKNTQEVFAQVKQIYKTPPIKDFGGFNFSQILPDPSKPSKRSFIEDLLFNKVTLADAGFIKQYGDCLGDIAARDLICAQKFNGLTVLPPLLTDEMIAQYTSALLAGTITSGWTFGAGAALQIPFAMQMAYRFNGIGVTQNVLYENQKLIANQFNSAIGKIQDSLSSTASALGKLQDVVNQNAQALNTLVKQLSSNFGCISSVLNDILSRLDKVEAEVQIDCLITGRLQSLQTYVTQQLIRAAEIRASANLAATKMSECVLGQSKRVDFCGKGYHLMSFPQSAPHGVVFLHVTYVPAQEKNFTTAPAICHDGKAHFPREGVFVSNGTHWFVTQRNFYEPQIITTDNTFVSGNCDVVIGIVNNTVYDPLQPELDSFKEELDKYFKNHTSPDVDLGDISGINASVVNIQKEIDRLNEVAKNLNESLIDLQELGKYEQYIKGGSGYIPEAPRDGQAYVRKDGEWVLLSTFL

SEQ ID NO: 6486 - protein, 1241 aa, Artificial Sequence
  SARS-CoV-2/Portugal/PT0035/2020__EPI_ISL_418020 spike protein (1-1211)(A972C_R995C) Foldon construct
MFVFLVLLPLVSSQCVNLTTRTQLPPAYTNSFTRGVYYPDKVFRSSVLHSTQDLFLPFFSNVTWFHAIHVSGTNGTKRFDNPVLPFNDGVYFASTEKSNIIRGWIFGTTLDSKTQSLLIVNNATNVVIKVCEFQFCNDPFLGVYYHKNNKSWMESEFRVYSSANNCTFEYVSQPFLMDLEGKQGNFKNLREFVFKNIDGYFKIYSKHTPINLVRDLPQGFSALEPLVDLPIGINITRFQTLLALHRSYLTPGDSSSGWTAGAAAYYVGYLQPRTFLLKYNENGTITDAVDCALDPLSETKCTLKSFTVEKGIYQTSNFRVQPTESIVRFPNITNLCPFGEVFNATRFASVYAWNRKRISNCVADYSVLYNSASFSTFKCYGVSPTKLNDLCFTNVYADSFVIRGDEVRQIAPGQTGKIADYNYKLPDDFTGCVIAWNSNNLDSKVGGNYNYLYRLFRKSNLKPFERDISTEIYQAGSTPCNGVEGFNCYFPLQSYGFQPTNGVGYQPYRVVVLSFELLHAPATVCGPKKSTNLVKNKCVNFNFNGLTGTGVLTESNKKFLPFQQFGRDIADTTDAVRDPQTLEILDITPCSFGGVSVITPGTNTSNQVAVLYQDVNCTEVPVAIHADQLTPTWRVYSTGSNVFQTRAGCLIGAEHVNNSYECDIPIGAGICASYQTQTNSPRRARSVASQSIIAYTMSLGAENSVAYSNNSIAIPTNFTISVTTEILPVSMTKTSVDCTMYICGDSTECSNLLLQYGSFCTQLNRALTGIAVEQDKNTQEVFAQVKQIYKTPPIKDFGGFNFSQILPDPSKPSKRSFIEDLLFNKVTLADAGFIKQYGDCLGDISARDLICAQKFNGLTVLPPLLTDEMIAQYTSALLAGTITSGWTFGAGAALQIPFAMQMAYRFNGIGVTQNVLYENQKLIANQFNSAIGKIQDSLSSTASALGKLQDVVNQNAQALNTLVKQLSSNFGCISSVLNDILSRLDKVEAEVQIDCLITGRLQSLQTYVTQQLIRAAEIRASANLAATKMSECVLGQSKRVDFCGKGYHLMSFPQSAPHGVVFLHVTYVPAQEKNFTTAPAICHDGKAHFPREGVFVSNGTHWFVTQRNFYEPQIITTDNTFVSGNCDVVIGIVNNTVYDPLQPELDSFKEELDKYFKNHTSPDVDLGDISGINASVVNIQKEIDRLNEVAKNLNESLIDLQELGKYEQYIKGGSGYIPEAPRDGQAYVRKDGEWVLLSTFL

SEQ ID NO: 6487 - protein, 1241 aa, Artificial Sequence
  SARS-CoV-2/USA/NY-NYUMC7/2020__EPI_ISL_418192 spike protein (1-1211)(A972C_R995C) Foldon construct
MFVFLVLLPLVSSQCVNLTTRTQLPPAYTNSFTRGVYYPDKVFRSSVLHSTQDLFLPFFSNVTWFHAIHVSGTNGTKRFDNPVLPFNDGVYFASTEKSNIIRGWIFGTTLDSKTQSLLIVNNATNVVIKVCEFQFCNDPFLGVYHHKNNKSWMESEFRVYSSANNCTFEYVSQPFLMDLEGKQGNFKNLREFVFKNIDGYFKIYSKHTPINLVRDLPQGFSALEPLVDLPIGINITRFQTLLALHRSYLTPGDSSSGWTAGAAAYYVGYLQPRTFLLKYNENGTITDAVDCALDPLSETKCTLKSFTVEKGIYQTSNFRVQPTESIVRFPNITNLCPFGEVFNATRFASVYAWNRKRISNCVADYSVLYNSASFSTFKCYGVSPTKLNDLCFTNVYADSFVIRGDEVRQIAPGQTGKIADYNYKLPDDFTGCVIAWNSNNLDSKVGGNYNYLYRLFRKSNLKPFERDISTEIYQAGSTPCNGVEGFNCYFPLQSYGFQPTNGVGYQPYRVVVLSFELLHAPATVCGPKKSTNLVKNKCVNFNFNGLTGTGVLTESNKKFLPFQQFGRDIADTTDAVRDPQTLEILDITPCSFGGVSVITPGTNTSNQVAVLYQGVNCTEVPVAIHADQLTPTWRVYSTGSNVFQTRAGCLIGAEHVNNSYECDIPIGAGICASYQTQTNSPRRARSVASQSIIAYTMSLGAENSVAYSNNSIAIPTNFTISVTTEILPVSMTKTSVDCTMYICGDSTECSNLLLQYGSFCTQLNRALTGIAVEQDKNTQEVFAQVKQIYKTPPIKDFGGFNFSQILPDPSKPSKRSFIEDLLFNKVTLADAGFIKQYGDCLGDIAARDLICAQKFNGLTVLPPLLTDEMIAQYTSALLAGTITSGWTFGAGAALQIPFAMQMAYRFNGIGVTQNVLYENQKLIANQFNSAIGKIQDSLSSTASALGKLQDVVNQNAQALNTLVKQLSSNFGCISSVLNDILSRLDKVEAEVQIDCLITGRLQSLQTYVTQQLIRAAEIRASANLAATKMSECVLGQSKRVDFCGKGYHLMSFPQSAPHGVVFLHVTYVPAQEKNFTTAPAICHDGKAHFPREGVFVSNGTHWFVTQRNFYEPQIITTDNTFVSGNCDVVIGIVNNTVYDPLQPELDSFKEELDKYFKNHTSPDVDLGDISGINASVVNIQKEIDRLNEVAKNLNESLIDLQELGKYEQYIKGGSGYIPEAPRDGQAYVRKDGEWVLLSTFL

SEQ ID NO: 6488 - protein, 1241 aa, Artificial Sequence
  SARS-CoV-2/Iceland/189/2020__EPI_ISL_417709 spike protein (1-1211)(A972C_R995C) Foldon construct
MFVFLVLLPLVSSQCVNLTTRTQLPPAYTNSFTRGVYYPDKVFRSSVLHSTQDLFLPFFSNVTWFHAIHVSGTNGTKRFDNPVLPFNDGVYFASTEKSNIIRGWIFGTTLDSKTQSLLIVNNATNVVIKVCEFQFCNDPFLGVYYHKNNKSWMESEFRVYSSANNCTFEYVSQPFLMDLEGKQGNFKNLREFVFKNIDGYFKIYSKHTPINLVRDLPQGFSALEPLVDLPIGINITRFQTLLALHRSYLTPGDSSSGWTAGAAAYYVGYLQPRTFLLKYNENGTITDAVDCALDPLSETKCTLKSFTVEKGIYQTSNFRVQPTESIVRFPNITNLCPFGEVFNATRFASVYAWNRKRISNCVADYSVLYNSASFSTFKCYGVSPTKLNDLCFTNVYADSFVIRGDEVRQIAPGQTGKIADYNYKLPDDFTGCVIAWNSNNLDSKVGGNYNYLYRLFRKSNLKPFERDISTEIYQAGSTPCNGVEGFNCYFPLQSYGFQPTNGVGYQPYRVVVLSFELLHAPATVCGPKKSTNLVKNKCVNFNFNGLTGTGVLTESNKKFLPFQQFGRDIADTTDAVRDPQTLEILDITPCSFGGVSVITPGTNTSNQVAVLYQGVNCTEVPVAIHADQLTPTWRVYSTGSNVFQTRAGCLIGAEHVNNSYECDIPIGAGICASYQTQTNSPRRARSVASQSIIAYTMSLGAENSVAYSNNSIAIPTNFTISVTTEILPVSMTKTSVDCTMYICGDSTECSNLLLQYGSFCTQLNRALTGIAVEQDKNTQEVFAQVKQIYKTPPIKDFGGFNFSQILPDPSKPSKRSFIEDLLFNKVTLADAGFTKQYGDCLGDIAARDLICAQKFNGLTVLPPLLTDEMIAQYTSALLAGTITSGWTFGAGAALQIPFAMQMAYRFNGIGVTQNVLYENQKLIANQFNSAIGKIQDSLSSTASALGKLQDVVNQNAQALNTLVKQLSSNFGCISSVLNDILSRLDKVEAEVQIDCLITGRLQSLQTYVTQQLIRAAEIRASANLAATKMSECVLGQSKRVDFCGKGYHLMSFPQSAPHGVVFLHVTYVPAQEKNFTTAPAICHDGKAHFPREGVFVSNGTHWFVTQRNFYEPQIITTDNTFVSGNCDVVIGIVNNTVYDPLQPELDSFKEELDKYFKNHTSPDVDLGDISGINASVVNIQKEIDRLNEVAKNLNESLIDLQELGKYEQYIKGGSGYIPEAPRDGQAYVRKDGEWVLLSTFL

SEQ ID NO: 6489 - protein, 1241 aa, Artificial Sequence
  SARS-CoV-2/Australia/NSW56/2020__EPI_ISL_417408 spike protein (1-1211)(A972C_R995C) Foldon construct
MFVFLVLLPLVSSQCVNLTTRTQLPPAYTNSFTRGVYYPDKVFRSSVLHSTQDLFLPFFSNVTWFHAIHVSGTNGTKRFDNPVLPFNDGVYFASTEKSNIIRGWIFGTTLDSKTQSLLIVNNATNVVIKVCEFQFCNDPFLGVYYHKNNKSWMESEFRVYSSANNCTFEYVSQPFLMDLEGKQGNFKNLREFVFKNIDGYFKIYSKHTPINLVRDLPQGFSALEPLVDLPIGINITRFQTLLALHRSYLTPGDSSSGWTAGAAAYYVGYLQPRTFLLKYNENGTITDAVDCALDPLSETKCTLKSFTVEKGIYQTSNFRVQPTESIVRFPNITNLCPFGEVFNATRFASVYAWNRKRISNCVADYSVLYNSASFSTFKCYGVSPTKLNDLCFTNVYADSFVIRGDEVRQIAPGQTGKIADYNYKLPDDFTGCVIAWNSNNLDSKVGGNYNYLYRLFRKSNLKPFERDISTEIYQAGSTPCNGVEGFNCYFPLQSYGFQPTNGVGYQPYRVVVLSFELLHAPATVCGPKKSTNLVKNKCVNFNFNGLTGTGVLTESNKKFLPFQQFGRDIADTTDAVRDPQTLEILDITPCSFGGVSVITPGTNTSNQVAVLYQDVNCTEVPVAIHADQLTPTWRVYSTGSNVFQTRAGCLIGAEHVNNSYECDIPIGAGICASYQTQTNSPRRARSVASQSIIAYTMSLGAENSVAYSNNSIAIPTNFTISVTTEILPVSMTKTSVDCTMYICGDSTECSNLLLQYGSFCTQLNRALTGIAVEQDKNTQEVFAQVKQIYKTPPIKDFGGFNFSQILPDSSKPSKRSFIEDLLFNKVTLADAGFIKQYGDCLGDIAARDLICAQKFNGLTVLPPLLTDEMIAQYTSALLAGTITSGWTFGAGAALQIPFAMQMAYRFNGIGVTQNVLYENQKLIANQFNSAIGKIQDSLSSTASALGKLQDVVNQNAQALNTLVKQLSSNFGCISSVLNDILSRLDKVEAEVQIDCLITGRLQSLQTYVTQQLIRAAEIRASANLAATKMSECVLGQSKRVDFCGKGYHLMSFPQSAPHGVVFLHVTYVPAQEKNFTTAPAICHDGKAHFPREGVFVSNGTHWFVTQRNFYEPQIITTDNTFVSGNCDVVIGIVNNTVYDPLQPELDSFKEELDKYFKNHTSPDVDLGDISGINASVVNIQKEIDRLNEVAKNLNESLIDLQELGKYEQYIKGGSGYIPEAPRDGQAYVRKDGEWVLLSTFL

SEQ ID NO: 6490 - protein, 1241 aa, Artificial Sequence
  SARS-CoV-2/Iceland/280/2020__EPI_ISL_417608 spike protein (1-1211)(A972C_R995C) Foldon construct
MFVFLVLLPLVSSQCVNLTTRTQLPPAYTNSFTRGVYYPDKVFRSSVLHSTQDLFLPFFSNVTWFHAIHVSGTNGTKRFDNPVLPFNDGVYFASTEKSNIIRGWIFGTTLDSKTQSLLIVNNATNVVIKVCEFQFCNDPFLGVYYHKNNKSWMESEFRVYSSANNCTFEYVSQPFLMDLEGKQGNFKNLREFVFKNIDGYFKIYSKHTPINLVRDLPQGFSALEPLVDLPIGINITRFQTLLALHRSYLTPGDSSSGWTAGAAAYYVGYLQPRTFLLKYNENGTITDAVDCALDPLSETKCTLKSFTVEKGIYQTSNFRVQPTESIVRFPNITNLCPFGEVFNATRFASVYAWNRKRISNCVADYSVLYNSASFSTFKCYGVSPTKLNDLCFTNVYADSFVIRGDEVRQIAPGQTGKIADYNYKLPDDFTGCVIAWNSNNLDSKVGGNYNYLYRLFRKSNLKPFERDISTEIYQAGSTPCNGVEGFNCYFPLQSYGFQPTNGVGYQPYRVVVLSFELLHAPATVCGPKKSTNLVKNKCVNFNFNGLTGTGVLTESNKKFLPFQQFGRDIADTTDAVRDPQTLEILDITPCSFGGVSVITPGTNTSNQVAVLYQGVNCTEVPVAIHADQLTPTWRVYSTGSNVFQTRAGCLIGAEHVNNSYECDIPIGAGICASYHTQTNSPRRARSVASQSIIAYTMSLGAENSVAYSNNSIAIPTNFTISVTTEILPVSMTKTSVDCTMYICGDSTECSNLLLQYGSFCTQLNRALTGIAVEQDKNTQEVFAQVKQIYKTPPIKDFGGFNFSQILPDPSKPSKRSFIEDLLFNKVTLADAGFIKQYGDCLGDIAARDLICAQKFNGLTVLPPLLTDEMIAQYTSALLAGTITSGWTFGAGAALQIPFAMQMAYRFNGIGVTQNVLYENQKLIANQFNSAIGKIQDSLSSTASALGKLQDVVNQNAQALNTLVKQLSSNFGCISSVLNDILSRLDKVEAEVQIDCLITGRLQSLQTYVTQQLIRAAEIRASANLAATKMSECVLGQSKRVDFCGKGYHLMSFPQSAPHGVVFLHVTYVPAQEKNFTTAPAICHDGKAHFPREGVFVSNGTHWFVTQRNFYEPQIITTDNTFVSGNCDVVIGIVNNTVYDPLQPELDSFKEELDKYFKNHTSPDVDLGDISGINASVVNIQKEIDRLNEVAKNLNESLIDLQELGKYEQYIKGGSGYIPEAPRDGQAYVRKDGEWVLLSTFL

SEQ ID NO: 6491 - protein, 1241 aa, Artificial Sequence; identical to SEQ ID NO: 6446
  SARS-CoV-2/Iceland/247/2020__EPI_ISL_417575 spike protein (1-1211)(A972C_R995C) Foldon construct

SEQ ID NO: 6492 - protein, 1241 aa, Artificial Sequence
  SARS-CoV-2/Iceland/238/2020__EPI_ISL_417566 spike protein (1-1211)(A972C_R995C) Foldon construct
MFVFLVLLPLVSSQCVNLTTRTQLPPAYTNSFTRGVYYPDKVFRSSVLHSTQDLFLPFFSNVTWFHAIHVSGTNGTKRFDNPVLPFNDGVYFASTEKSNIIRGWIFGTTLDSKTQSLLIVNNATNVVIKVCEFQFCNDPFLGVYYHKNNKSWMESEFRVYSSANNCTFEYVSQPFLMDLEGKQGNFKNLREFVFKNIDGYFKIYSKHTPINLVRDLPQGFSALEPLVDLPIGINITRFQTLLALHRSYLTPGDSSSGWTAGAAAYYVGYLQPRTFLLKYNENGTITDAVDCALDPLSETKCTLKSFTVEKGIYQTSNFRVQPTESIVRFPNITNLCPFGEVFNATRFASVYAWNRKRISNCVADYSVLYNSASFSTFKCYGVSPTKLNDLCFTNVYADSFVIRGDEVRQIAPGQTGKIADYNYKLPDDFTGCVIAWNSNNLDSKVGGNYNYLYRLFRKSNLKPFERDISTEIYQAGSTPCNGVEGFNCYFPLQSYGFQPTNGVGYQPYRVVVLSFELLHAPATVCGPKKSTNLVKNKCVNFNFNGLTGTGVLTESNKKFLPFQQFGRDIADTTDAVRDPQTLEILDITPCSFGGVSVITPGTNTSNQVAVLYQGVNCTEVPVAIHADQLTPTWRVYSTGSNVFQTRAGCLIGAEHVNNSYECDIPIGAGICASYQTQTNSPRRARSVASQSIIAYTMSLGAENSVAYSNNSIAIPTNFTISVTTEILPVSMTKTSVDCTMYICGDSTECSNLLLQYGSFCTQLNRALTGIAVEQDKNTQEVFAQVKQIYKTPPIKDFGGFNFSQILPDPSKPSKRSFIEDLLFNKVTLADVGFIKQYGDCLGDIAARDLICAQKFNGLTVLPPLLTDEMIAQYTSALLAGTITSGWTFGAGAALQIPFAMQMAYRFNGIGVTQNVLYENQKLIANQFNSAIGKIQDSLSSTASALGKLQDVVNQNAQALNTLVKQLSSNFGCISSVLNDILSRLDKVEAEVQIDCLITGRLQSLQTYVTQQLIRAAEIRASANLAATKMSECVLGQSKRVDFCGKGYHLMSFPQSAPHGVVFLHVTYVPAQEKNFTTAPAICHDGKAHFPREGVFVSNGTHWFVTQRNFYEPQIITTDNTFVSGNCDVVIGIVNNTVYDPLQPELDSFKEELDKYFKNHTSPDVDLGDISGINASVVNIQKEIDRLNEVAKNLNESLIDLQELGKYEQYIKGGSGYIPEAPRDGQAYVRKDGEWVLLSTFL

SEQ ID NO: 6493 - protein, 1241 aa, Artificial Sequence
  SARS-CoV-2/Greece/16/2020__EPI_ISL_418265 spike protein (1-1211)(A972C_R995C) Foldon construct
MFVFLVLLPLVSSQCVNLTTRTQLPPAYTNSFTRGVYYPDKVFRSSVLHSTQDLFLPFFSNVTWFHAIHVSGTNGTKRFDNPVLPFNDGVYFASTEKSNIIRGWIFGTTLDSKTQSLLIVNNATNVVIKVCEFQFCNDPFLGVYYHKNNKSWMESEFRVYSSANNCTFEYVSQPFLMDLEGKQGNFKNLREFVFKNVDGYFKIYSKHTPINLVRDLPQGFSALEPLVDLPIGINITRFQTLLALHRSYLTPGDSSSGWTAGAAAYYVGYLQPRTFLLKYNENGTITDAVDCALDPLSETKCTLKSFTVEKGIYQTSNFRVQPTESIVRFPNITNLCPFGEVFNATRFASVYAWNRKRISNCVADYSVLYNSASFSTFKCYGVSPTKLNDLCFTNVYADSFVIRGDEVRQIAPGQTGKIADYNYKLPDDFTGCVIAWNSNNLDSKVGGNYNYLYRLFRKSNLKPFERDISTEIYQAGSTPCNGVEGFNCYFPLQSYGFQPTNGVGYQPYRVVVLSFELLHAPATVCGPKKSTNLVKNKCVNFNFNGLTGTGVLTESNKKFLPFQQFGRDIADTTDAVRDPQTLEILDITPCSFGGVSVITPGTNTSNQVAVLYQDVNCTEVPVAIHADQLTPTWRVYSTGSNVFQTRAGCLIGAEHVNNSYECDIPIGAGICASYQTQTNSPRRARSVASQSIIAYTMSLGAENSVAYSNNSIAIPTNFTISVTTEILPVSMTKTSVDCTMYICGDSTECSNLLLQYGSFCTQLNRALTGIAVEQDKNTQEVFAQVKQIYKTPPIKDFGGFNFSQILPDPSKPSKRSFIEDLLFNKVTLADAGFIKQYGDCLGDIAARDLICAQKFNGLTVLPPLLTDEMIAQYTSALLAGTITSGWTFGAGAALQIPFAMQMAYRFNGIGVTQNVLYENQKLIANQFNSAIGKIQDSLSSTASALGKLQDVVNQNAQALNTLVKQLSSNFGCISSVLNDILSRLDKVEAEVQIDCLITGRLQSLQTYVTQQLIRAAEIRASANLAATKMSECVLGQSKRVDFCGKGYHLMSFPQSAPHGVVFLHVTYVPAQEKNFTTAPAICHDGKAHFPREGVFVSNGTHWFVTQRNFYEPQIITTDNTFVSGNCDVVIGIVNNTVYDPLQPELDSFKEELDKYFKNHTSPDVDLGDISGINASVVNIQKEIDRLNEVAKNLNESLIDLQELGKYEQYIKGGSGYIPEAPRDGQAYVRKDGEWVLLSTFL

SEQ ID NO: 6494 - protein, 1241 aa, Artificial Sequence
  SARS-CoV-2/Iceland/319/2020__EPI_ISL_417648 spike protein (1-1211)(A972C_R995C) Foldon construct
MFVFLVLLPLVSSQCVNLTTRTQLPPAYTNSFTRGVYYPDKVFRSSVLHSTQDLFLPFFSNVTWFHAIHVSGTNGTKRFDNPVLPFNDGVYFASTEKSNIIRGWIFGTTLDSKTQSLLIVNNATNVVIKVCEFQFCNDPFLGVYYHKNNKSWMESEFRVYSSANNCTFEYVSQPFLIDLEGKQGNFKNLREFVFKNIDGYFKIYSKHTPINLVRDLPQGFSALEPLVDLPIGINITRFQTLLALHRSYLTPGDSSSGWTAGAAAYYVGYLQPRTFLLKYNENGTITDAVDCALDPLSETKCTLKSFTVEKGIYQTSNFRVQPTESIVRFPNITNLCPFGEVFNATRFASVYAWNRKRISNCVADYSVLYNSASFSTFKCYGVSPTKLNDLCFTNVYADSFVIRGDEVRQIAPGQTGKIADYNYKLPDDFTGCVIAWNSNNLDSKVGGNYNYLYRLFRKSNLKPFERDISTEIYQAGSTPCNGVEGFNCYFPLQSYGFQPTNGVGYQPYRVVVLSFELLHAPATVCGPKKSTNLVKNKCVNFNFNGLTGTGVLTESNKKFLPFQQFGRDIADTTDAVRDPQTLEILDITPCSFGGVSVITPGTNTSNQVAVLYQGVNCTEVPVAIHADQLTPTWRVYSTGSNVFQTRAGCLIGAEHVNNSYECDIPIGAGICASYQTQTNSPRRARSVASQSIIAYTMSLGAENSVAYSNNSIAIPTNFTISVTTEILPVSMTKTSVDCTMYICGDSTECSNLLLQYGSFCTQLNRALTGIAVEQDKNTQEVFAQVKQIYKTPPIKDFGGFNFSQILPDPSKPSKRSFIEDLLFNKVTLADAGFIKQYGDCLGDIAARDLICAQKFNGLTVLPPLLTDEMIAQYTSALLAGTITSGWTFGAGAALQIPFAMQMAYRFNGIGVTQNVLYENQKLIANQFNSAIGKIQDSLSSTASALGKLQDVVNQNAQALNTLVKQLSSNFGCISSVLNDILSRLDKVEAEVQIDCLITGRLQSLQTYVTQQLIRAAEIRASANLAATKMSECVLGQSKRVDFCGKGYHLMSFPQSAPHGVVFLHVTYVPAQEKNFTTAPAICHDGKAHFPREGVFVSNGTHWFVTQRNFYEPQIITTDNTFVSGNCDVVIGIVNNTVYDPLQPELDSFKEELDKYFKNHTSPDVDLGDISGINASVVNIQKEIDRLNEVAKNLNESLIDLQELGKYEQYIKGGSGYIPEAPRDGQAYVRKDGEWVLLSTFL

SEQ ID NO: 6495 - protein, 1241 aa, Artificial Sequence
  SARS-CoV-2/Congo/94/2020__EPI_ISL_417947 spike protein (1-1211)(A972C_R995C) Foldon construct
MFVFLVLLPLVSSQCVNLTTRTQLPPAYTNSFTRGVYYPDKVFRSSVLHSTQDLFLPFFSNVTWFHAIHVSGTNGTKRFDNPVLPFNDGVYFASTEKSNIIRGWIFGTTLDSKTQSLLIVNNATNVVIKVCEFQFCNDPFLGVYYHKNNKSWMESEFRVYSSANNCTFEYVSQPFLMDLEGKQGNFKNLREFVFKNIDGYFKIYSKHTPINLVRDLPQGFSALEPLVDLPIGINITRFQTLLALHRSYLTPGDSSSGWTAGAAAYYVGYLQPRTFLLKYNENGTITDAVDCALDPLSETKCTLKSFTVEKGIYQTSNFRVQPTESIVRFPNITNLCPFGEVFNATRFASVYAWNRKRISNCVADYSVLYNSASFSTFKCYGVSPTKLNDLCFTNVYADSFVIRGDEVRQIAPGQTGKIADYNYKLPDDFTGCVIAWNSNNLDSKVGGNYNYLYRLFRKSNLKPFERDISTEIYQAGSTPCNGVEGFNCYFPLQSYGFQPTNGVGYQPYRVVVLSFELLHAPATVCGPKKSTNLVKNKCVNFNFNGLTGTGVLTESNKKFLPFQQFGRDIADTTDAVRDPQTLEILDITPCSFGGVSVITPGTNTSNQVAVLYQGVNCTEVPVAIHADQLTPTWRVYSTGSNVFQTRAGCLIGAEHVNNSYECDIPIGAGICASYQTQTNSPRRARSVASQSIIAYTMSLGAENSVAYSNNSIAIPTNFTISVTTEILPVSMTKTSVDCTMYICGDSTECSNLLLQYGSFCTQLNRALTGIAVEQDKNTQEVFAQVKQIYKTPPIKDFGGFNFSQILPDPSKPSKRSFIEDILFNKVTLADAGFIKQYGDCLGDIAARDLICAQKFNGLTVLPPLLTDEMIAQYTSALLAGTITSGWTFGAGAALQIPFAMQMAYRFNGIGVTQNVLYENQKLIANQFNSAIGKIQDSLSSTASALGKLQDVVNQNAQALNTLVKQLSSNFGCISSVLNDILSRLDKVEAEVQIDCLITGRLQSLQTYVTQQLIRAAEIRASANLAATKMSECVLGQSKRVDFCGKGYHLMSFPQSAPHGVVFLHVTYVPAQEKNFTTAPAICHDGKAHFPREGVFVSNGTHWFVTQRNFYEPQIITTDNTFVSGNCDVVIGIVNNTVYDPLQPELDSFKEELDKYFKNHTSPDVDLGDISGINASVVNIQKEIDRLNEVAKNLNESLIDLQELGKYEQYIKGGSGYIPEAPRDGQAYVRKDGEWVLLSTFL

SEQ ID NO: 6496 - protein, 1241 aa, Artificial Sequence
  SARS-CoV-2/Congo/158/2020__EPI_ISL_417950 spike protein (1-1211)(A972C_R995C) Foldon construct
MFVFLVLLPLVSSQCVNLTTRTQLPPAYTNSFTRGVYYPDKVFRSSVLHSTQDLFLPFFSNVTWFHAIHVSGTNGTKRFDNPVLPFNDGVYFASTEKSNIIRGWIFGTTLDSKTQSLLIVNNATNVVIKVCEFQFCNDPFLGVYYHKNNKSWMESEFRVYSSANNCTFEYVSQPFLMDLEGKQGNFKNLREFVFKNIDGYFKIYSKHTPINLVRDLPQGFSALEPLVDLPIGINITRFQTLLALHRSYLTPGDSSSGWTAGAAAYYVGYLQPRTFLLKYNENGTITDAVDCALDPLSETKCTLKSFTVEKGIYQTSNFRVQPTESIVRFPNITNLCPFGEVFNATRFASVYAWNRKRISNCVADYSVLYNSASFSTFKCYGVSPTKLNDLCFTNVYADSFVIRGDEVRQIAPGQTGKIADYNYKLPDDFTGCVIAWNSNNLDSKVGGNYNYLYRLFRKSNLKPFERDISTEIYQAGSTPCNGVEGFNCYFPLQSYGFQPTNGVGYQPYRVVVLSFELLHAPATVCGPKKSTNLVKNKCVNFNFNGLTGTGVLTESNKKFLPFQQFGRDIADTTDAVRDPQTLEILDITPCSFGGVSVITPGTNTSNQVAVLYQDVNCTEVPVAIHADQLTPTWRVYSTGSNVFQTRAGCLIGAEHVNNSYECDIPIGAGICASYQTQTNSPRRARSVASQSIIAYTMSLGAENSVAYSNNSIAIPTNFTISVTTEILPVSMTKTSVDCTMYICGDSTECSNLLLQYGSFCTQLNRALTGIAVEQDKNTQEVFAQVKQIYKTPPIKDFGGFNFSQILPDPSKPSKRSFIEDLLFNKVTLADAGFIKQYGDCLGDIAARDLICAQKFNGLTVLPPLLTDEMIAQYTSALLAGTITSGWTFGAGAALQIPFAMQMAYRFNGIGVTQNVLYENQKLIANQFNSAIGKIQDSLSSTASALGKLQDVVNQNAQALNTLVKQLSSNFGCISSVLNDILSRLDKVEAEVQIDCLITGRLQSLQTYVTQQLIRAAEIRASANLAATKMSECVLGQSKRVDFCGKGYHLMSFPQSAPHGVVFLHVTYVPAQEKNFTTAPAICHDGKAHFPREGVFVSNGTHWFVTQRNFYEPQIITTDNTFLSGNCDVVIGIVNNTVYDPLQPELDSFKEELDKYFKNHTSPDVDLGDISGINASVVNIQKEIDRLNEVAKNLNESLIDLQELGKYEQYIKGGSGYIPEAPRDGQAYVRKDGEWVLLSTFL

SEQ ID NO: 6497 - protein, 1241 aa, Artificial Sequence
  SARS-CoV-2/USA/UT-00034/2020__EPI_ISL_417977 spike protein (1-1211)(A972C_R995C) Foldon construct
MFVFLVLLPLVSSQCVNLTTRTQLPPAYTNSFTRGVYYPDKVFRSSVLHSTQDLFLPFFSNVTWFHAIHVSGTNGTKRFDNPVLPFNDGVYFASTEKSNIIRGWIFGTTLDSKTQSLLIVNNATNVVIKVCEFQFCNDPFLGVYYYKNNKSWMESEFRVYSSANNCTFEYVSQPFLMDLEGKQGNFKNLREFVFKNIDGYFKIYSKHTPINLVRDLPQGFSALEPLVDLPIGINITRFQTLLALHRSYLTPGDSSSGWTAGAAAYYVGYLQPRTFLLKYNENGTITDAVDCALDPLSETKCTLKSFTVEKGIYQTSNFRVQPTESIVRFPNITNLCPFGEVFNATRFASVYAWNRKRISNCVADYSVLYNSASFSTFKCYGVSPTKLNDLCFTNVYADSFVIRGDEVRQIAPGQTGKIADYNYKLPDDFTGCVIAWNSNNLDSKVGGNYNYLYRLFRKSNLKPFERDISTEIYQAGSTPCNGVEGFNCYFPLQSYGFQPTNGVGYQPYRVVVLSFELLHAPATVCGPKKSTNLVKNKCVNFNFNGLTGTGVLTESNKKFLPFQQFGRDIADTTDAVRDPQTLEILDITPCSFGGVSVITPGTNTSNQVAVLYQGVNCTEVPVAIHADQLTPTWRVYSTGSNVFQTRAGCLIGAEHVNNSYECDIPIGAGICASYQTQTNSPRRARSVASQSIIAYTMSLGAENSVAYSNNSIAIPTNFTISVTTEILPVSMTKTSVDCTMYICGDSTECSNLLLQYGSFCTQLNRALTGIAVEQDKNTQEVFAQVKQIYKTPPIKDFGGFNFSQILPDPSKPSKRSFIEDLLFNKVTLADAGFIKQYGDCLGDIAARDLICAQKFNGLTVLPPLLTDEMIAQYTSALLAGTITSGWTFGAGAALQIPFAMQMAYRFNGIGVTQNVLYENQKLIANQFNSAIGKIQDSLSSTASALGKLQDVVNQNAQALNTLVKQLSSNFGCISSVLNDILSRLDKVEAEVQIDCLITGRLQSLQTYVTQQLIRAAEIRASANLAATKMSECVLGQSKRVDFCGKGYHLMSFPQSAPHGVVFLHVTYVPAQEKNFTTAPAICHDGKAHFPREGVFVSNGTHWFVTQRNFYEPQIITTDNTFVSGNCDVVIGIVNNTVYDPLQPELDSFKEELDKYFKNHTSPDVDLGDISGINASVVNIQKEIDRLNEVAKNLNESLIDLQELGKYEQYIKGGSGYIPEAPRDGQAYVRKDGEWVLLSTFL

SEQ ID NO: 6498 - protein, 1241 aa, Artificial Sequence
  SARS-CoV-2/USA/UT-00033/2020__EPI_ISL_417976 spike protein (1-1211)(A972C_R995C) Foldon construct
MFVFLVLLPLVSSQCVNLTTRTQLPPAYTNSFTRGVYYPDKVFRSSVLHSTQDLFLPFFSNVTWFHAIHVSGTNGTKRFDNPVLPFNDGVYFASTEKSNIIRGWIFGTTLDSKTQSLLIVNNATNVVIKVCEFQFCNDPFLGVYYHKNNKSWMESEFRVYSSANNCTFEYVSQPFLMDLEGKQGNFKNLREFVFKNIDGYFKIYSKHTPINLVRDLPQGFSALEPLVDLPIGINITRFQTLLALHRSYLTPGDSSSGLTAGAAAYYVGYLQPRTFLLKYNENGTITDAVDCALDPLSETKCTLKSFTVEKGIYQTSNFRVQPTESIVRFPNITNLCPFGEVFNATRFASVYAWNRKRISNCVADYSVLYNSASFSTFKCYGVSPTKLNDLCFTNVYADSFVIRGDEVRQIAPGQTGKIADYNYKLPDDFTGCVIAWNSNNLDSKVGGNYNYLYRLFRKSNLKPFERDISTEIYQAGSTPCNGVEGFNCYFPLQSYGFQPTNGVGYQPYRVVVLSFELLHAPATVCGPKKSTNLVKNKCVNFNFNGLTGTGVLTESNKKFLPFQQFGRDIADTTDAVRDPQTLEILDITPCSFGGVSVITPGTNTSNQVAVLYQGVNCTEVPVAIHADQLTPTWRVYSTGSNVFQTRAGCLIGAEHVNNSYECDIPIGAGICASYQTQTNSPRRARSVASQSIIAYTMSLGAENSVAYSNNSIAIPTNFTISVTTEILPVSMTKTSVDCTMYICGDSTECSNLLLQYGSFCTQLNRALTGIAVEQDKNTQEVFAQVKQIYKTPPIKDFGGFNFSQILPDPSKPSKRSFIEDLLFNKVTLADAGFIKQYGDCLGDIAARDLICAQKFNGLTVLPPLLTDEMIAQYTSALLAGTITSGWTFGAGAALQIPFAMQMAYRFNGIGVTQNVLYENQKLIANQFNSAIGKIQDSLSSTASALGKLQDVVNQNAQALNTLVKQLSSNFGCISSVLNDILSRLDKVEAEVQIDCLITGRLQSLQTYVTQQLIRAAEIRASANLAATKMSECVLGQSKRVDFCGKGYHLMSFPQSAPHGVVFLHVTYVPAQEKNFTTAPAICHDGKAHFPREGVFVSNGTHWFVTQRNFYEPQIITTDNTFVSGNCDVVIGIVNNTVYDPLQPELDSFKEELDKYFKNHTSPDVDLGDISGINASVVNIQKEIDRLNEVAKNLNESLIDLQELGKYEQYIKGGSGYIPEAPRDGQAYVRKDGEWVLLSTFL

SEQ ID NO: 6499 - protein, 1241 aa, Artificial Sequence
  SARS-CoV-2/USA/WI-13/2020__EPI_ISL_417516 spike protein (1-1211)(A972C_R995C) Foldon construct
MFVFLVLLPLVSSQCVNLTTRTQLPPAYTNSFTRGVYYPDKVFRSSVLHSTQDLFLPFFSNVTWFHAIHVSGTNGTKRFDNPVLPFNDGVYFASTEKSNIIRGWIFGTTLDSKTQSLLIVNNATNVVIKVCEFQFCNDPFLGVYYHKNNKSWMESEFRVYSSANNCTFEYVSQPFLMDLEGKQGNFKNLREFVFKNIDGYFKIYSKHTPINLVRDLPQGFSALEPLVDLPIGINITRFQTLLALHRSYLTPGDSSSGWTAGAAAYYVGYLQPRTFLLKYNENGTITDAVDCALDPLSETKCTLKSFTVEKGIYQTSNFRVLPTESIVRFPNITNLCPFGEVFNATRFASVYAWNRKRISNCVADYSVLYNSASFSTFKCYGVSPTKLNDLCFTNVYADSFVIRGDEVRQIAPGQTGKIADYNYKLPDDFTGCVIAWNSNNLDSKVGGNYNYLYRLFRKSNLKPFERDISTEIYQAGSTPCNGVEGFNCYFPLQSYGFQPTNGVGYQPYRVVVLSFELLHAPATVCGPKKSTNLVKNKCVNFNFNGLTGTGVLTESNKKFLPFQQFGRDIADTTDAVRDPQTLEILDITPCSFGGVSVITPGTNTSNQVAVLYQGVNCTEVPVAIHADQLTPTWRVYSTGSNVFQTRAGCLIGAEHVNNSYECDIPIGAGICASYQTQTNSPRRARSVASQSIIAYTMSLGAENSVAYSNNSIAIPTNFTISVTTEILPVSMTKTSVDCTMYICGDSTECSNLLLQYGSFCTQLNRALTGIAVEQDKNTQEVFAQVKQIYKTPPIKDFGGFNFSQILPDPSKPSKRSFIEDLLFNKVTLADAGFIKQYGDCLGDIAARDLICAQKFNGLTVLPPLLTDEMIAQYTSALLAGTITSGWTFGAGAALQIPFAMQMAYRFNGIGVTQNVLYENQKLIANQFNSAIGKIQDSLSSTASALGKLQDVVNQNAQALNTLVKQLSSNFGCISSVLNDILSRLDKVEAEVQIDCLITGRLQSLQTYVTQQLIRAAEIRASANLAATKMSECVLGQSKRVDFCGKGYHLMSFPQSAPHGVVFLHVTYVPAQEKNFTTAPAICHDGKAHFPREGVFVSNGTHWFVTQRNFYEPQIITTDNTFVSGNCDVVIGIVNNTVYDPLQPELDSFKEELDKYFKNHTSPDVDLGDISGINASVVNIQKEIDRLNEVAKNLNESLIDLQELGKYEQYIKGGSGYIPEAPRDGQAYVRKDGEWVLLSTFL

SEQ ID NO: 6500 - protein, 1240 aa, Artificial Sequence
  SARS-CoV-2/India/1-27/2020__EPI_ISL_413522 spike protein (1-1210)(A971C_R994C) Foldon construct
MFVFLVLLPLVSSQCVNLTTRTQLPPAYTNSFTRGVYYPDKVFRSSVLHSTQDLFLPFFSNVTWFHAIHVSGTNGTKRFDNPVLPFNDGVYFASTEKSNIIRGWIFGTTLDSKTQSLLIVNNATNVVIKVCEFQFCNDPFLGVYHKNNKSWMESEFRVYSSANNCTFEYVSQPFLMDLEGKQGNFKNLREFVFKNIDGYFKIYSKHTPINLVRDLPQGFSALEPLVDLPIGINITRFQTLLALHRSYLTPGDSSSGWTAGAAAYYVGYLQPRTFLLKYNENGTITDAVDCALDPLSETKCTLKSFTVEKGIYQTSNFRVQPTESIVRFPNITNLCPFGEVFNATRFASVYAWNRKRISNCVADYSVLYNSASFSTFKCYGVSPTKLNDLCFTNVYADSFVIRGDEVIQIAPGQTGKIADYNYKLPDDFTGCVIAWNSNNLDSKVGGNYNYLYRLFRKSNLKPFERDISTEIYQAGSTPCNGVEGFNCYFPLQSYGFQPTNGVGYQPYRVVVLSFELLHAPATVCGPKKSTNLVKNKCVNFNFNGLTGTGVLTESNKKFLPFQQFGRDIADTTDAVRDPQTLEILDITPCSFGGVSVITPGTNTSNQVAVLYQDVNCTEVPVAIHADQLTPTWRVYSTGSNVFQTRAGCLIGAEHVNNSYECDIPIGAGICASYQTQTNSPRRARSVASQSIIAYTMSLGAENSVAYSNNSIAIPTNFTISVTTEILPVSMTKTSVDCTMYICGDSTECSNLLLQYGSFCTQLNRALTGIAVEQDKNTQEVFAQVKQIYKTPPIKDFGGFNFSQILPDPSKPSKRSFIEDLLFNKVTLADAGFIKQYGDCLGDIAARDLICAQKFNGLTVLPPLLTDEMIAQYTSALLAGTITSGWTFGAGAALQIPFAMQMAYRFNGIGVTQNVLYENQKLIANQFNSAIGKIQDSLSSTASALGKLQDVVNQNAQALNTLVKQLSSNFGCISSVLNDILSRLDKVEAEVQIDCLITGRLQSLQTYVTQQLIRAAEIRASANLAATKMSECVLGQSKRVDFCGKGYHLMSFPQSAPHGVVFLHVTYVPAQEKNFTTAPAICHDGKAHFPREGVFVSNGTHWFVTQRNFYEPQIITTDNTFVSGNCDVVIGIVNNTVYDPLQPELDSFKEELDKYFKNHTSPDVDLGDISGINASVVNIQKEIDRLNEVAKNLNESLIDLQELGKYEQYIKGGSGYIPEAPRDGQAYVRKDGEWVLLSTFL

SEQ ID NO: 6501 - protein, 1235 aa, Artificial Sequence
  SARS-CoV-2/pangolin/Guangxi/P4L/2017__EPI_ISL_410538 spike protein (1-1205)(A966C_R989C) Foldon construct
MFVFLFVLPLVSSQCVNLTTRTGIPPGYTNSSTRGVYYPDKVFRSSILHLTQDLFLPFFSNVTWFNTINYQGGFKKFDNPVLPFNDGVYFASTEKSNIIRGWIFGTTLDARTQSLLIVNNATNVVIKVCEFQFCTDPFLGVYYHNNNKTWVENEFRVYSSANNCTFEYISQPFLMDLEGKQGNFKNLREFVFKNVDGYFKIYSKHTPIDLVRDLPRGFAALEPLVDLPIGINITRFQTLLALHRSYLTPGNLESGWTTGAAAYYVGYLQQRTFLLSYNQNGTITDAVDCSLDPLSETKCTLKSLTVEKGIYQTSNFRVQPTISIVRFPNITNLCPFGEVFNASKFASVYAWNRKRISNCVADYSVLYNSTSFSTFKCYGVSPTKLNDLCFTNVYADSFVVKGDEVRQIAPGQTGVIADYNYKLPDDFTGCVIAWNSVKQDALTGGNYGYLYRLFRKSKLKPFERDISTEIYQAGSTPCNGQVGLNCYYPLERYGFHPTTGVNYQPFRVVVLSFELLNGPATVCGPKLSTTLVKDKCVNFNFNGLTGTGVLTTSKKQFLPFQQFGRDISDTTDAVRDPQTLEILDITPCSFGGVSVITPGTNTSNQVAVLYQDVNCTEVPMAIHAEQLTPAWRVYSAGANVFQTRAGCLVGAEHVNNSYECDIPVGAGICASYHSMSSLRSVNQRSIIAYTMSLGAENSVAYSNNSIAIPTNFTISVTTEILPVSMTKTSVDCTMYICGDSIECSNLLLQYGSFCTQLNRALTGIAVEQDKNTQEVFAQVKQIYKTPPIKDFGGFNFSQILPDPSKPSKRSFIEDLLFNKVTLADAGFIKQYGDCLGDIAARDLICAQKFNGLTVLPPLLTDEMIAQYTSALLAGTITSGWTFGAGAALQIPFAMQMAYRFNGIGVTQNVLYENQKLIANQFNSAIGKIQDSLSSTASALGKLQDVVNQNAQALNTLVKQLSSNFGCISSVLNDILSRLDKVEAEVQIDCLITGRLQSLQTYVTQQLIRAAEIRASANLAATKMSECVLGQSKRVDFCGKGYHLMSFPQSAPHGVVFLHVTYVPAQEKNFTTAPAICHEGKAHFPREGVFVSNGTHWFITQRNFYEPQIITTDNTFVSGSCDVVIGIVNNTVYDPLQPELDSFKEELDKYFKNHTSPDVDLGDISGINASVVNIQKEIDRLNEVAKNLNESPIDLQELGKYEQYIKGGSGYIPEAPRDGQAYVRKDGEWVLLSTFL

SEQ ID NO: 6502 - protein, 1235 aa, Artificial Sequence
  SARS-CoV-2/pangolin/Guangxi/P5L/2017__EPI_ISL_410540 spike protein (1-1205)(A966C_R989C) Foldon construct
MFVFLFVLPLVSSQCVNLTTRTGIPPGYTNSSTRGVYYPDKVFRSSILHLTQDLFLPFFSNVTWFNTINYQGGFKKFDNPVLPFNDGVYFASTEKSNIIRGWIFGTTLDARTQSLLIVNNATNVVIKVCEFQFCTDPFLGVYYHNNNKTWVENEFRVYSSANNCTFEYISQPFLMDLEGKQGNFKNLREFVFKNVDGYFKIYSKHTPIDLVRDLPRGFAALEPLVDLPIGINITRFQTLLALHRSYLTPGKLESGWTTGAAAYYVGYLQQRTFLLSYNQNGTITDAVDCSLDPLSETKCTLKSLTVEKGIYQTSNFRVQPTISIVRFPNITNLCPFGEVFNASKFASVYAWNRKRISNCVADYSVLYNSTSFSTFKCYGVSPTKLNDLCFTNVYADSFVVKGDEVRQIAPGQTGVIADYNYKLPDDFTGCVIAWNSVKQDALTGGNYGYLYRLFRKSKLKPFERDISTEIYQAGSTPCNGQVGLNCYYPLERYGFHPTTGVNYQPFRVVVLSFELLNGPATVCGPKLSTTLVKDKCVNFNFNGLTGTGVLTTSKKQFLPFQQFGRDISDTTDAVRDPQTLEILDITPCSFGGVSVITPGTNTSNQVAVLYQDVNCTEVPMAIHAEQLTPAWRVYSAGANVFQTRAGCLVGAEHVNNSYECDIPVGAGICASYHSMSSFRSVNQRSIIAYTMSLGAENSVAYSNNSIAIPTNFTISVTTEILPVSMTKTSVDCTMYICGDSIECSNLLLQYGSFCTQLNRALTGIAVEQDKNTQEVFAQVKQIYKTPPIKDFGGFNFSQILPDPSKPSKRSFIEDLLFNKVTLADAGFIKQYGDCLGDIAARDLICAQKFNGLTVLPPLLTDEMIAQYTSALLAGTITSGWTFGAGAALQIPFAMQMAYRFNGIGVTQNVLYENQKLIANQFNSAIGKIQDSLSSTASALGKLQDVVNQNAQALNTLVKQLSSNFGCISSVLNDILSRLDKVEAEVQIDCLITGRLQSLQTYVTQQLIRAAEIRASANLAATKMSECVLGQSKRVDFCGKGYHLMSFPQSAPHGVVFLHVTYVPAQEKNFTTAPAICHEGKAHFPREGVFVSNGTHWFITQRNFYEPQIITTDNTFVSGSCDVVIGIVNNTVYDPLQPELDSFKEELDKYFKNHTSPDVDLGDISGINASVVNIQKEIDRLNEVAKNLNESLIDLQELGKYEQYIKGGSGYIPEAPRDGQAYVRKDGEWVLLSTFL

SEQ ID NO: 6503 - protein, 1235 aa, Artificial Sequence
  SARS-CoV-2/pangolin/Guangxi/P5E/2017__EPI_ISL_410541 spike protein (1-1205)(A966C_R989C) Foldon construct
MFVFLFVLPLVSSQCVNLTTRTGIPPGYTNSSTRGVYYPDKVFRSSILHLTQDLFLPFFSNVTWFNTITYQGGSKKFDNPVLPFNDGVYFASTEKSNIIRGWIFGTTLDARTQSLLIVNNATNVVIKVCEFQFCTDPFLGVYYHNNNKTWVENEFRVYSSANNCTFEYISQPFLMDLEGKQGNFKNLREFVFKNVDGYFKIYSKHTPIDLVRDLPRGFAALEPLVDLPIGINITRFQTLLALHRSYLTPGKLESGWTTGAAAYYVGYLQQRTFLLSYNQNGTITDAVDCSLDPLSETKCTLKSLTVEKGIYQTSNFRVQPTISIVRFPNITNLCPFGEVFNASKFASVYAWNRKRISNCVADYSVLYNSTSFSTFKCYGVSPTKLNDLCFTNVYADSFVVKGDEVRQIAPGQTGVIADYNYKLPDDFTGCVIAWNSVKQDALTGDNYGYLYRLFRKSKLKPFERDISTEIYQAGSTPCNGQVGLNCYYPLERYGFHPTTGVNYQPFRVVVLSFELLNGPATVCGPKLSTTLVKDKCVNFNFNGLTGTGVLTTSKKQFLPFQQFGRDISDTTDAVRDPQTLEILDITPCSFGGVSVITPGTNTSNQVAVLYQDVNCTEVPMAIHAEQLTPAWRVYSAGANVFQTRAGCLVGAEHVNNSYECDIPVGAGICASYHSMSSFRSVNQRSIIAYTMSLGAENSVAYSNNSIAIPTNFTISVTTEILPVSMTKTSVDCTMYICGDSIECSNLLLQYGSFCTQLNRALTGIAVEQDKNTQEVFAQVKQIYKTPPIKDFGGFNFSQILPDPSKPSKRSFIEDLLFNKVTLADAGFIKQYGDCLGDIAARDLICAQKFNGLTVLPPLLTDEMIAQYTSALLAGTITSGWTFGAGAALQIPFAMQMAYRFNGIGVTQNVLYENQKLIANQFNSAIGKIQDSLSSTASALGKLQDVVNQNAQALNTLVKQLSSNFGCISSVLNDILSRLDKVEAEVQIDCLITGRLQSLQTYVTQQLIRAAEIRASANLAATKMSECVLGQSKRVDFCGKGYHLMSFPQSAPHGVVFLHVTYVPAQEKNFTTAPAICHEGKAHFPREGVFVSNGTHWFITQRNFYEPQIITTDNTFVSGSCDVVIGIVNNTVYDPLQPELDSFKEELDKYFKNHTSPDVDLGDISGINASVVNIQKEIDRLNEVAKNLNESLIDLQELGKYEQYIKGGSGYIPEAPRDGQAYVRKDGEWVLLSTFL

SEQ ID NO: 6504 - protein, 1233 aa, Artificial Sequence
  SARS-CoV-2/pangolin/Guangxi/P1E/2017__EPI_ISL_410539 spike protein (1-1203)(A964C_R987C) Foldon construct
MFVFLFVLPLVSSQCVNLTTRTGIQPGYTNSSTRGVYYPDKVFRSSILHLTQDLFLPFFSNVTWFNTINYQGGFKKFDNPVLPFNDGVYFASTEKSNIIRGWIFGTTLDARTQSLLIVNNATNVVIKVCEFQFCTDPFLGVYYHNNNKTWVENEFRVYSSANNCTFEYISQPFLMDLEGKQGNFKNLREFVFKNVDGYFKIYSKHTPIDLVRDLPRGFAALEPLVDLPIGINITRFQTLLALHRSYLTPGKLESGWTTGAAAYYVGYLQQRTFLLSYNQNGTITDAVDCSLDPLSETKCTLKSLTVEKGIYQTSNFRVQPTISIVRFPNITNLCPFGEVFNASKFASVYAWNRKRISNCVADYSVLYNSTSFSTFKCYGVSPTKLNDLCFTNVYADSFVVKGDEVRQIAPGQTGVIADYNYKLPDDFTGCVIAWNSVKQDALTGGNYLYRLFRKSKLKPFERDISTEIYQAGSTPCNGQVGLNCYYPLERYGFHPTTGVNYQPFRVVVLSFELLNGPATVCGPKLSTTLVKDKCVNFNFNGLTGTGVLTTSKKQFLPFQQFGRDISDTTDAVRDPQTLEILDITPCSFGGVSVITPGTNTSNQVAVLYQDVNCTEVPMAIHAEQLTPAWRVYSAGANVFQTRAGCLVGAEHVNNSYECDIPVGAGICASYHSMSSLRSVNQRSIIAYTMSLGAENSVAYSNNSIAIPTNFTISVTTEILPVSMTKTSVDCTMYICGDSIECSNLLLQYGSFCTQLNRALTGIAVEQDKNTQEVFAQVKQIYKTPPIKDFGGFNFSQILPDPSKPSKRSFIEDLLFNKVTLADAGFIKQYGDCLGDIAARDLICAQKFNGLTVLPPLLTDEMIAQYTSALLAGTITSGWTFGAGAALQIPFAMQMAYRFNGIGVTQNVLYENQKLIANQFNSAIGKIQDSLSSTASALGKLQDVVNQNAQALNTLVKQLSSNFGCISSVLNDILSRLDKVEAEVQIDCLITGRLQSLQTYVTQQLIRAAEIRASANLAATKMSECVLGQSKRVDFCGKGYHLMSFPQSAPHGVVFLHVTYVPAQEKNFTTAPAICHEGKAHFPREGVFVSNGTHWFITQRNFYEPQIITTDNTFVSGSCDVVIGIVNNTVYDPLQPELDSFKEELDKYFKNHTSPDVDLGDISGINASVVNIQKEIDRLNEVAKNLNESLIDLQELGKYEQYIKGGSGYIPEAPRDGQAYVRKDGEWVLLSTFL

SEQ ID NO: 6505 - protein, 1241 aa, Artificial Sequence
  SARS-CoV-2/Wuhan/WIV05/2019__EPI_ISL_402128 spike protein (1-1211)(A890C_V1040C) Foldon construct
MFVFLVLLPLVSSQCVNLTTRTQLPPAYTNSFTRGVYYPDKVFRSSVLHSTQDLFLPFFSNVTWFHAIHVSGTNGTKRFDNPVLPFNDGVYFASTEKSNIIRGWIFGTTLDSKTQSLLIVNNATNVVIKVCEFQFCNDPFLGVYYHKNNKSWMESEFRVYSSANNCTFEYVSQPFLMDLEGKQGNFKNLREFVFKNIDGYFKIYSKHTPINLVRDLPQGFSALEPLVDLPIGINITRFQTLLALHRSYLTPGDSSSGWTAGAAAYYVGYLQPRTFLLKYNENGTITDAVDCALDPLSETKCTLKSFTVEKGIYQTSNFRVQPTESIVRFPNITNLCPFGEVFNATRFASVYAWNRKRISNCVADYSVLYNSASFSTFKCYGVSPTKLNDLCFTNVYADSFVIRGDEVRQIAPGQTGKIADYNYKLPDDFTGCVIAWNSNNLDSKVGGNYNYLYRLFRKSNLKPFERDISTEIYQAGSTPCNGVEGFNCYFPLQSYGFQPTNGVGYQPYRVVVLSFELLHAPATVCGPKKSTNLVKNKCVNFNFNGLTGTGVLTESNKKFLPFQQFGRDIADTTDAVRDPQTLEILDITPCSFGGVSVITPGTNTSNQVAVLYQDVNCTEVPVAIHADQLTPTWRVYSTGSNVFQTRAGCLIGAEHVNNSYECDIPIGAGICASYQTQTNSPRRARSVASQSIIAYTMSLGAENSVAYSNNSIAIPTNFTISVTTEILPVSMTKTSVDCTMYICGDSTECSNLLLQYGSFCTQLNRALTGIAVEQDKNTQEVFAQVKQIYKTPPIKDFGGFNFSQILPDPSKPSKRSFIEDLLFNKVTLADAGFIKQYGDCLGDIAARDLICAQKFNGLTVLPPLLTDEMIAQYTSALLAGTITSGWTFGCGAALQIPFAMQMAYRFNGIGVTQNVLYENQKLIANQFNSAIGKIQDSLSSTASALGKLQDVVNQNAQALNTLVKQLSSNFGAISSVLNDILSRLDKVEAEVQIDRLITGRLQSLQTYVTQQLIRAAEIRASANLAATKMSECVLGQSKRCDFCGKGYHLMSFPQSAPHGVVFLHVTYVPAQEKNFTTAPAICHDGKAHFPREGVFVSNGTHWFVTQRNFYEPQIITTDNTFVSGNCDVVIGIVNNTVYDPLQPELDSFKEELDKYFKNHTSPDVDLGDISGINASVVNIQKEIDRLNEVAKNLNESLIDLQELGKYEQYIKGGSGYIPEAPRDGQAYVRKDGEWVLLSTFL

SEQ ID NO: 6506 - protein, 1237 aa, Artificial Sequence; identical to SEQ ID NO: 6238
  SARS-CoV-2/bat/Yunnan/RaTG13/2013__EPI_ISL_402131 spike protein (1-1207)(A886C_V1036C) Foldon construct

SEQ ID NO: 6507 - protein, 1241 aa, Artificial Sequence; identical to SEQ ID NO: 6239
  SARS-CoV-2/Wuhan/HBCDC-HB-01/2019__EPI_ISL_402132 spike protein (1-1211)(A890C_V1040C) Foldon construct

SEQ ID NO: 6508 - protein, 1241 aa, Artificial Sequence; identical to SEQ ID NO: 6240
  SARS-CoV-2/Guangdong/20SF028/2020__EPI_ISL_403936 spike protein (1-1211)(A890C_V1040C) Foldon construct

SEQ ID NO: 6509 - protein, 1241 aa, Artificial Sequence; identical to SEQ ID NO: 6241
  SARS-CoV-2/Shenzhen/SZTH-001/2020__EPI_ISL_406592 spike protein (1-1211)(A890C_V1040C) Foldon construct

SEQ ID NO: 6510 - protein, 1241 aa, Artificial Sequence; identical to SEQ ID NO: 6242
  SARS-CoV-2/Shenzhen/SZTH-004/2020__EPI_ISL_406595 spike protein (1-1211)(A890C_V1040C) Foldon construct

SEQ ID NO: 6511 - protein, 1241 aa, Artificial Sequence; identical to SEQ ID NO: 6243
  SARS-CoV-2/France/IDF0372/2020__EPI_ISL_406596 spike protein (1-1211)(A890C_V1040C) Foldon construct

SEQ ID NO: 6512 - protein, 1241 aa, Artificial Sequence; identical to SEQ ID NO: 6244
  SARS-CoV-2/Australia/VIC01/2020__EPI_ISL_406844 spike protein (1-1211)(A890C_V1040C) Foldon construct

SEQ ID NO: 6513 - protein, 1241 aa, Artificial Sequence; identical to SEQ ID NO: 6245
  SARS-CoV-2/Germany/BavPat1/2020__EPI_ISL_406862 spike protein (1-1211)(A890C_V1040C) Foldon construct

SEQ ID NO: 6514 - protein, 1241 aa, Artificial Sequence; identical to SEQ ID NO: 6246
  SARS-CoV-2/Wuhan/HBCDC-HB-02/2020__EPI_ISL_412978 spike protein (1-1211)(A890C_V1040C) Foldon construct

SEQ ID NO: 6515 - protein, 1241 aa, Artificial Sequence; identical to SEQ ID NO: 6247
  SARS-CoV-2/Australia/QLD02/2020__EPI_ISL_407896 spike protein (1-1211)(A890C_V1040C) Foldon construct

SEQ ID NO: 6516 - protein, 1241 aa, Artificial Sequence; identical to SEQ ID NO: 6248
  SARS-CoV-2/India/1-31/2020__EPI_ISL_413523 spike protein (1-1211)(A890C_V1040C) Foldon construct

SEQ ID NO: 6517 - protein, 1241 aa, Artificial Sequence; identical to SEQ ID NO: 6249
  SARS-CoV-2/Guangdong/GD2020087-P0008/2020__EPI_ISL_413863 spike protein (1-1211)(A890C_V1040C) Foldon construct

SEQ ID NO: 6518 - protein, 1241 aa, Artificial Sequence; identical to SEQ ID NO: 6250
  SARS-CoV-2/Sweden/01/2020__EPI_ISL_411951 spike protein (1-1211)(A890C_V1040C) Foldon construct

SEQ ID NO: 6519 - protein, 1241 aa, Artificial Sequence; identical to SEQ ID NO: 6251
  SARS-CoV-2/Tianmen/HBCDC-HB-07/2020__EPI_ISL_412983 spike protein (1-1211)(A890C_V1040C) Foldon construct

SEQ ID NO: 6520 - protein, 1241 aa, Artificial Sequence; identical to SEQ ID NO: 6252
  SARS-CoV-2/Hong Kong/case42_VM20002493/2020__EPI_ISL_414527 spike protein (1-1211)(A890C_V1040C) Foldon construct

SEQ ID NO: 6521 - protein, 1241 aa, Artificial Sequence; identical to SEQ ID NO: 6253
  SARS-CoV-2/USA/CruiseA-23/2020__EPI_ISL_414482 spike protein (1-1211)(A890C_V1040C) Foldon construct

SEQ ID NO: 6522 - protein, 1241 aa, Artificial Sequence; identical to SEQ ID NO: 6254
  SARS-CoV-2/Hong Kong/case85_VM20002868/2020__EPI_ISL_414519 spike protein (1-1211)(A890C_V1040C) Foldon construct

SEQ ID NO: 6523 - protein, 1241 aa, Artificial Sequence; identical to SEQ ID NO: 6245
  SARS-CoV-2/England/200990660/2020__EPI_ISL_414523 spike protein (1-1211)(A890C_V1040C) Foldon construct

SEQ ID NO: 6524 - protein, 1241 aa, Artificial Sequence; identical to SEQ ID NO: 6256
  SARS-CoV-2/Australia/NSW09/2020__EPI_ISL_413595 spike protein (1-1211)(A890C_V1040C) Foldon construct

SEQ ID NO: 6525 - protein, 1241 aa, Artificial Sequence; identical to SEQ ID NO: 6237
  SARS-CoV-2/Australia/NSW10/2020__EPI_ISL_413596 spike protein (1-1211)(A890C_V1040C) Foldon construct

SEQ ID NO: 6526 - protein, 1241 aa, Artificial Sequence; identical to SEQ ID NO: 6258
  SARS-CoV-2/Switzerland/1000477797/2020__EPI_ISL_413023 spike protein (1-1211)(A890C_V1040C) Foldon construct

SEQ ID NO: 6527 - protein, 1241 aa, Artificial Sequence; identical to SEQ ID NO: 6259
  SARS-CoV-2/Belgium/BA-02291/2020__EPI_ISL_415159 spike protein (1-1211)(A890C_V1040C) Foldon construct

SEQ ID NO: 6528 - protein, 1241 aa, Artificial Sequence; identical to SEQ ID NO: 6260
  SARS-CoV-2/USA/WA8-UW5/2020__EPI_ISL_413486 spike protein (1-1211)(A890C_V1040C) Foldon construct

SEQ ID NO: 6529 - protein, 1241 aa, Artificial Sequence; identical to SEQ ID NO: 6261
  SARS-CoV-2/England/20102000506/2020__EPI_ISL_415147 spike protein (1-1211)(A890C_V1040C) Foldon construct

SEQ ID NO: 6530 - protein, 1241 aa, Artificial Sequence; identical to SEQ ID NO: 6262
  SARS-CoV-2/Belgium/VAG-03013/2020__EPI_ISL_415155 spike protein (1-1211)(A890C_V1040C) Foldon construct

SEQ ID NO: 6531 - protein, 1241 aa, Artificial Sequence; identical to SEQ ID NO: 6263
  SARS-CoV-2/Belgium/BC-03016/2020__EPI_ISL_415157 spike protein (1-1211)(A890C_V1040C) Foldon construct

SEQ ID NO: 6532 - protein, 1241 aa, Artificial Sequence; identical to SEQ ID NO: 6264
  SARS-CoV-2/Germany/BavPat3/2020__EPI_ISL_414521 spike protein (1-1211)(A890C_V1040C) Foldon construct

SEQ ID NO: 6533 - protein, 1241 aa, Artificial Sequence; identical to SEQ ID NO: 6265
  SARS-CoV-2/France/HF1805/2020__EPI_ISL_414628 spike protein (1-1211)(A890C_V1040C) Foldon construct

SEQ ID NO: 6534 - protein, 1241 aa, Artificial Sequence; identical to SEQ ID NO: 6266
  SARS-CoV-2/Netherlands/ZuidHolland_9/2020__EPI_ISL_414445 spike protein (1-1211)(A890C_V1040C) Foldon construct

SEQ ID NO: 6535 - protein, 1241 aa, Artificial Sequence; identical to SEQ ID NO: 6267
  SARS-CoV-2/Finland/FIN03032020A/2020__EPI_ISL_413602 spike protein (1-1211)(A890C_V1040C) Foldon construct

SEQ ID NO: 6536 - protein, 1241 aa, Artificial Sequence; identical to SEQ ID NO: 6268
  SARS-CoV-2/France/GE1977/2020__EPI_ISL_414632 spike protein (1-1211)(A890C_V1040C) Foldon construct

SEQ ID NO: 6537 - protein, 1241 aa, Artificial Sequence; identical to SEQ ID NO: 6269
  SARS-CoV-2/Finland/FIN-313/2020__EPI_ISL_414641 spike protein (1-1211)(A890C_V1040C) Foldon construct

SEQ ID NO: 6538 - protein, 1241 aa, Artificial Sequence; identical to SEQ ID NO: 6270
  SARS-CoV-2/Netherlands/ZuidHolland_2/2020__EPI_ISL_414556 spike protein (1-1211)(A890C_V1040C) Foldon construct

SEQ ID NO: 6539 - protein, 1241 aa, Artificial Sequence; identical to SEQ ID NO: 6271
  SARS-CoV-2/USA/WA-UW31/2020__EPI_ISL_414618 spike protein (1-1211)(A890C_V1040C) Foldon construct

SEQ ID NO: 6540 - protein, 1241 aa, Artificial Sequence; identical to SEQ ID NO: 6272
  SARS-CoV-2/South Korea/SNU01/2020__EPI_ISL_411929 spike protein (1-1211)(A890C_V1040C) Foldon construct

SEQ ID NO: 6541 - protein, 1241 aa, Artificial Sequence; identical to SEQ ID NO: 6273
  SARS-CoV-2/China/WF0004/2020__EPI_ISL_413694 spike protein (1-1211)(A890C_V1040C) Foldon construct

SEQ ID NO: 6542 - protein, 1241 aa, Artificial Sequence; identical to SEQ ID NO: 6274
  SARS-CoV-2/China/WF0028/2020__EPI_ISL_413791 spike protein (1-1211)(A890C_V1040C) Foldon construct

SEQ ID NO: 6543 - protein, 1241 aa, Artificial Sequence; identical to SEQ ID NO: 6275
  SARS-CoV-2/2019-nCoV/USA-CruiseA-18/2020__MT159716.1 spike protein (1-1211)(A890C_V1040C) Foldon construct

SEQ ID NO: 6544 - protein, 1241 aa, Artificial Sequence; identical to SEQ ID NO: 6276
  SARS-CoV-2/SARS-CoV-2/Yunnan-01/human/2020/CHN__MT049951.1 spike protein (1-1211)(A890C_V1040C) Foldon construct

SEQ ID NO: 6545 - protein, 1241 aa, Artificial Sequence; identical to SEQ ID NO: 6277
  SARS-CoV-2/USA/WA-UW292/2020__EPI_ISL_418077 spike protein (1-1211)(A890C_V1040C) Foldon construct

SEQ ID NO: 6546 - protein, 1241 aa, Artificial Sequence; identical to SEQ ID NO: 6278
  SARS-CoV-2/Iceland/192/2020__EPI_ISL_417819 spike protein (1-1211)(A890C_V1040C) Foldon construct

SEQ ID NO: 6547 - protein, 1241 aa, Artificial Sequence; identical to SEQ ID NO: 6279
  SARS-CoV-2/Belgium/ULG-6939/2020__EPI_ISL_417020 spike protein (1-1211)(A890C_V1040C) Foldon construct

SEQ ID NO: 6548 - protein, 1241 aa, Artificial Sequence; identical to SEQ ID NO: 6280
  SARS-CoV-2/France/HF2496/2020__EPI_ISL_418231 spike protein (1-1211)(A890C_V1040C) Foldon construct

SEQ ID NO: 6549 - protein, 1241 aa, Artificial Sequence; identical to SEQ ID NO: 6281
  SARS-CoV-2/USA/WA-UW291/2020__EPI_ISL_418076 spike protein (1-1211)(A890C_V1040C) Foldon construct

SEQ ID NO: 6550 - protein, 1241 aa, Artificial Sequence; identical to SEQ ID NO: 6245
  SARS-CoV-2/Portugal/PT0034/2020__EPI_ISL_418019 spike protein (1-1211)(A890C_V1040C) Foldon construct

SEQ ID NO: 6551 - protein, 1241 aa, Artificial Sequence; identical to SEQ ID NO: 6283
  SARS-CoV-2/Iceland/202/2020__EPI_ISL_417750 spike protein (1-1211)(A890C_V1040C) Foldon construct

SEQ ID NO: 6552 - protein, 1241 aa, Artificial Sequence; identical to SEQ ID NO: 6284
  SARS-CoV-2/USA/WA-UW261/2020__EPI_ISL_418046 spike protein (1-1211)(A890C_V1040C) Foldon construct

SEQ ID NO: 6553 - protein, 1241 aa, Artificial Sequence; identical to SEQ ID NO: 6285
  SARS-CoV-2/Portugal/PT0035/2020__EPI_ISL_418020 spike protein (1-1211)(A890C_V1040C) Foldon construct

SEQ ID NO: 6554 - protein, 1241 aa, Artificial Sequence; identical to SEQ ID NO: 6286
  SARS-CoV-2/USA/NY-NYUMC7/2020__EPI_ISL_418192 spike protein (1-1211)(A890C_V1040C) Foldon construct

SEQ ID NO: 6555 - protein, 1241 aa, Artificial Sequence; identical to SEQ ID NO: 6287
  SARS-CoV-2/Iceland/189/2020__EPI_ISL_417709 spike protein (1-1211)(A890C_V1040C) Foldon construct

SEQ ID NO: 6556 - protein, 1241 aa, Artificial Sequence; identical to SEQ ID NO: 6288
  SARS-CoV-2/Australia/NSW56/2020__EPI_ISL_417408 spike protein (1-1211)(A890C_V1040C) Foldon construct

SEQ ID NO: 6557 - protein, 1241 aa, Artificial Sequence; identical to SEQ ID NO: 6289
  SARS-CoV-2/Iceland/280/2020__EPI_ISL_417608 spike protein (1-1211)(A890C_V1040C) Foldon construct

SEQ ID NO: 6558 - protein, 1241 aa, Artificial Sequence; identical to SEQ ID NO: 6245
  SARS-CoV-2/Iceland/247/2020__EPI_ISL_417575 spike protein (1-1211)(A890C_V1040C) Foldon construct

SEQ ID NO: 6559 - protein, 1241 aa, Artificial Sequence; identical to SEQ ID NO: 6291
  SARS-CoV-2/Iceland/238/2020__EPI_ISL_417566 spike protein (1-1211)(A890C_V1040C) Foldon construct

SEQ ID NO: 6560 - protein, 1241 aa, Artificial Sequence; identical to SEQ ID NO: 6292
  SARS-CoV-2/Greece/16/2020__EPI_ISL_418265 spike protein (1-1211)(A890C_V1040C) Foldon construct

SEQ ID NO: 6561 - protein, 1241 aa, Artificial Sequence; identical to SEQ ID NO: 6293
  SARS-CoV-2/Iceland/319/2020__EPI_ISL_417648 spike protein (1-1211)(A890C_V1040C) Foldon construct

SEQ ID NO: 6562 - protein, 1241 aa, Artificial Sequence; identical to SEQ ID NO: 6294
  SARS-CoV-2/Congo/94/2020__EPI_ISL_417947 spike protein (1-1211)(A890C_V1040C) Foldon construct

SEQ ID NO: 6563 - protein, 1241 aa, Artificial Sequence; identical to SEQ ID NO: 6295
  SARS-CoV-2/Congo/158/2020__EPI_ISL_417950 spike protein (1-1211)(A890C_V1040C) Foldon construct

SEQ ID NO: 6564 - protein, 1241 aa, Artificial Sequence; identical to SEQ ID NO: 6296
  SARS-CoV-2/USA/UT-00034/2020__EPI_ISL_417977 spike protein (1-1211)(A890C_V1040C) Foldon construct

SEQ ID NO: 6565 - protein, 1241 aa, Artificial Sequence; identical to SEQ ID NO: 6297
  SARS-CoV-2/USA/UT-00033/2020__EPI_ISL_417976 spike protein (1-1211)(A890C_V1040C) Foldon construct

SEQ ID NO: 6566 - protein, 1241 aa, Artificial Sequence; identical to SEQ ID NO: 6298
  SARS-CoV-2/USA/WI-13/2020__EPI_ISL_417516 spike protein (1-1211)(A890C_V1040C) Foldon construct

SEQ ID NO: 6567 - protein, 1240 aa, Artificial Sequence; identical to SEQ ID NO: 6299
  SARS-CoV-2/India/1-27/2020__EPI_ISL_413522 spike protein (1-1210)(A889C_V1039C) Foldon construct

SEQ ID NO: 6568 - protein, 1235 aa, Artificial Sequence; identical to SEQ ID NO: 6300
  SARS-CoV-2/pangolin/Guangxi/P4L/2017__EPI_ISL_410538 spike protein (1-1205)(A884C_V1034C) Foldon construct

SEQ ID NO: 6569 - protein, 1235 aa, Artificial Sequence; identical to SEQ ID NO: 6301
  SARS-CoV-2/pangolin/Guangxi/P5L/2017__EPI_ISL_410540 spike protein (1-1205)(A884C_V1034C) Foldon construct

SEQ ID NO: 6570 - protein, 1235 aa, Artificial Sequence; identical to SEQ ID NO: 6302
  SARS-CoV-2/pangolin/Guangxi/P5E/2017__EPI_ISL_410541 spike protein (1-1205)(A884C_V1034C) Foldon construct

SEQ ID NO: 6571 - protein, 1233 aa, Artificial Sequence; identical to SEQ ID NO: 6303
  SARS-CoV-2/pangolin/Guangxi/P1E/2017__EPI_ISL_410539 spike protein (1-1203)(A882C_V1032C) Foldon construct

SEQ ID NO: 6572 - protein, 1241 aa, Artificial Sequence
  SARS-CoV-2/Wuhan/WIV05/2019__EPI_ISL_402128 spike protein (1-1211)(T874C_S1055C) Foldon construct
MFVFLVLLPLVSSQCVNLTTRTQLPPAYTNSFTRGVYYPDKVFRSSVLHSTQDLFLPFFSNVTWFHAIHVSGTNGTKRFDNPVLPFNDGVYFASTEKSNIIRGWIFGTTLDSKTQSLLIVNNATNVVIKVCEFQFCNDPFLGVYYHKNNKSWMESEFRVYSSANNCTFEYVSQPFLMDLEGKQGNFKNLREFVFKNIDGYFKIYSKHTPINLVRDLPQGFSALEPLVDLPIGINITRFQTLLALHRSYLTPGDSSSGWTAGAAAYYVGYLQPRTFLLKYNENGTITDAVDCALDPLSETKCTLKSFTVEKGIYQTSNFRVQPTESIVRFPNITNLCPFGEVFNATRFASVYAWNRKRISNCVADYSVLYNSASFSTFKCYGVSPTKLNDLCFTNVYADSFVIRGDEVRQIAPGQTGKIADYNYKLPDDFTGCVIAWNSNNLDSKVGGNYNYLYRLFRKSNLKPFERDISTEIYQAGSTPCNGVEGFNCYFPLQSYGFQPTNGVGYQPYRVVVLSFELLHAPATVCGPKKSTNLVKNKCVNFNFNGLTGTGVLTESNKKFLPFQQFGRDIADTTDAVRDPQTLEILDITPCSFGGVSVITPGTNTSNQVAVLYQDVNCTEVPVAIHADQLTPTWRVYSTGSNVFQTRAGCLIGAEHVNNSYECDIPIGAGICASYQTQTNSPRRARSVASQSIIAYTMSLGAENSVAYSNNSIAIPTNFTISVTTEILPVSMTKTSVDCTMYICGDSTECSNLLLQYGSFCTQLNRALTGIAVEQDKNTQEVFAQVKQIYKTPPIKDFGGFNFSQILPDPSKPSKRSFIEDLLFNKVTLADAGFIKQYGDCLGDIAARDLICAQKFNGLTVLPPLLTDEMIAQYCSALLAGTITSGWTFGAGAALQIPFAMQMAYRFNGIGVTQNVLYENQKLIANQFNSAIGKIQDSLSSTASALGKLQDVVNQNAQALNTLVKQLSSNFGAISSVLNDILSRLDKVEAEVQIDRLITGRLQSLQTYVTQQLIRAAEIRASANLAATKMSECVLGQSKRVDFCGKGYHLMSFPQCAPHGVVFLHVTYVPAQEKNFTTAPAICHDGKAHFPREGVFVSNGTHWFVTQRNFYEPQIITTDNTFVSGNCDVVIGIVNNTVYDPLQPELDSFKEELDKYFKNHTSPDVDLGDISGINASVVNIQKEIDRLNEVAKNLNESLIDLQELGKYEQYIKGGSGYIPEAPRDGQAYVRKDGEWVLLSTFL

SEQ ID NO: 6573 - protein, 1237 aa, Artificial Sequence
  SARS-CoV-2/bat/Yunnan/RaTG13/2013__EPI_ISL_402131 spike protein (1-1207)(T870C_S1051C) Foldon construct
MFVFLVLLPLVSSQCVNLTTRTQLPPAYTNSSTRGVYYPDKVFRSSVLHLTQDLFLPFFSNVTWFHAIHVSGTNGIKRFDNPVLPFNDGVYFASTEKSNIIRGWIFGTTLDSKTQSLLIVNNATNVVIKVCEFQFCNDPFLGVYYHKNNKSWMESEFRVYSSANNCTFEYVSQPFLMDLEGKQGNFKNLREFVFKNIDGYFKIYSKHTPINLVRDLPPGFSALEPLVDLPIGINITRFQTLLALHRSYLTPGDSSSGWTAGAAAYYVGYLQPRTFLLKYNENGTITDAVDCALDPLSETKCTLKSFTVEKGIYQTSNFRVQPTDSIVRFPNITNLCPFGEVFNATTFASVYAWNRKRISNCVADYSVLYNSTSFSTFKCYGVSPTKLNDLCFTNVYADSFVITGDEVRQIAPGQTGKIADYNYKLPDDFTGCVIAWNSKHIDAKEGGNFNYLYRLFRKANLKPFERDISTEIYQAGSKPCNGQTGLNCYYPLYRYGFYPTDGVGHQPYRVVVLSFELLNAPATVCGPKKSTNLVKNKCVNFNFNGLTGTGVLTESNKKFLPFQQFGRDIADTTDAVRDPQTLEILDITPCSFGGVSVITPGTNASNQVAVLYQDVNCTEVPVAIHADQLTPTWRVYSTGSNVFQTRAGCLIGAEHVNNSYECDIPIGAGICASYQTQTNSRSVASQSIIAYTMSLGAENSVAYSNNSIAIPTNFTISVTTEILPVSMTKTSVDCTMYICGDSTECSNLLLQYGSFCTQLNRALTGIAVEQDKNTQEVFAQVKQIYKTPPIKDFGGFNFSQILPDPSKPSKRSFIEDLLFNKVTLADAGFIKQYGDCLGDIAARDLICAQKFNGLTVLPPLLTDEMIAQYCSALLAGTITSGWTFGAGAALQIPFAMQMAYRFNGIGVTQNVLYENQKLIANQFNSAIGKIQDSLSSTASALGKLQDVVNQNAQALNTLVKQLSSNFGAISSVLNDILSRLDKVEAEVQIDRLITGRLQSLQTYVTQQLIRAAEIRASANLAATKMSECVLGQSKRVDFCGKGYHLMSFPQCAPHGVVFLHVTYVPAQEKNFTTAPAICHDGKAHFPREGVFVSNGTHWFVTQRNFYEPQIITTDNTFVSGSCDVVIGIVNNTVYDPLQPELDSFKEELDKYFKNHTSPDVDLGDISGINASVVNIQKEIDRLNEVAKNLNESLIDLQELGKYEQYIKGGSGYIPEAPRDGQAYVRKDGEWVLLSTFL

SEQ ID NO: 6574 - protein, 1241 aa, Artificial Sequence
  SARS-CoV-2/Wuhan/HBCDC-HB-01/2019__EPI_ISL_402132 spike protein (1-1211)(T874C_S1055C) Foldon construct
MFVFLVLLPLVSSQCVNLTTRTQLPPAYTNSITRGVYYPDKVFRSSVLHSTQDLFLPFFSNVTWFHAIHVSGTNGTKRFDNPVLPFNDGVYFASTEKSNIIRGWIFGTTLDSKTQSLLIVNNATNVVIKVCEFQFCNDPFLGVYYHKNNKSWMESEFRVYSSANNCTFEYVSQPFLMDLEGKQGNFKNLREFVFKNIDGYFKIYSKHTPINLVRDLPQGFSALEPLVDLPIGINITRFQTLLALHRSYLTPGDSSSGWTAGAAAYYVGYLQPRTFLLKYNENGTITDAVDCALDPLSETKCTLKSFTVEKGIYQTSNFRVQPTESIVRFPNITNLCPFGEVFNATRFASVYAWNRKRISNCVADYSVLYNSASFSTFKCYGVSPTKLNDLCFTNVYADSFVIRGDEVRQIAPGQTGKIADYNYKLPDDFTGCVIAWNSNNLDSKVGGNYNYLYRLFRKSNLKPFERDISTEIYQAGSTPCNGVEGFNCYFPLQSYGFQPTNGVGYQPYRVVVLSFELLHAPATVCGPKKSTNLVKNKCVNFNFNGLTGTGVLTESNKKFLPFQQFGRDIADTTDAVRDPQTLEILDITPCSFGGVSVITPGTNTSNQVAVLYQDVNCTEVPVAIHADQLTPTWRVYSTGSNVFQTRAGCLIGAEHVNNSYECDIPIGAGICASYQTQTNSPRRARSVASQSIIAYTMSLGAENSVAYSNNSIAIPTNFTISVTTEILPVSMTKTSVDCTMYICGDSTECSNLLLQYGSFCTQLNRALTGIAVEQDKNTQEVFAQVKQIYKTPPIKDFGGFNFSQILPDPSKPSKRSFIEDLLFNKVTLADAGFIKQYGDCLGDIAARDLICAQKFNGLTVLPPLLTDEMIAQYCSALLAGTITSGWTFGAGAALQIPFAMQMAYRFNGIGVTQNVLYENQKLIANQFNSAIGKIQDSLSSTASALGKLQDVVNQNAQALNTLVKQLSSNFGAISSVLNDILSRLDKVEAEVQIDRLITGRLQSLQTYVTQQLIRAAEIRASANLAATKMSECVLGQSKRVDFCGKGYHLMSFPQCAPHGVVFLHVTYVPAQEKNFTTAPAICHDGKAHFPREGVFVSNGTHWFVTQRNFYEPQIITTDNTFVSGNCDVVIGIVNNTVYDPLQPELDSFKEELDKYFKNHTSPDVDLGDISGINASVVNIQKEIDRLNEVAKNLNESLIDLQELGKYEQYIKGGSGYIPEAPRDGQAYVRKDGEWVLLSTFL

SEQ ID NO: 6575 - protein, 1241 aa, Artificial Sequence
  SARS-CoV-2/Guangdong/20SF028/2020__EPI_ISL_403936 spike protein (1-1211)(T874C_S1055C) Foldon construct
MFVFLVLLPLVSSQCVNLTTRTQLPPAYTNSFTRGVYYPDKVFRSSVLYSTQDLFLPFFSNVTWFHAIHVSGTNGTKRFDNPVLPFNDGVYFASTEKSNIIRGWIFGTTLDSKTQSLLIVNNATNVVIKVCEFQFCNDPFLGVYYHKNNKSWMESEFRVYSSANNCTFEYVSQPFLMDLEGKQGNFKNLREFVFKNIDGYFKIYSKHTPINLVRDLPQGFSALEPLVDLPIGINITRFQTLLALHRSYLTPGDSSSGWTAGAAAYYVGYLQPRTFLLKYNENGTITDAVDCALDPLSETKCTLKSFTVEKGIYQTSNFRVQPTESIVRFPNITNLCPFGEVFNATRFASVYAWNRKRISNCVADYSVLYNSASFSTFKCYGVSPTKLNDLCFTNVYADSFVIRGDEVRQIAPGQTGKIADYNYKLPDDFTGCVIAWNSNNLDSKVGGNYNYLYRLFRKSNLKPFERDISTEIYQAGSTPCNGVEGFNCYFPLQSYGFQPTNGVGYQPYRVVVLSFELLHAPATVCGPKKSTNLVKNKCVNFNFNGLTGTGVLTESNKKFLPFQQFGRDIADTTDAVRDPQTLEILDITPCSFGGVSVITPGTNTSNQVAVLYQDVNCTEVPVAIHADQLTPTWRVYSTGSNVFQTRAGCLIGAEHVNNSYECDIPIGAGICASYQTQTNSPRRARSVASQSIIAYTMSLGAENSVAYSNNSIAIPTNFTISVTTEILPVSMTKTSVDCTMYICGDSTECSNLLLQYGSFCTQLNRALTGIAVEQDKNTQEVFAQVKQIYKTPPIKDFGGFNFSQILPDPSKPSKRSFIEDLLFNKVTLADAGFIKQYGDCLGDIAARDLICAQKFNGLTVLPPLLTDEMIAQYCSALLAGTITSGWTFGAGAALQIPFAMQMAYRFNGIGVTQNVLYENQKLIANQFNSAIGKIQDSLSSTASALGKLQDVVNQNAQALNTLVKQLSSNFGAISSVLNDILSRLDKVEAEVQIDRLITGRLQSLQTYVTQQLIRAAEIRASANLAATKMSECVLGQSKRVDFCGKGYHLMSFPQCAPHGVVFLHVTYVPAQEKNFTTAPAICHDGKAHFPREGVFVSNGTHWFVTQRNFYEPQIITTDNTFVSGNCDVVIGIVNNTVYDPLQPELDSFKEELDKYFKNHTSPDVDLGDISGINASVVNIQKEIDRLNEVAKNLNESLIDLQELGKYEQYIKGGSGYIPEAPRDGQAYVRKDGEWVLLSTFL

SEQ ID NO: 6576 - protein, 1241 aa, Artificial Sequence
  SARS-CoV-2/Shenzhen/SZTH-001/2020__EPI_ISL_406592 spike protein (1-1211)(T874C_S1055C) Foldon construct
MFVFLVLLPLVSSQCVNLTTRTQLPPAYTNSFTRGVYYPDKVFRSSVLHSTQDLFLPFFSNVTWFHAIHVSGTNGTKRFDNPVLPFNDGVYFASTEKSNIIRGWIFGTTLDSKTQSLLIVNNATNVVIKVCEFQFCNDPFLGVYYHKNNKSWMESEFRVYSSANNCTFEYVSQPFLMDLEGKQGNFKNLREFVFKNIDGYFKIYSKHTPINLVRDLPQGFSALEPLVDLPIGINITRFQTLLALHRSYLTPGDSSSGWTAGAAAYYVGYLQPRTFLLKYNENGTITDAVDCALDPLSETKCTLKSFTVEKGIYQTSNFRVQPTESIVRFPNITNLCPFGEVFNATRFASVYAWNRKRISNCVADYSVLYNSASFSTFKCYGVSPTKLNDLCFTNVYADSFVIRGDEVRQIAPGQTGKIADYNYKLPDDFTGCVIAWNSNNLDSKVGGNYNYLYRLFRKSNLKPFERDISTEIYQAGSTPCNGVEGFNCYFPLQSYGFQPTNGVGYQPYRVVVLSFELLHAPATVCGPKKSTNLVKNKCVNFNFNGLTGTGVLTESNKKFLPFQQFGRDIADTTDAVRDPQTLEILDITPCSFGGVSVITPGTNTSNQVAVLYQDVNCTEVPVAIHADQLTPTWRVYSTGSNVFQTRAGCLIGAEHVNNSYECDIPIGAGICASYQTQTNSPRRARSVASQSIIAYTMSLGAENSVAYSNNSIAIPTNFTISVTTEILPVSMTKTSVDCTMYICGDSTECSNLLLQYGSFCTQLNRALTGIAVEQDKNTQEVFAQVKQIYKTPPIKDFGGFNFSQILPDPSKPSKRSFIEDLLFNKVTLADAGFIKQYGDCLGDIAARDLICAQKFNGLTVLPPLLTDEMIAQYCSALLAGTITSGWTFGAGAALQIPFAMQMAYRFNGIGVTQNVLYENQKLIANQFNSAIGKIQDSLSSTASALGKLQDVVNQNAQALNTLVKQLSSNFGAISSVLNDILSRLDKVEAEVQIDRLITGRLQSLQTYVTQQLIRAAEIRASANLAATKMSECVLGQSKRVDFCGKGYHLMSFPQCAPHGVVFLHVTYVPAQEKNFTTAPAICHDGKAHFPREGVFVSNGTHWFVTQRNFYEPQIITTDNTFVSGNCDVLIGIVNNTVYDPLQPELDSFKEELDKYFKNHTSPDVDLGDISGINASVVNIQKEIDRLNEVAKNLNESLIDLQELGKYEQYIKGGSGYIPEAPRDGQAYVRKDGEWVLLSTFL

SEQ ID NO: 6577 - protein, 1241 aa, Artificial Sequence
  SARS-CoV-2/Shenzhen/SZTH-004/2020__EPI_ISL_406595 spike protein (1-1211)(T874C_S1055C) Foldon construct
MFVFLVLLPLVSSQCVNLTTRTQLPPAYTNSFTRGVYYPDKVFRSSVLHSTQDLFLPFFSNVTWFHAIHVSGTNGTKRFDNPVLPFNDGVYFASTEKSNIIRGWIFGTTLDSKTQSLLIVNNATNVVIKVCEFQFCNDPFLGVYYHKNNKSWMESEFRVYSSANNCTFEYVSQPFLMDLEGKQGNFKNLREFVFKNIDGYFKIYSKHTPINLVRDLPQGFSALEPLVDLPIGINITRFQTLLALHRSYLTPGDSSSGWTAGAAAYYVGYLQPRTFLLKYNENGTITDAVDCALDPLSETKCTLKSFTVEKGIYQTSNFRVQPTESIVRFPNITNLCPFGEVFNATRFASVYAWDRKRISNCVAYYSVLYNSASFSTFKCYGVSPTKLNDLCFTNVYADSFVIRGDEVRQIAPGQTGKIADYNYKLPDDFTGCVIAWNSNNLDSKVGGNYNYLYRLFRKSNLKPFERDISTEIYQAGSTPCNGVEGFNCYFPLQSYGFQPTNGVGYQPYRVVVLSFELLHAPATVCGPKKSTNLVKNKCVNFNFNGLTGTGVLTESNKKFLPFQQFGRDIADTTDAVRDPQTLEILDITPCSFGGVSVITPGTNTSNQVAVLYQDVNCTEVPVAIHADQLTPTWRVYSTGSNVFQTRAGCLIGAEHVNNSYECDIPIGAGICASYQTQTNSPRRARSVASQSIIAYTMSLGAENSVAYSNNSIAIPTNFTISVTTEILPVSMTKTSVDCTMYICGDSTECSNLLLQYGSFCTQLNRALTGIAVEQDKNTQEVFAQVKQIYKTPPIKDFGGFNFSQILPDPSKPSKRSFIEDLLFNKVTLADAGFIKQYGDCLGDIAARDLICAQKFNGLTVLPPLLTDEMIAQYCSALLAGTITSGWTFGAGAALQIPFAMQMAYRFNGIGVTQNVLYENQKLIANQFNSAIGKIQDSLSSTASALGKLQDVVNQNAQALNTLVKQLSSNFGAISSVLNDILSRLDKVEAEVQIDRLITGRLQSLQTYVTQQLIRAAEIRASANLAATKMSECVLGQSKRVDFCGKGYHLMSFPQCAPHGVVFLHVTYVPAQEKNFTTAPAICHDGKAHFPREGVFVSNGTHWFVTQRNFYEPQIITTDNTFVSGNCDVVIGIVNNTVYDPLQPELDSFKEELDKYFKNHTSPDVDLGDISGINASVVNIQKEIDRLNEVAKNLNESLIDLQELGKYEQYIKGGSGYIPEAPRDGQAYVRKDGEWVLLSTFL

SEQ ID NO: 6578 - protein, 1241 aa, Artificial Sequence
  SARS-CoV-2/France/IDF0372/2020__EPI_ISL_406596 spike protein (1-1211)(T874C_S1055C) Foldon construct
MFVFLVLLPLVSSQCVNLTTRTQLPPAYTNSFTRGVYYPDKVFRSSVLHSTQDLFLPFFSNVTWFHAIHVSGTNGTKRFDNPVLPFNDGVYFASTEKSNIIRGWIFGTTLDSKTQSLLIVNNATNVVIKVCEFQFCNDPFLGVYYHKNNKSWMESEFRVYSSANNCTFEYVSQPFLMDLEGKQGNFKNLREFVFKNIDGYFKIYSKHTPINLVRDLPQGFSALEPLVDLPIGINITRFQTLLALHRSYLTPGDSSSGWTAGAAAYYVGYLQPRTFLLKYNENGTITDAVDCALDPLSETKCTLKSFTVEKGIYQTSNFRVQPTESIVRFPNITNLCPFGEVFNATRFASVYAWNRKRISNCVADYSFLYNSASFSTFKCYGVSPTKLNDLCFTNVYADSFVIRGDEVRQIAPGQTGKIADYNYKLPDDFTGCVIAWNSNNLDSKVGGNYNYLYRLFRKSNLKPFERDISTEIYQAGSTPCNGVEGFNCYFPLQSYGFQPTNGVGYQPYRVVVLSFELLHAPATVCGPKKSTNLVKNKCVNFNFNGLTGTGVLTESNKKFLPFQQFGRDIADTTDAVRDPQTLEILDITPCSFGGVSVITPGTNTSNQVAVLYQDVNCTEVPVAIHADQLTPTWRVYSTGSNVFQTRAGCLIGAEHVNNSYECDIPIGAGICASYQTQTNSPRRARSVASQSIIAYTMSLGAENSVAYSNNSIAIPTNFTISVTTEILPVSMTKTSVDCTMYICGDSTECSNLLLQYGSFCTQLNRALTGIAVEQDKNTQEVFAQVKQIYKTPPIKDFGGFNFSQILPDPSKPSKRSFIEDLLFNKVTLADAGFIKQYGDCLGDIAARDLICAQKFNGLTVLPPLLTDEMIAQYCSALLAGTITSGWTFGAGAALQIPFAMQMAYRFNGIGVTQNVLYENQKLIANQFNSAIGKIQDSLSSTASALGKLQDVVNQNAQALNTLVKQLSSNFGAISSVLNDILSRLDKVEAEVQIDRLITGRLQSLQTYVTQQLIRAAEIRASANLAATKMSECVLGQSKRVDFCGKGYHLMSFPQCAPHGVVFLHVTYVPAQEKNFTTAPAICHDGKAHFPREGVFVSNGTHWFVTQRNFYEPQIITTDNTFVSGNCDVVIGIVNNTVYDPLQPELDSFKEELDKYFKNHTSPDVDLGDISGINASVVNIQKEIDRLNEVAKNLNESLIDLQELGKYEQYIKGGSGYIPEAPRDGQAYVRKDGEWVLLSTFL

SEQ ID NO: 6579 - protein, 1241 aa, Artificial Sequence
  SARS-CoV-2/Australia/VIC01/2020__EPI_ISL_406844 spike protein (1-1211)(T874C_S1055C) Foldon construct
MFVFLVLLPLVSSQCVNLTTRTQLPPAYTNSFTRGVYYPDKVFRSSVLHSTQDLFLPFFSNVTWFHAIHVSGTNGTKRFDNPVLPFNDGVYFASTEKSNIIRGWIFGTTLDSKTQSLLIVNNATNVVIKVCEFQFCNDPFLGVYYHKNNKSWMESEFRVYSSANNCTFEYVSQPFLMDLEGKQGNFKNLREFVFKNIDGYFKIYSKHTPINLVRDLPQGFSALEPLVDLPIGINITRFQTLLALHRRYLTPGDSSSGWTAGAAAYYVGYLQPRTFLLKYNENGTITDAVDCALDPLSETKCTLKSFTVEKGIYQTSNFRVQPTESIVRFPNITNLCPFGEVFNATRFASVYAWNRKRISNCVADYSVLYNSASFSTFKCYGVSPTKLNDLCFTNVYADSFVIRGDEVRQIAPGQTGKIADYNYKLPDDFTGCVIAWNSNNLDSKVGGNYNYLYRLFRKSNLKPFERDISTEIYQAGSTPCNGVEGFNCYFPLQSYGFQPTNGVGYQPYRVVVLSFELLHAPATVCGPKKSTNLVKNKCVNFNFNGLTGTGVLTESNKKFLPFQQFGRDIADTTDAVRDPQTLEILDITPCSFGGVSVITPGTNTSNQVAVLYQDVNCTEVPVAIHADQLTPTWRVYSTGSNVFQTRAGCLIGAEHVNNSYECDIPIGAGICASYQTQTNSPRRARSVASQSIIAYTMSLGAENSVAYSNNSIAIPTNFTISVTTEILPVSMTKTSVDCTMYICGDSTECSNLLLQYGSFCTQLNRALTGIAVEQDKNTQEVFAQVKQIYKTPPIKDFGGFNFSQILPDPSKPSKRSFIEDLLFNKVTLADAGFIKQYGDCLGDIAARDLICAQKFNGLTVLPPLLTDEMIAQYCSALLAGTITSGWTFGAGAALQIPFAMQMAYRFNGIGVTQNVLYENQKLIANQFNSAIGKIQDSLSSTASALGKLQDVVNQNAQALNTLVKQLSSNFGAISSVLNDILSRLDKVEAEVQIDRLITGRLQSLQTYVTQQLIRAAEIRASANLAATKMSECVLGQSKRVDFCGKGYHLMSFPQCAPHGVVFLHVTYVPAQEKNFTTAPAICHDGKAHFPREGVFVSNGTHWFVTQRNFYEPQIITTDNTFVSGNCDVVIGIVNNTVYDPLQPELDSFKEELDKYFKNHTSPDVDLGDISGINASVVNIQKEIDRLNEVAKNLNESLIDLQELGKYEQYIKGGSGYIPEAPRDGQAYVRKDGEWVLLSTFL

SEQ ID NO: 6580 - protein, 1241 aa, Artificial Sequence
  SARS-CoV-2/Germany/BavPat1/2020__EPI_ISL_406862 spike protein (1-1211)(T874C_S1055C) Foldon construct
MFVFLVLLPLVSSQCVNLTTRTQLPPAYTNSFTRGVYYPDKVFRSSVLHSTQDLFLPFFSNVTWFHAIHVSGTNGTKRFDNPVLPFNDGVYFASTEKSNIIRGWIFGTTLDSKTQSLLIVNNATNVVIKVCEFQFCNDPFLGVYYHKNNKSWMESEFRVYSSANNCTFEYVSQPFLMDLEGKQGNFKNLREFVFKNIDGYFKIYSKHTPINLVRDLPQGFSALEPLVDLPIGINITRFQTLLALHRSYLTPGDSSSGWTAGAAAYYVGYLQPRTFLLKYNENGTITDAVDCALDPLSETKCTLKSFTVEKGIYQTSNFRVQPTESIVRFPNITNLCPFGEVFNATRFASVYAWNRKRISNCVADYSVLYNSASFSTFKCYGVSPTKLNDLCFTNVYADSFVIRGDEVRQIAPGQTGKIADYNYKLPDDFTGCVIAWNSNNLDSKVGGNYNYLYRLFRKSNLKPFERDISTEIYQAGSTPCNGVEGFNCYFPLQSYGFQPTNGVGYQPYRVVVLSFELLHAPATVCGPKKSTNLVKNKCVNFNFNGLTGTGVLTESNKKFLPFQQFGRDIADTTDAVRDPQTLEILDITPCSFGGVSVITPGTNTSNQVAVLYQGVNCTEVPVAIHADQLTPTWRVYSTGSNVFQTRAGCLIGAEHVNNSYECDIPIGAGICASYQTQTNSPRRARSVASQSIIAYTMSLGAENSVAYSNNSIAIPTNFTISVTTEILPVSMTKTSVDCTMYICGDSTECSNLLLQYGSFCTQLNRALTGIAVEQDKNTQEVFAQVKQIYKTPPIKDFGGFNFSQILPDPSKPSKRSFIEDLLFNKVTLADAGFIKQYGDCLGDIAARDLICAQKFNGLTVLPPLLTDEMIAQYCSALLAGTITSGWTFGAGAALQIPFAMQMAYRFNGIGVTQNVLYENQKLIANQFNSAIGKIQDSLSSTASALGKLQDVVNQNAQALNTLVKQLSSNFGAISSVLNDILSRLDKVEAEVQIDRLITGRLQSLQTYVTQQLIRAAEIRASANLAATKMSECVLGQSKRVDFCGKGYHLMSFPQCAPHGVVFLHVTYVPAQEKNFTTAPAICHDGKAHFPREGVFVSNGTHWFVTQRNFYEPQIITTDNTFVSGNCDVVIGIVNNTVYDPLQPELDSFKEELDKYFKNHTSPDVDLGDISGINASVVNIQKEIDRLNEVAKNLNESLIDLQELGKYEQYIKGGSGYIPEAPRDGQAYVRKDGEWVLLSTFL

SEQ ID NO: 6581 - protein, 1241 aa, Artificial Sequence
  SARS-CoV-2/Wuhan/HBCDC-HB-02/2020__EPI_ISL_412978 spike protein (1-1211)(T874C_S1055C) Foldon construct
MFVFLVLLPLVSSQCVNLTTRTQLPPAYTNSFTRGVYYPDKVFRSSVLHSTQDLFLPFFSNVTWFHAIHVSGTNGTKRFDNPVLPFNDGVYFASTEKSNIIRGWIFGTTLDSKTQSLLIVNNATNVVIKVCEFQFCNDPFLGVYYHKNNKSWMESEFRVYSSANNCTFEYVSQPFLMDLEGKQGNFKNLREFVFKNIDGYFKIYSKHTPINLVRDLPQGFSALEPLVDLPIGINITRFQTLLALHRSYLTPGDSSSGWTAGAAAYYVGYLQPRTFLLKYNENGTITDAVDCALDPLSETKCTLKSFTVEKGIYQTSNFRVQPTESIVRFPNITNLCPFGEVFNATRFASVYAWNRKRISNCVADYSVLYNSASFSTFKCYGVSPTKLNDLCFTNVYADSFVIRGDEVRQIAPGQTGKIADYNYKLPDDFTGCVIAWNSNNLDSKVGGNYNYLYRLFRKSNLKPFERDISTEIYQAGSTPCNGVEGFNCYFPLQSYGFQPTNGVGYQPYRVVVLSFELLHAPATVCGPKKSTNLVKNKCVNFNFNGLTGTGVLTESNKKFLPFQQFGRDIADTTDAVRDPQTLEILDITPCSFGGVSVITPGTNTSNQVAVLYQDVNCTEVPVAIHADQLTPTWRVYSTGSNVFQTRAGCLIGAEHVNNSYECDIPIGAGICASYQTQTNSPRRARSVASQSIIAYTMSLGAENSVAYSNNSIAIPTNFTISVTTEILPVSMTKTSVDCTMYICGDSTECSNFLLQYGSFCTQLNRALTGIAVEQDKNTQEVFAQVKQIYKTPPIKDFGGFNFSQILPDPSKPSKRSFIEDLLFNKVTLADAGFIKQYGDCLGDIAARDLICAQKFNGLTVLPPLLTDEMIAQYCSALLAGTITSGWTFGAGAALQIPFAMQMAYRFNGIGVTQNVLYENQKLIANQFNSAIGKIQDSLSSTASALGKLQDVVNQNAQALNTLVKQLSSNFGAISSVLNDILSRLDKVEAEVQIDRLITGRLQSLQTYVTQQLIRAAEIRASANLAATKMSECVLGQSKRVDFCGKGYHLMSFPQCAPHGVVFLHVTYVPAQEKNFTTAPAICHDGKAHFPREGVFVSNGTHWFVTQRNFYEPQIITTDNTFVSGNCDVVIGIVNNTVYDPLQPELDSFKEELDKYFKNHTSPDVDLGDISGINASVVNIQKEIDRLNEVAKNLNESLIDLQELGKYEQYIKGGSGYIPEAPRDGQAYVRKDGEWVLLSTFL

SEQ ID NO: 6582 - protein, 1241 aa, Artificial Sequence
  SARS-CoV-2/Australia/QLD02/2020__EPI_ISL_407896 spike protein (1-1211)(T874C_S1055C) Foldon construct
MFVFLVLLPLVSSQCVNLTTRTQLPPAYTNSFTRGVYYPDKVFRSSVLHSTQDLFLPFFSNVTWFHAIHVSGTNGTKRFDNPVLPFNDGVYFASTEKSNIIRGWIFGTTLDSKTQSLLIVNNATNVVIKVCEFQFCNDPFLGVYYHKNNKSWMESEFRVYSSANNCTFEYVSQPFLMDLEGKQGNFKNLREFVFKNIDGYFKIYSKHTPINLVRDLPQGFSALEPLVDLPIGINITRFQTLLALHRSYLTPGDSSSGWTAGAAAYYVGYLQPRTFLLKYNENGTITDAVDCALDPLSETKCTLKSFTVEKGIYQTSNFRVQPTESIVRFPNITNLCPFGEVFNATRFASVYAWNRKRISNCVADYSVLYNSASFSTFKCYGVSPTKLNDLCFTNVYADSFVIRGDEVRQIAPGQTGKIADYNYKLPDDFTGCVIAWNSNNLDSKVGGNYNYLYRLFRKSNLKPFERDISTEIYQAGSTPCNGVEGFNCYFPLQSYGFQPTNGVGYQPYRVVVLSFELLHAPATVCGPKKSTNLVKNKCVNFNFNGLTGTGVLTESNKKFLPFQQFGRDIADTTDAVRDPQTLEILDITPCSFGGVSVITPGTNTSNQVAVLYQDVNCTEVPVAIHADQLTPTWRVYSTGSNVFQTRAGCLIGAEHVNNSYECDIPIGAGICASYQTQTNSPRRARSVASQSIIAYTMSLGAENSVAYSNNSIAIPTNFTISVTTEILPVSMTKTSVDCTMYICGDSTECSNLLLQYGSFCTQLNRALTGIAVEQDKNTQEVFAQVKQIYKTPPIKDFGGFNFSQILPDPSKPSKRSFIEDLLFNKVTLADAGFIKQYGDCLGDIAARDLICAQKFNGLTVLPPLLTDEMIAQYCSALLAGTITSGWTFGAGAALQIPFAMQMAYRFNGIGVTQNVLYENQKLIANQFNSAIGKIQDSLSSTASALGKLQDVVNQNAQALNTLVKQLSSNFGAISSVLNDILSRLDKVEAEVQIDRLITGRLQSLQTYVTQQLIRAAEIRASANLAATKMSECVLGQSKRVDFCGKGYHLMSFPQCAPHGVVFLHVTYVPAQEKNFTTAPAICHDGKAHFPREGVFVSNGTHWFVTQRNFYEPQIITTDNTFVSGNCDVVIGIVNNTVYDPLQLELDSFKEELDKYFKNHTSPDVDLGDISGINASVVNIQKEIDRLNEVAKNLNESLIDLQELGKYEQYIKGGSGYIPEAPRDGQAYVRKDGEWVLLSTFL

SEQ ID NO: 6583 - protein, 1241 aa, Artificial Sequence
  SARS-CoV-2/India/1-31/2020__EPI_ISL_413523 spike protein (1-1211)(T874C_S1055C) Foldon construct
MFVFLVLLPLVSSQCVNLTTRTQLPPAYTNSFTRGVYYPDKVFRSSVLHSTQDLFLPFFSNVTWFHAIHVSGTNGTKRFDNPVLPFNDGVYFASTEKSNIIRGWIFGTTLDSKTQSLLIVNNATNVVIKVCEFQFCNDPFLGVYYHKNNKSWMESEFRVYSSANNCTFEYVSQPFLMDLEGKQGNFKNLREFVFKNIDGYFKIYSKHTPINLVRDLPQGFSALEPLVDLPIGINITRFQTLLALHRSYLTPGDSSSGWTAGAAAYYVGYLQPRTFLLKYNENGTITDAVDCALDPLSETKCTLKSFTVEKGIYQTSNFRVQPTESIVRFPNITNLCPFGEVFNATRFASVYAWNRKRISNCVADYSVLYNSASFSTFKCYGVSPTKLNDLCFTNVYADSFVIRGDEVRQIAPGQTGKIADYNYKLPDDFTGCVIAWNSNNLDSKVGGNYNYLYRLFRKSNLKPFERDISTEIYQAGSTPCNGVEGFNCYFPLQSYGFQPTNGVGYQPYRVVVLSFELLHAPATVCGPKKSTNLVKNKCVNFNFNGLTGTGVLTESNKKFLPFQQFGRDIADTTDAVRDPQTLEILDITPCSFGGVSVITPGTNTSNQVAVLYQDVNCTEVPVAIHADQLTPTWRVYSTGSNVFQTRAGCLIGAEHVNNSYECDIPIGAGICASYQTQTNSPRRARSVASQSIIAYTMSLGAENSVAYSNNSIAIPTNFTISVTTEILPVSMTKTSVDCTMYICGDSTECSNLLLQYGSFCTQLNRALTGIAVEQDKNTQEVFAQVKQIYKTPPIKDFGGFNFSQILPDPSKPSKRSFIEDLLFNKVTLADAGFIKQYGDCLGDIAARDLICAQKFNGLTVLPPLLTDEMIAQYCSALLAGTITSGWTFGAGAALQIPFAMQMAYRFNGIGVTQNVLYENQKLIANQFNSVIGKIQDSLSSTASALGKLQDVVNQNAQALNTLVKQLSSNFGAISSVLNDILSRLDKVEAEVQIDRLITGRLQSLQTYVTQQLIRAAEIRASANLAATKMSECVLGQSKRVDFCGKGYHLMSFPQCAPHGVVFLHVTYVPAQEKNFTTAPAICHDGKAHFPREGVFVSNGTHWFVTQRNFYEPQIITTDNTFVSGNCDVVIGIVNNTVYDPLQPELDSFKEELDKYFKNHTSPDVDLGDISGINASVVNIQKEIDRLNEVAKNLNESLIDLQELGKYEQYIKGGSGYIPEAPRDGQAYVRKDGEWVLLSTFL

SEQ ID NO: 6584 - protein, 1241 aa, Artificial Sequence
  SARS-CoV-2/Guangdong/GD2020087-P0008/2020__EPI_ISL_413863 spike protein (1-1211)(T874C_S1055C) Foldon construct
MFVFLVLLPLVSSQCVNLTTRTQLPPAYTNSFTRGVYYPDKVFRSSVLHSTQDLFLPFFSNVTWFHAIHVSGTNGTKRFDNPVLPFNDGVYFASTEKSNIIRGWIFGTTLDSKTQSLLIVNNATNVVIKVCEFQFCNDPFLGVYYHKNNKSWMESEFRVYSSANNCTFEYVSQPFLMDLEGKQGNFKNLREFVFKNIDGYFKIYSKHTPINLVRDLPQGFSALEPLVDLPIGINITRFQTLLALHRSYLTPGDSSSGWTAGAAAYYVGYLQPRTFLLKYNENGTITDAVDCALDPLSETKCTLKSFTVEKGIYQTSNFRVQPTESIVRFPNITNLCPFGEVFNATRFASVYAWNRKRISNCVADYSVLYNSASFSTFKCYGVSPTKLNDLCFTNVYADSFVIRGDEVREIAPGQTGKIADYNYKLPDDFTGCVIAWNSNNLDSKVGGNYNYLYRLFRKSNLKPFERDISTEIYQAGSTPCNGVEGFNCYFPLQSYGFQPTNGVGYQPYRVVVLSFELLHAPATVCGPKKSTNLVKNKCVNFNFNGLTGTGVLTESNKKFLPFQQFGRDIADTTDAVRDPQTLEILDITPCSFGGVSVITPGTNTSNQVAVLYQDVNCTEVPVAIHADQLTPTWRVYSTGSNVFQTRAGCLIGAEHVNNSYECDIPIGAGICASYQTQTNSPRRARSVASQSIIAYTMSLGAENSVAYSNNSIAIPTNFTISVTTEILPVSMTKTSVDCTMYICGDSTECSNLLLQYGSFCTQLNRALTGIAVEQDKNTQEVFAQVKQIYKTPPIKDFGGFNFSQILPDPSKPSKRSFIEDLLFNKVTLADAGFIKQYGDCLGDIAARDLICAQKFNGLTVLPPLLTDEMIAQYCSALLAGTITSGWTFGAGAALQIPFAMQMAYRFNGIGVTQNVLYENQKLIANQFNSAIGKIQDSLSSTASALGKLQDVVNQNAQALNTLVKQLSSNFGAISSVLNDILSRLDKVEAEVQIDRLITGRLQSLQTYVTQQLIRAAEIRASANLAATKMSECVLGQSKRVDFCGKGYHLMSFPQCAPHGVVFLHVTYVPAQEKNFTTAPAICHDGKAHFPREGVFVSNGTHWFVTQRNFYEPQIITTDNTFVSGNCDVVIGIVNNTVYDPLQPELDSFKEELDKYFKNHTSPDVDLGDISGINASVVNIQKEIDRLNEVAKNLNESLIDLQELGKYEQYIKGGSGYIPEAPRDGQAYVRKDGEWVLLSTFL

SEQ ID NO: 6585 - protein, 1241 aa, Artificial Sequence
  SARS-CoV-2/Sweden/01/2020__EPI_ISL_411951 spike protein (1-1211)(T874C_S1055C) Foldon construct
MFVFLVLLPLVSSQCVNLTTRTQLPPAYTNSFTRGVYYPDKVFRSSVLHSTQDLFLPFFSNVTWFHAIHVSGTNGTKRFDNPVLPFNDGVYFASTEKSNIIRGWIFGTTLDSKTQSLLIVNNATNVVIKVCEFQFCNDPFLGVYYHKNNKSWMESEFRVYSSANNCTFEYVSQPFLMDLEGKQGNFKNLREFVFKNIDGYFKIYSKHTPINLVRDLPQGFSALEPLVDLPIGINITRFQTLLALHRSYLTPGDSSSGWTAGAAAYYVGYLQPRTFLLKYNENGTITDAVDCALDPLSETKCTLKSFTVEKGIYQTSNFRVQPTESIVRFPNITNLCPFGEVFNATRFASVYAWNRKRISNCVADYSVLYNSASFSTFKCYGVSPTKLNDLCFTNVYADSFVIRGDEVRQIAPGQTGKIADYNYKLPDDFTGCVIAWNSNNLDSKVGGNYNYLYRLFRKSNLKPFERDISTEIYQAGSTPCNGVEGFNCYFPLQSYGFQPTNGVGYQPYRVVVLSFELLHAPATVCGPKKSTNLVKNKCVNFNFNGLTGTGVLTESNKKFLPFQQFGRDIADTTDAVRDPQTLEILDITPCSFGGVSVITPGTNTSNQVAVLYQDVNCTEVPVAIHADQLTPTWRVYSTGSNVFQTRAGCLIGAEHVNNSYECDIPIGAGICASYQTQTNSPRRARSVASQSIIAYTMSLGAENSVAYSNNSIAIPTNFTISVTTEILPVSMTKTSVDCTMYICGDSTECSNLLLQYGSFCTQLNRALTGIAVEQDKNTQEVFAQVKQIYKTPPIKDCGGFNFSQILPDPSKPSKRSFIEDLLFNKVTLADAGFIKQYGDCLGDIAARDLICAQKFNGLTVLPPLLTDEMIAQYCSALLAGTITSGWTFGAGAALQIPFAMQMAYRFNGIGVTQNVLYENQKLIANQFNSAIGKIQDSLSSTASALGKLQDVVNQNAQALNTLVKQLSSNFGAISSVLNDILSRLDKVEAEVQIDRLITGRLQSLQTYVTQQLIRAAEIRASANLAATKMSECVLGQSKRVDFCGKGYHLMSFPQCAPHGVVFLHVTYVPAQEKNFTTAPAICHDGKAHFPREGVFVSNGTHWFVTQRNFYEPQIITTDNTFVSGNCDVVIGIVNNTVYDPLQPELDSFKEELDKYFKNHTSPDVDLGDISGINASVVNIQKEIDRLNEVAKNLNESLIDLQELGKYEQYIKGGSGYIPEAPRDGQAYVRKDGEWVLLSTFL

SEQ ID NO: 6586 - protein, 1241 aa, Artificial Sequence
  SARS-CoV-2/Tianmen/HBCDC-HB-07/2020__EPI_ISL_412983 spike protein (1-1211)(T874C_S1055C) Foldon construct
MFVFLVLLPLVSSQCVNLTTRTQLPPAYTNSFTRGVYYPDKVFRSSVLHSTQDLFLPFFSNVTWFHAIHVSGTNGTKRFDNPVLPFNDGVYFASTEKSNIIRGWIFGTTLDSKTQSLLIVNNATNVVIKVCEFQFCNDPFLGVYYHKNNKSWMESEFRVYSSANNCTFEYVSQPFLMDLEGKQGNFKNLREFVFKNIDGYFKIYSKHTPINLVRDLPQGFSALEPLVDLPIGINITRFQTLLALHRSYLTPGDSSSGWTAGAAAYYVGYLQPRTFLLKYNENGTITDAVDCALDPLSETKCTLKSFTVEKGIYQTSNFRVQPTESIVRFPNITNLCPFGEVFNATRFASVYAWNRKRISNCVADYSVLYNSASFSTFKCYGVSPTKLNDLCFTNVYADSFVIRGDEVRQIAPGQTGKIADYNYKLPDDFTGCVIAWNSNNLDSKVGGNYNYLYRLFRKSNLKPFERDISTEIYQAGSTPCNGVEGFNCYFPLQSYGFQPTNGVGYQPYRVVVLSFELLHAPATVCGPKKSTNLVKNKCVNFNFNGLTGTGVLTESNKKFLPFQQFGRDIADTTDAVRDPQTLEILDITPCSFGGVSVITPGTNTSNQVAVLYQDLNCTEVPVAIHADQLTPTWRVYSTGSNVFQTRAGCLIGAEHVNNSYECDIPIGAGICASYQTQTNSPRRARSVASQSIIAYTMSLGAENSVAYSNNSIAIPTNFTISVTTEILPVSMTKTSVDCTMYICGDSTECSNLLLQYGSFCTQLNRALTGIAVEQDKNTQEVFAQVKQIYKTPPIKDFGGFNFSQILPDPSKPSKRSFIEDLLFNKVTLADAGFIKQYGDCLGDIAARDLICAQKFNGLTVLPPLLTDEMIAQYCSALLAGTITSGWTFGAGAALQIPFAMQMAYRFNGIGVTQNVLYENQKLIANQFNSAIGKIQDSLSSTASALGKLQDVVNQNAQALNTLVKQLSSNFGAISSVLNDILSRLDKVEAEVQIDRLITGRLQSLQTYVTQQLIRAAEIRASANLAATKMSECVLGQSKRVDFCGKGYHLMSFPQCAPHGVVFLHVTYVPAQEKNFTTAPAICHDGKAHFPREGVFVSNGTHWFVTQRNFYEPQIITTDNTFVSGNCDVVIGIVNNTVYDPLQPELDSFKEELDKYFKNHTSPDVDLGDISGINASVVNIQKEIDRLNEVAKNLNESLIDLQELGKYEQYIKGGSGYIPEAPRDGQAYVRKDGEWVLLSTFL

SEQ ID NO: 6587 - protein, 1241 aa, Artificial Sequence
  SARS-CoV-2/Hong Kong/case42_VM20002493/2020__EPI_ISL_414527 spike protein (1-1211)(T874C_S1055C) Foldon construct
MFVFLVLLPLVSSQCVNLTTRTQLPPAYTNSFTRGVYYPDKVFRSSVLHSTQDLFLPFFSNVTWFHAIHVSGTNGTKRFDNPVLPFNDGVYFASTEKSNIIRGWIFGTTLDSKTQSLLIVNNATNVVIKVCEFQFCNDPFLGVYYHKNNKSWMESEFRVYSSANNCTFEYVSQPFLMDLEGKQGNFKNLREFVFKNIDGYFKIYSKHTPINLVRDLPQGFSALEPLVDLPIGINITRFQTLLALHRSYLTPGDSSSGWTAGAAAYYVGYLQPRTFLLKYNENGTITDAVDCALDPLSETKCTLKSFTVEKGIYQTSNFRVQPTESIVRFPNITNLCPFGEVFNATRFASVYAWNRKRISNCVADYSVLYNSASFSTFKCYGVSPTKLNDLCFTNVYADSFVIRGDEVRQIAPGQTGKIADYNYKLPDDFTGCVIAWNSNNLDSKVGGNYNYLYRLFRKSNLKPFERDISTEIYQAGSTPCNGVEGFNCYFPLQSYGFQPTNGVGYQPYRVVVLSFELLHAPATVCGPKKSTNLVKNKCVNFNFNGLTGTGVLTESNKKFLPFQQFGRDIADTTDAVRDPQTLEILDITPCSFGGVSVITPGTNTSNQVAVLYQDVNCTEVPVAIHADQLTPTWRVYSTGSNVFQTRAGCLIGAEHVNNSYECDIPIGAGICASYQTQTNSPRRARSVASQSIIAYTMSLGAENSVAYSNNSIAIPTNFAISVTTEILPVSMTKTSVDCTMYICGDSTECSNLLLQYGSFCTQLNRALTGIAVEQDKNTQEVFAQVKQIYKTPPIKDFGGFNFSQILPDPSKPSKRSFIEDLLFNKVTLADAGFIKQYGDCLGDIAARDLICAQKFNGLTVLPPLLTDEMIAQYCSALLAGTITSGWTFGAGAALQIPFAMQMAYRFNGIGVTQNVLYENQKLIANQFNSAIGKIQDSLSSTASALGKLQDVVNQNAQALNTLVKQLSSNFGAISSVLNDILSRLDKVEAEVQIDRLITGRLQSLQTYVTQQLIRAAEIRASANLAATKMSECVLGQSKRVDFCGKGYHLMSFPQCAPHGVVFLHVTYVPAQEKNFTTAPAICHDGKAHFPREGVFVSNGTHWFVTQRNFYEPQIITTDNTFVSGNCDVVIGIVNNTVYDPLQPELDSFKEELDKYFKNHTSPDVDLGDISGINASVVNIQKEIDRLNEVAKNLNESLIDLQELGKYEQYIKGGSGYIPEAPRDGQAYVRKDGEWVLLSTFL

SEQ ID NO: 6588 - protein, 1241 aa, Artificial Sequence
  SARS-CoV-2/USA/CruiseA-23/2020__EPI_ISL_414482 spike protein (1-1211)(T874C_S1055C) Foldon construct
MFVFLVLLPLVSSQCVNLTTRTQLPPAYTNSFTRGVYYPDKVFRSSVLHSTQDLFLPFFSNVTWFHAIHVSGTNGTKRFDNPVLPFNDGVYFASTEKSNIIRGWIFGTTLDSKTQSLLIVNNATNVVIKVCEFQFCNDPFLGVYYHKNNKSWMESEFRVYSSANNCTFEYVSQPFLMDLEVKQGNFKNLREFVFKNIDGYFKIYSKHTPINLVRDLPQGFSALEPLVDLPIGINITRFQTLLALHRSYLTPGDSSSGWTAGAAAYYVGYLQPRTFLLKYNENGTITDAVDCALDPLSETKCTLKSFTVEKGIYQTSNFRVQPTESIVRFPNITNLCPFGEVFNATRFASVYAWNRKRISNCVADYSVLYNSASFSTFKCYGVSPTKLNDLCFTNVYADSFVIRGDEVRQIAPGQTGKIADYNYKLPDDFTGCVIAWNSNNLDSKVGGNYNYLYRLFRKSNLKPFERDISTEIYQAGSTPCNGVEGFNCYFPLQSYGFQPTNGVGYQPYRVVVLSFELLHAPATVCGPKKSTNLVKNKCVNFNFNGLTGTGVLTESNKKFLPFQQFGRDIADTTDAVRDPQTLEILDITPCSFGGVSVITPGTNTSNQVAVLYQDVNCTEVPVAIHADQLTPTWRVYSTGSNVFQTRAGCLIGAEHVNNSYECDIPIGAGICASYQTQTNSPRRARSVASQSIIAYTMSLGAENSVAYSNNSIAIPTNFTISVTTEILPVSMTKTSVDCTMYICGDSTECSNLLLQYGSFCTQLNRALTGIAVEQDKNTQEVFAQVKQIYKTPPIKDFGGFNFSQILPDPSKPSKRSFIEDLLFNKVTLADAGFIKQYGDCLGDIAARDLICAQKFNGLTVLPPLLTDEMIAQYCSALLAGTITSGWTFGAGAALQIPFAMQMAYRFNGIGVTQNVLYENQKLIANQFNSAIGKIQDSLSSTASALGKLQDVVNQNAQALNTLVKQLSSNFGAISSVLNDILSRLDKVEAEVQIDRLITGRLQSLQTYVTQQLIRAAEIRASANLAATKMSECVLGQSKRVDFCGKGYHLMSFPQCAPHGVVFLHVTYVPAQEKNFTTAPAICHDGKAHFPREGVFVSNGTHWFVTQRNFYEPQIITTDNTFVSGNCDVVIGIVNNTVYDPLQPELDSFKEELDKYFKNHTSPDVDLGDISGINASVVNIQKEIDRLNEVAKNLNESLIDLQELGKYEQYIKGGSGYIPEAPRDGQAYVRKDGEWVLLSTFL

SEQ ID NO: 6589 - protein, 1241 aa, Artificial Sequence
  SARS-CoV-2/Hong Kong/case85_VM20002868/2020__EPI_ISL_414519 spike protein (1-1211)(T874C_S1055C) Foldon construct
MFVFLVLVPLVSSQCVNLTTRTQLPPAYTNSFTRGVYYPDKVFRSSVLHSTQDLFLPFFSNVTWFHAIHVSGTNGTKRFDNPVLPFNDGVYFASTEKSNIIRGWIFGTTLDSKTQSLLIVNNATNVVIKVCEFQFCNDPFLGVYYHKNNKSWMESEFRVYSSANNCTFEYVSQPFLMDLEGKQGNFKNLREFVFKNIDGYFKIYSKHTPINLVRDLPQGFSALEPLVDLPIGINITRFQTLLALHRSYLTPGDSSSGWTAGAAAYYVGYLQPRTFLLKYNENGTITDAVDCALDPLSETKCTLKSFTVEKGIYQTSNFRVQPTESIVRFPNITNLCPFGEVFNATRFASVYAWNRKRISNCVADYSVLYNSASFSTFKCYGVSPTKLNDLCFTNVYADSFVIRGDEVRQIAPGQTGKIADYNYKLPDDFTGCVIAWNSNNLDSKVGGNYNYLYRLFRKSNLKPFERDISTEIYQAGSTPCNGVEGFNCYFPLQSYGFQPTNGVGYQPYRVVVLSFELLHAPATVCGPKKSTNLVKNKCVNFNFNGLTGTGVLTESNKKFLPFQQFGRDIADTTDAVRDPQTLEILDITPCSFGGVSVITPGTNTSNQVAVLYQDVNCTEVPVAIHADQLTPTWRVYSTGSNVFQTRAGCLIGAEHVNNSYECDIPIGAGICASYQTQTNSPRRARSVASQSIIAYTMSLGAENSVAYSNNSIAIPTNFTISVTTEILPVSMTKTSVDCTMYICGDSTECSNLLLQYGSFCTQLNRALTGIAVEQDKNTQEVFAQVKQIYKTPPIKDFGGFNFSQILPDPSKPSKRSFIEDLLFNKVTLADAGFIKQYGDCLGDIAARDLICAQKFNGLTVLPPLLTDEMIAQYCSALLAGTITSGWTFGAGAALQIPFAMQMAYRFNGIGVTQNVLYENQKLIANQFNSAIGKIQDSLSSTASALGKLQDVVNQNAQALNTLVKQLSSNFGAISSVLNDILSRLDKVEAEVQIDRLITGRLQSLQTYVTQQLIRAAEIRASANLAATKMSECVLGQSKRVDFCGKGYHLMSFPQCAPHGVVFLHVTYVPAQEKNFTTAPAICHDGKAHFPREGVFVSNGTHWFVTQRNFYEPQIITTDNTFVSGNCDVVIGIVNNTVYDPLQPELDSFKEELDKYFKNHTSPDVDLGDISGINASVVNIQKEIDRLNEVAKNLNESLIDLQELGKYEQYIKGGSGYIPEAPRDGQAYVRKDGEWVLLSTFL

SEQ ID NO: 6590 - protein, 1241 aa, Artificial Sequence; identical to SEQ ID NO: 6580
  SARS-CoV-2/England/200990660/2020__EPI_ISL_414523 spike protein (1-1211)(T874C_S1055C) Foldon construct

SEQ ID NO: 6591 - protein, 1241 aa, Artificial Sequence
  SARS-CoV-2/Australia/NSW09/2020__EPI_ISL_413595 spike protein (1-1211)(T874C_S1055C) Foldon construct
MFVFLVLLPLVSSQCVNLTTRTQLPPAYTNSFTRGVYYPDKVFRSSVLHSTQDLFLPFFSNVTWFHAIHVSGTNGTKRFDNPVLPFNDGVYFASTEKSNIIRGWIFGTTLDSKTQSLLIVNNATNVVIKVCEFQFCNDPFLGVYYHKNNKSWMESEFRVYSSANNCTFEYVSQPFLMDLEGKQGNFKNLREFVFKNIDGYFKIYSKHTPINLVRDLPQGFSALEPLVDLPIGINITRFQTLLALHRSYLTPGDSSSGWTAGAAAYYVGYLQPRTFLLKYNENGTITDAVDCALDPLSETKCTLKSFTVEKGIYQTSNFRVQPTESIVRFPNITNLCPFGEVFNATRFASVYAWNRKRISNCVADYSVLYNSASFSTFKCYGVSPTKLNDLCFTNVYADSFVIRGDEVRQIAPGQTGKIADYNYKLPDDFTGCVIAWNSNNLDSKVGGNYNYLYRLFRKSNLKPFERDISTEIYQAGSTPCNGVEGFNCYFPLQSYGFQPTNGVGYQPYRVVVLSFELLHAPATVCGPKKSTNLVKNKCVNFNFNGLTGTGVLTESNKKFLPFQQFGRDIADTTDAVRDPQTLEILDITPCSFGGVSVITPGTNTSNQVAVLYQDVNCTEVPVAIHADQLTPTWRVYSTGSNVFQTRAGCLIGAEHVNNSYECDIPIGAGICASYQTQTNSPRRARSVASQSIIAYTMSLGAENSVAYSNNSIAIPTNFTISVTTEILPVSMTKTSVDCTMYICGDSTECSNLLLQYGSFCTQLNRALTGIAVEQDKNTQEVFAQVKQIYKTPPIKDFGGFNFSQILPDPSKPSKRSFIEDLLFNKVTLADAGFIKQYGDCLGDIAARDLICAQKFNGLTVLPPLLTDEMIAQYCSALLAGTITSGWTFGAGAALQIPFAMQMAYRFNGIGVTQNVLYENQKLIANQFNSAIGKIQDSLSFTASALGKLQDVVNQNAQALNTLVKQLSSNFGAISSVLNDILSRLDKVEAEVQIDRLITGRLQSLQTYVTQQLIRAAEIRASANLAATKMSECVLGQSKRVDFCGKGYHLMSFPQCAPHGVVFLHVTYVPAQEKNFTTAPAICHDGKAHFPREGVFVSNGTHWFVTQRNFYEPQIITTDNTFVSGNCDVVIGIVNNTVYDPLQPELDSFKEELDKYFKNHTSPDVDLGDISGINASVVNIQKEIDRLNEVAKNLNESLIDLQELGKYEQYIKGGSGYIPEAPRDGQAYVRKDGEWVLLSTFL

SEQ ID NO: 6592 - protein, 1241 aa, Artificial Sequence; identical to SEQ ID NO: 6572
  SARS-CoV-2/Australia/NSW10/2020__EPI_ISL_413596 spike protein (1-1211)(T874C_S1055C) Foldon construct

SEQ ID NO: 6593 - protein, 1241 aa, Artificial Sequence
  SARS-CoV-2/Switzerland/1000477797/2020__EPI_ISL_413023 spike protein (1-1211)(T874C_S1055C) Foldon construct
MFVFLVLLPLVSSQCVNLTTRTQLPPAYTNSFTRGVYYPDKVFRSSVLHSTQDLFLPFFSNVTWFHAIHVSGTNGTKRFDNPVLPFNDGVYFASTEKSNIIRGWIFGTTLDSKTQSLLIVNNATNVVIKVCEFQFCNDPFLGVYYHKNNKSWMESEFRVYSSANNCTFEYVSQPFLMDLEGKQGNFKNLREFVFKNIDGYFNIYSKHTPINLVRDLPQGFSALEPLVDLPIGINITRFQTLLALHRSYLTPGDSSSGWTAGAAAYYVGYLQPRTFLLKYNENGTITDAVDCALDPLSETKCTLKSFTVEKGIYQTSNFRVQPTESIVRFPNITNLCPFGEVFNATRFASVYAWNRKRISNCVADYSVLYNSASFSTFKCYGVSPTKLNDLCFTNVYADSFVIRGDEVRQIAPGQTGKIADYNYKLPDDFTGCVIAWNSNNLDSKVGGNYNYLYRLFRKSNLKPFERDISTEIYQAGSTPCNGVEGFNCYFPLQSYGFQPTNGVGYQPYRVVVLSFELLHAPATVCGPKKSTNLVKNKCVNFNFNGLTGTGVLTESNKKFLPFQQFGRDIADTTDAVRDPQTLEILDITPCSFGGVSVITPGTNTSNQVAVLYQGVNCTEVPVAIHADQLTPTWRVYSTGSNVFQTRAGCLIGAEHVNNSYECDIPIGAGICASYQTQTNSPRRARSVASQSIIAYTMSLGAENSVAYSNNSIAIPTNFTISVTTEILPVSMTKTSVDCTMYICGDSTECSNLLLQYGSFCTQLNRALTGIAVEQDKNTQEVFAQVKQIYKTPPIKDFGGFNFSQILPDPSKPSKRSFIEDLLFNKVTLADAGFIKQYGDCLGDIAARDLICAQKFNGLTVLPPLLTDEMIAQYCSALLAGTITSGWTFGAGAALQIPFAMQMAYRFNGIGVTQNVLYENQKLIANQFNSAIGKIQDSLSSTASALGKLQDVVNQNAQALNTLVKQLSSNFGAISSVLNDILSRLDKVEAEVQIDRLITGRLQSLQTYVTQQLIRAAEIRASANLAATKMSECVLGQSKRVDFCGKGYHLMSFPQCAPHGVVFLHVTYVPAQEKNFTTAPAICHDGKAHFPREGVFVSNGTHWFVTQRNFYEPQIITTDNTFVSGNCDVVIGIVNNTVYDPLQPELDSFKEELDKYFKNHTSPDVDLGDISGINASVVNIQKEIDRLNEVAKNLNESLIDLQELGKYEQYIKGGSGYIPEAPRDGQAYVRKDGEWVLLSTFL

SEQ ID NO: 6594 - protein, 1241 aa, Artificial Sequence
  SARS-CoV-2/Belgium/BA-02291/2020__EPI_ISL_415159 spike protein (1-1211)(T874C_S1055C) Foldon construct
MFVFLVLLPLVSSQCVNLTTRTQLPPAYTNSFTRGVYYPDKVFRSSVLHSTQDLFLPFFSNVTWFHAIHVSGTNGTKRFDNPVLPFNDGVYFASTEKSNIIRGWIFGTTLDSKTQSLLIVNNATNVVIKVCEFQFCNDPFLGVYYHKNNKSWMESEFRVYSSANNCTFEYVSQPFLMDLEGKQGNFKNLREFVFKNIDGYFKIYSKHTPINLVRDLPQGFSALEPLVDLPIGINITRFQTLLALHRSYLTPGDSSSGWTAGAAAYYVGYLQPRTFLLKYNENGTITDAVDCALDPLSETKCTLKSFTVEKGIYQTSNFRVQPTESIVRFPNITNLCPFGEVFNATRFASVYAWNRKRISNCVADYSVLYNSASFSTFKCYGVSPTKLNDLCFTNVYADSFVIRGDEVRQIAPGQTGKIADYNYKLPDDFTGCVIAWNSNNLDSKVGGNYNYLYRLFRRSNLKPFERDISTEIYQAGSTPCNGVEGFNCYFPLQSYGFQPTNGVGYQPYRVVVLSFELLPAPATVCGPKKSTNLVKNKCVNFNFNGLTGTGVLTESNKKFLPFQQFGRDIADTTDAVRDPQTLEILDITPCSFGGVSVITPGTNTSNQVAVLYQGVNCTEVPVAIHADQLTPTWRVYSTGSNVFQTRAGCLIGAEHVNNSYECDIPIGAGICASYQTQTNSPRRARSVASQSIIAYTMSLGAENSVAYSNNSIAIPTNFTISVTTEILPVSMTKTSVDCTMYICGDSTECSNLLLQYGSFCTQLNRALTGIAVEQDKNTQEVFAQVKQIYKTPPIKDFGGFNFSQILPDPSKPSKRSFIEDLLFNKVTLADAGFIKQYGDCLGDIAARDLICAQKFNGLTVLPPLLTDEMIAQYCSALLAGTITSGWTFGAGAALQIPFAMQMAYRFNGIGVTQNVLYENQKLIANQFNSAIGKIQDSLSSAAPALGKLQDVVNQNAQALNTLVKQLSSNFGAISSVLNDILSRLDKVEAEVQIDRLITGRLQSLQTYVTQQLIRAAEIRASANLAATKMSECVLGQSKRVDFCGKGYHLMSFPQCAPHGVVFLHVTYVPAQEKNFTTAPAICHDGKAHFPREGVFVSNGTHWFVTQRNFYEPQIITTDNTFVSGNCDVVIGIVNNTVYDPLQPELDSFKEELDKYFKNHTSPDVDLGDISGINASVVNIQKEIDRLNEVAKNLNESLIDLQELGKYEQYIKGGSGYIPEAPRDGQAYVRKDGEWVLLSTFL

SEQ ID NO: 6595 - protein, 1241 aa, Artificial Sequence
  SARS-CoV-2/USA/WA8-UW5/2020__EPI_ISL_413486 spike protein (1-1211)(T874C_S1055C) Foldon construct
MFVFLVLLPLVSSQCVNLTTRTQLPPAYTNSFTRGVYYPDKVFRSSVLHSTQDLFLPFFSNVTWFHAIHVSGTNGTKRFDNPVLPFNDGVYFASTEKSNIIRGWIFGTTLDSKTQSLLIVNNATNVVIKVCEFQFCNDPFLGVYYHKNNKSWMESEFRVYSSANNCTFEYVSQPFLMDLEGKQGNFKNLREFVFKNIDGYFKIYSKHTPINLVRDLPQGFSALEPLVDLPIGINITRFQTLLALHRSYLTPGDSSSGWTAGAAAYYVGYLQPRTFLLKYNENGTITDAVDCALDPLSETKCTLKSFTVEKGIYQTSNFRVQPTESIVRFPNITNLCPFGEVFNATRFASVYAWNRKRISNCVADYSVLYNSASFSTFKCYGVSPTKLNDLCFTNVYADSFVIRGDEVRQIAPGQTGKIADYNYKLPDDFTGCVIAWNSNNLDSKVGGNYNYLYRLFRKSNLKPFERDISTEIYQAGSTPCNGVEGFNCYFPLQSYGFQPTNGVGYQPYRVVVLSFELLHAPATVCGPKKSTNLVKNKCVNFNFNGLTGTGVLTESNKKFLPFQQFGRDIADTTDAVRDPQTLEILDITPCSFGGVSVITPGTNTSNQVAVLYQDVNCTEVPVAIHADQLTPTWRVYSTGSNVFQTRAGCLIGAEYVNNSYECDIPIGAGICASYQTQTNSPRRARSVASQSIIAYTMSLGAENSVAYSNNSIAIPTNFTISVTTEILPVSMTKTSVDCTMYICGDSTECSNLLLQYGSFCTQLNRALTGIAVEQDKNTQEVFAQVKQIYKTPPIKDFGGFNFSQILPDPSKPSKRSFIEDLLFNKVTLADAGFIKQYGDCLGDIAARDLICAQKFNGLTVLPPLLTDEMIAQYCSALLAGTITSGWTFGAGAALQIPFAMQMAYRFNGIGVTQNVLYENQKLIANQFNSAIGKIQDSLSSTASALGKLQDVVNQNAQALNTLVKQLSSNFGAISSVLNDILSRLDKVEAEVQIDRLITGRLQSLQTYVTQQLIRAAEIRASANLAATKMSECVLGQSKRVDFCGKGYHLMSFPQCAPHGVVFLHVTYVPAQEKNFTTAPAICHDGKAHFPREGVFVSNGTHWFVTQRNFYEPQIITTDNTFVSGNCDVVIGIVNNTVYDPLQPELDSFKEELDKYFKNHTSPDVDLGDISGINASVVNIQKEIDRLNEVAKNLNESLIDLQELGKYEQYIKGGSGYIPEAPRDGQAYVRKDGEWVLLSTFL

SEQ ID NO: 6596 - protein, 1241 aa, Artificial Sequence
  SARS-CoV-2/England/20102000506/2020__EPI_ISL_415147 spike protein (1-1211)(T874C_S1055C) Foldon construct
MFVFLVLLPLVSSQCVNLTTRTQLPPAYTNSFTRGVYYPDKVFRSSVLHSTQDLFLPFFSNVTWFHAIHVSGTNGTKRFDNPVLPFNDGVYFASTEKSNIIRGWIFGTTLDSKTQSLLIVNNATNVVIKVCEFQFCNDPFLGVYYHKNNKSWMESEFRVYSSANNCTFEYVSQPFLMDLEGKQGNFKNLREFVFKNIDGYFKIYSKHTPINLVRDLPQGFSALEPLVDLPIGINITRFQTLLALHRSYLTPGDSSSGWTAGAAAYYVGYLQPRTFLLKYNENGTITDAVDCALDPLSETKCTLKSFTVEKGIYQTSNFRVQPTESIVRFPNITNLCPFGEVFNATRFASVYAWNRKRISNCVADYSVLYNSASFSTFKCYGVSPTKLNDLCFTNVYADSFVIRGDEVRQIAPGQTGKIADYNYKLPDDFTGCVIAWNSNNLDSKVGGNYNYLYRLFRKSNLKPFERDISTEIYQAGSTPCNGVEGFNCYFPLQSYGFQPTNGVGYQPYRVVVLSFELLHAPATVCGPKKSTNLVKNKCVNFNFNGLTGTGVLTESNKKFLPFQQFGRDIADTTDAVRDPQTLEILDITPCSFGGVSVITPGTNTSNQVAVLYQGVNCTEVPVAIHADQLTPTWRVYSTGSNVFQTRAGCLIGAEHVNNSYECDIPIGAGICASYQTQTNSPRRARSVASQSIIAYTMSLGAENSVAYSNNSIAIPTNFTISVTTEILPVSMTKTSVDCTMYICGDSTECSNLLLQYGSFCTQLNRALTGIAVEQDKNTQEVFAQVKQIYKTPPIKDFGGFNFSQILPDPSKPSKRSFIEDLLFNKVTLADAGFIKQYGYCLGDIAARDLICAQKFNGLTVLPPLLTDEMIAQYCSALLAGTITSGWTFGAGAALQIPFAMQMAYRFNGIGVTQNVLYENQKLIANQFNSAIGKIQDSLSSTASALGKLQDVVNQNAQALNTLVKQLSSNFGAISSVLNDILSRLDKVEAEVQIDRLITGRLQSLQTYVTQQLIRAAEIRASANLAATKMSECVLGQSKRVDFCGKGYHLMSFPQCAPHGVVFLHVTYVPAQEKNFTTAPAICHDGKAHFPREGVFVSNGTHWFVTQRNFYEPQIITTDNTFVSGNCDVVIGIVNNTVYDPLQPELDSFKEELDKYFKNHTSPDVDLGDISGINASVVNIQKEIDRLNEVAKNLNESLIDLQELGKYEQYIKGGSGYIPEAPRDGQAYVRKDGEWVLLSTFL

SEQ ID NO: 6597 - protein, 1241 aa, Artificial Sequence
  SARS-CoV-2/Belgium/VAG-03013/2020__EPI_ISL_415155 spike protein (1-1211)(T874C_S1055C) Foldon construct
MFVFLVLLPLVSSQCVNLTTRTQLPPAYTNSFTRGVYYPDKVFRSSVLHSTQDLFLPFFSNVTWFHAIHVSGTNGTKRFDNPVLPFNDGVYFASTEKSNIIRGWIFGTTLDSKTQSLLIVNNATNVVIKVCEFQFCNDPFLGVYYHKNNKSWMESEFRVYSSANNCTFEYVSQPFLMDLEGKQGNFKNLREFVFKNIDGYFKIYSKHTPINLVRDLPQGFSALEPLVDLPIGINITRFQTLLALHRSYLTPGDSSSGWTAGAAAYYVGYLQPRTFLLKYNENGTITDAVDCALDPLSETKCTLKSFTVEKGIYQTSNFRVQPTESIVRFPNITNLCPFGEVFNATRFASVYAWNRKRISNCVADYSVLYNSASFSTFKCYGVSPTKLNDLCFTNVYADSFVIRGDEVRQIAPGQTGKIADYNYKLPDDFTGCVIAWNSNNLDSKVGGNYNYLYRLFRKSNLKPFERDISTEIYQAGSTPCNGVEGFNCYFPLQSYGFQPTNGVGYQPYRVVVLSFELLHAPATVCGPKKSTNLVKNKCVNFNFNGLTGTGVLTESNKKFLPFQQFGRDIADTTDAVRDPQTLEILDITPCSFGGVSVITPGTNTSNQVAVLYQGVNCTEVPVAIHADQLTPTWRVYSTGSNVFQTRAGCLIGAEHVNNSYECDIPIGAGICASYQTQTNSPRRARSVASQSIIAYTMSLGAENSVAYSNNSIAIPTNFTISVTTEILPVSMTKTSVDCTMYICGDSTECSNLLLQYGSFCTQLNRALTGIAVEQDKNTQEVFAQVKQIYKTPPIKDFGGFNFSQILPDPSKPSKRSFIEDLLFNKVTLADAGFIKQYGDCLGDIAARDLICAQKFNGLTVLPPLLTDEMIAQYCSALLAGTITSGWTFGAGAALQIPFAMQMAYRFNGIGVTQNVLYENQKLIANQFNSAIGKIQDSLSSTATALGKLQDVVNQNAQALNTLVKQLSSNFGAISSVLNDILSRLDKVEAEVQIDRLITGRLQSLQTYVTQQLIRAAEIRASANLAATKMSECVLGQSKRVDFCGKGYHLMSFPQCAPHGVVFLHVTYVPAQEKNFTTAPAICHDGKAHFPREGVFVSNGTHWFVTQRNFYEPQIITTDNTFVSGNCDVVIGIVNNTVYDPLQPELDSFKEELDKYFKNHTSPDVDLGDISGINASVVNIQKEIDRLNEVAKNLNESLIDLQELGKYEQYIKGGSGYIPEAPRDGQAYVRKDGEWVLLSTFL

SEQ ID NO: 6598 - protein, 1241 aa, Artificial Sequence
  SARS-CoV-2/Belgium/BC-03016/2020__EPI_ISL_415157 spike protein (1-1211)(T874C_S1055C) Foldon construct
MFVFLVLLPLVSSQCVNLTTRTQLPPAYTNSFTRGVYYPDKVFRSSVLHSTQDLFLPFFSNVTWFHAIHVSGTNGTKRFDNPVLPFNDGVYFASTEKSNIIRGWIFGTTLDSKTQSLLIVNNATNVVIKVCEFQFCNDPFLGVYYHKNNKSWMESEFRVYSSANNCTFEYVSQPFLMDLEGKQGNFKNLREFVFKNIDGYFKIYSKHTPINLVRDLPQGFSALEPLVDLPIGINITRFQTLLALHRSYLTPGDSSSGWTAGAAAYYVGYLQPRTFLLKYNENGTITDAVDCALDPLSETKCTLKSFTVEKGIYQTSNFRVQPTESIVRFPNITNLCPFGEVFNATRFASVYAWNRKRISNCVADYSVLYNSASFSTFKCYGVSPTKLNDLCFTNVYADSFVIRGDEVRQIAPGQTGKIADYNYKLPDDFTGCVIAWNSNNLDSKVGGNYNYLYRLFRKSNLKPFERDISTEIYQAGSTPCNGVEGFNCYFPLQSYGFQPTNGVGYQPYRVVVLSFELLHAPATVCGPKKSTNLVKNKCVNFNFNGLTGTGVLTESNKKFLPFQQFGRDIADTTDAVRDPQTLEILDITPCSFGGVSVITPGTNTSNQVAVLYQGVNCTEVPVAIHADQLTPTWRVYSTGSNVFQTRAGCLIGAEHVNNSYECDIPIGAGICASYQTQTNSPRRARSVASQSIIAYTMSLGAENSVAYSNNSIAIPTNFTISVTTEILPVSMTKTSVDCTMYICGDSTECSNLLLQYGSFCTQLNRALTGIAVEQDKNTQEVFAQVKQIYKTPPIKDFGGFNFSQILPDPSKPSKRSFIEDLLFNKVTLADAGFIKQYGDCLGDIAARDLICAQKFNGLTVLPPLLTDEMIAQYCSALLAGTITSGWTFGAGAALQIPFAMQMAYRFNGIGVTQNVLYENQKLIANQFNSAIGKIQDSLSSTAPALGKLQDVVNQNAQALNTLVKQLSSNFGAISSVLNDILSRLDKVEAEVQIDRLITGRLQSLQTYVTQQLIRAAEIRASANLAATKMSECVLGQSKRVDFCGKGYHLMSFPQCAPHGVVFLHVTYVPAQEKNFTTAPAICHDGKAHFPREGVFVSNGTHWFVTQRNFYEPQIITTDNTFVSGNCDVVIGIVNNTVYDPLQPELDSFKEELDKYFKNHTSPDVDLGDISGINASVVNIQKEIDRLNEVAKNLNESLIDLQELGKYEQYIKGGSGYIPEAPRDGQAYVRKDGEWVLLSTFL

SEQ ID NO: 6599 - protein, 1241 aa, Artificial Sequence
  SARS-CoV-2/Germany/BavPat3/2020__EPI_ISL_414521 spike protein (1-1211)(T874C_S1055C) Foldon construct
MFVFLVLLPLVSSQCVNLTTRTQLPPAYTNSFTRGVYYPDKVFRSSVLHSTQDLFLPFFSNVTWFHAIHVSGTNGTKRFDNPVLPFNDGVYFASTEKSNIIRGWIFGTTLDSKTQSLLIVNNATNVVIKVCEFQFCNDPFLGVYYHKNNKSWMESEFRVYSSANNCTFEYVSQPFLMDLEGKQGNFKNLREFVFKNIDGYFKIYSKHTPINLVRDLPQGFSALEPLVDLPIGINITRFQTLLALHRSYLTPGDSSSGWTAGAAAYYVGYLQPRTFLLKYNENGTITDAVDCALDPLSETKCTLKSFTVEKGIYQTSNFRVQPTESIVRFPNITNLCPFGEVFNATRFASVYAWNRKRISNCVADYSVLYNSASFSTFKCYGVSPTKLNDLCFTNVYADSFVIRGDEVRQIAPGQTGKIADYNYKLPDDFTGCVIAWNSNNLDSKVGGNYNYLYRLFRKSNLKPFERDISTEIYQAGSTPCNGVEGFNCYFPLQSYGFQPTNGVGYQPYRVVVLSFELLHAPATVCGPKKSTNLVKNKCVNFNFNGLTGTGVLTESNKKFLPFQQFGRDIADTTDAVRDPQTLEILDITPCSFGGVSVITPGTNTSNQVAVLYQDVNCTEVPVAIHADQLTPTWRVYSTGSNVFQTRAGCLIGAEHVNNSYECDIPIGAGICASYQTQTNSPRRARSVASQSIIAYTMSLGAENSVAYSNNSIAIPTNFTISVTTEILPVSMTKTSVDCTMYICGDSTECSNLLLQYGSFCTQLNRALTGIAVEQDKNTQQVFAQVKQIYKTPPIKDFGGFNFSQILPDPSKPSKRSFIEDLLFNKVTLADAGFIKQYGDCLGDIAARDLICAQKFNGLTVLPPLLTDEMIAQYCSALLAGTITSGWTFGAGAALQIPFAMQMAYRFNGIGVTQNVLYENQKLIANQFNSAIGKIQDSLSSTASALGKLQDVVNQNAQALNTLVKQLSSNFGAISSVLNDILSRLDKVEAEVQIDRLITGRLQSLQTYVTQQLIRAAEIRASANLAATKMSECVLGQSKRVDFCGKGYHLMSFPQCAPHGVVFLHVTYVPAQEKNFTTAPAICHDGKAHFPREGVFVSNGTHWFVTQRNFYEPQIITTDNTFVSGNCDVVIGIVNNTVYDPLQPELDSFKEELDKYFKNHTSPDVDLGDISGINASVVNIQKEIDRLNEVAKNLNESLIDLQELGKYEQYIKGGSGYIPEAPRDGQAYVRKDGEWVLLSTFL

SEQ ID NO: 6600 - protein, 1241 aa, Artificial Sequence
  SARS-CoV-2/France/HF1805/2020__EPI_ISL_414628 spike protein (1-1211)(T874C_S1055C) Foldon construct
MFVFLVLLPLVSSQCVNLTTRTQLPPAYTNSFTRGVYYPDKVFRSSVLHSTQDLFLPFFSNVTWFHAIHVSGTNGTKRFDNPVLPFNDGVYFASTEKSNIIRGWIFGTTLDSKTQSLLIVNNATNVVIKVCEFQFCNDPFLGVYYHKNNKSWMESEFRVYSSANNCTFEYVSQPFLMDLEGKQGNFKNLREFVFKNIDGYFKIYSKHTPINLVRDLPQGFSALEPLVDLPIGINITRFQTLLALHRSYLTPGDSSSGWTAGAAAYYVGYLQPRTFLLKYNENGTITDAVDCALDPLSETKCTLKSFTVEKGIYQTSNFRVQPTESIVRFPNITNLCPFGEVFNATRFASVYAWNRKRISNCVADYSVLYNSASFSTFKCYGVSPTKLNDLCFTNVYADSFVIRGDEVRQIAPGQTGKIADYNYKLPDDFTGCVIAWNSNNLDSKVGGNYNYLYRLFRKSNLKPFERDISTEIYQAGSTPCNGVEGFNCYFPLQSYGFQPTNGVGYQPYRVVVLSFELLHAPATVCGPKKSTNLVKNKCVNFNFNGLTGTGVLTESNKKFLPFQQFGRDIADTTDAVRDPQTLEILDITPCSFGGVSVITPGTNTSNQVAVLYQGVNCTEVPVAIHADQLTPTWRVYSTGSNVFQTRAGCLIGAEHVNNSYECDIPIGAGICASYQTQTNSPRRARSVASQSIIAYTMSLGAENSVAYSNNSIAIPTNFTISVTTEILPVSMTKTSVDCTMYICGDSTECSNLLLQYGSFCTQLNRALTGIAVEQDKNTQEVFAQVKQIYKTPPIKDFGGFNFSQILPDPSKPSKRSFIEDLLFNKVTLADAGFIKQYGDCLGDIAARDLICAQKFNGLTVLPPLLTDEMIAQYCSALLAGTITSGWTFGAGAALQIPFAMQMAYRFNGIGVTQNVLYENQKLIANQFNSAIGKIQDSLSSTASALGKLQDVVNQNAQALNTLVKQLSSNFGAISSVLNDILSRLDKVEAEVQIDRLITGRLQSLQTYVTQQLIRAAEIRASANLAATKMSECVLGQSKRVDFCGKGYHLMSFPQCAPHGVVFLHVTYVPAQEKNFTTAPAICHDGKAHFPREGVFVSNGTHWFVTQRNFYEPQIITTDNTFVSGNCDVVIGVVNNTVYDPLQPELDSFKEELDKYFKNHTSPDVDLGDISGINASVVNIQKEIDRLNEVAKNLNESLIDLQELGKYEQYIKGGSGYIPEAPRDGQAYVRKDGEWVLLSTFL

SEQ ID NO: 6601 - protein, 1241 aa, Artificial Sequence
  SARS-CoV-2/Netherlands/ZuidHolland_9/2020__EPI_ISL_414445 spike protein (1-1211)(T874C_S1055C) Foldon construct
MFVFLVLLPLVSSQCVNLTTRTQLPPAYTNSFTRGVYYPDKVFRSSVLHSTQDLFLPFFSNVTWFHAIHVSGTNGTKRFDNPVLPFNDGVYFASTEKSNIIRGWIFGTTLDSKTQSLLIVNNATNVVIKVCEFQFCNDPFLGVYYHKNNKSWMESEFRVYSSANNCTFEYVSQPFLMDLEGKQGNFKNLREFVFKNIDGYFKIYSKHTPINLVRDLPQGFSALEPLVDLPIGINITRFQTLLALHRSYLTPGDSSSGWTAGAAAYYVGYLQPRTFLLKYNENGTITDAVDCALDPLSETKCTLKSFTVEKGIYQTSNFRVQPTESIVRFPNITNLCPFGEVFNATRFASVYAWNRKRISNCVADYSVLYNSASFSTFKCYGVSPTKLNDLCFTNVYADSFVIRGDEVRQIAPGQTGKIADYNYKLPDDFTGCVIAWNSNNLDSKVGGNYNYLYRLFRKSNLKPFERDISTEIYQAGSTPCNGVEGFNCYFPLQSYGFQPTNGVGYQPYRVVVLSFELLHAPATVCGPKKSTNLVKNKCVNFNFNGLTGTGVLTESNKKFLPFQQFGRDIADTTDAVRDPQTLEILDITPCSFGGVSVITPGTNTSNQVAVLYQGVNCTEVPVAIHADQLTPTWRVYSTGSNVFQTRAGCLIGAEHVNNSYECDIPIGAGICASYQTQTNSPRRARSVASQSIIAYTMSLGAENSVAYSNNSIAIPTNFTISVTTEILPVSMTKTSVDCTMYICGDSTECSNLLLQYGSFCTQLNRALTGIAVEQDKNTQEVFAQVKQIYKTPPIKDFGGFNFSQILPDPSKPSKRSFIEDLLFNKVTLADAGFIKQYGDCLGDIAARDLICVQKFNGLTVLPPLLTDEMIAQYCSALLAGTITSGWTFGAGAALQIPFAMQMAYRFNGIGVTQNVLYENQKLIANQFNSAIGKIQDSLSSTASALGKLQDVVNQNAQALNTLVKQLSSNFGAISSVLNDILSRLDKVEAEVQIDRLITGRLQSLQTYVTQQLIRAAEIRASANLAATKMSECVLGQSKRVDFCGKGYHLMSFPQCAPHGVVFLHVTYVPAQEKNFTTAPAICHDGKAHFPREGVFVSNGTHWFVTQRNFYEPQIITTDNTFVSGNCDVVIGIVNNTVYDPLQPELDSFKEELDKYFKNHTSPDVDLGDISGINASVVNIQKEIDRLNEVAKNLNESLIDLQELGKYEQYIKGGSGYIPEAPRDGQAYVRKDGEWVLLSTFL

SEQ ID NO: 6602 - protein, 1241 aa, Artificial Sequence
  SARS-CoV-2/Finland/FIN03032020A/2020__EPI_ISL_413602 spike protein (1-1211)(T874C_S1055C) Foldon construct
MFVFLVLLPLVSSQCVNLTTRTQLPPAYTNSFTRGVYYPDKVFRSSVLHSTQDLFLPFFSNVTWFHAIHVSGTNGTKRFDNPVLPFNDGVYFASTEKSNIIRGWIFGTTLDSKTQSLLIVNNATNVVIKVCEFQFCNDPFLGVYYHKNNKSWMESEFRVYSSANNCTFEYVSQPFLMDLEGKQGNFKNLREFVFKNIDGYFKIYSKHTPINLVRDLPQGFSALEPLVDLPIGINITRFQTLLALHRSYLTPGDSSSGWTAGAAAYYVGYLQPRTFLLKYNENGTITDAVDCALDPLSETKCTLKSFTVEKGIYQTSNFRVQPTESIVRFPNITNLCPFGEVFNATRFASVYAWNRKRISNCVADYSVLYNSASFSTFKCYGVSPTKLNDLCFTNVYADSFVIRGDEVRQIAPGQTGKIADYNYKLPDDFTGCVISWNSNNLDSKVGGNYNYLYRLFRKSNLKPFERDISTEIYQAGSTPCNGVEGFNCYFPLQSYGFQPTNGVGYQPYRVVVLSFELLHAPATVCGPKKSTNLVKNKCVNFNFNGLTGTGVLTESNKKFLPFQQFGRDIADTTDAVRDPQTLEILDITPCSFGGVSVITPGTNTSNQVAVLYQGVNCTEVPVAIHADQLTPTWRVYSTGSNVFQTRAGCLIGAEHVNNSYECDIPIGAGICASYQTQTNSPRRARSVASQSIIAYTMSLGAENSVAYSNNSIAIPTNFTISVTTEILPVSMTKTSVDCTMYICGDSTECSNLLLQYGSFCTQLNRALTGIAVEQDKNTQEVFAQVKQIYKTPPIKDFGGFNFSQILPDPSKPSKRSFIEDLLFNKVTLADAGFIKQYGDCLGDIAARDLICAQKFNGLTVLPPLLTDEMIAQYCSALLAGTITSGWTFGAGAALQIPFAMQMAYRFNGIGVTQNVLYENQKLIANQFNSAIGKIQDSLSSTASALGKLQDVVNQNAQALNTLVKQLSSNFGAISSVLNDILSRLDKVEAEVQIDRLITGRLQSLQTYVTQQLIRAAEIRASANLAATKMSECVLGQSKRVDFCGKGYHLMSFPQCAPHGVVFLHVTYVPAQEKNFTTAPAICHDGKAHFPREGVFVSNGTHWFVTQRNFYEPQIITTDNTFVSGNCDVVIGIVNNTVYDPLQPELDSFKEELDKYFKNHTSPDVDLGDISGINASVVNIQKEIDRLNEVAKNLNESLIDLQELGKYEQYIKGGSGYIPEAPRDGQAYVRKDGEWVLLSTFL

SEQ ID NO: 6603 - protein, 1241 aa, Artificial Sequence
  SARS-CoV-2/France/GE1977/2020__EPI_ISL_414632 spike protein (1-1211)(T874C_S1055C) Foldon construct
MFVFLVLLPLVSSQCVNLTTRTQLPPAYTNSFTRGVYYPDKVFRSSVLHSTQDLFLPFFSNVTWFHAIHVSGTNGTKRFDNPVLPFNDGVYFASTEKSNIIRGWIFGTTLDSKTQSLLIVNNATNVVIKVCEFQFCNDPFLGVYYHKNNKSWMESEFRVYSSANNCTFEYVSQPFLMDLEGKQGNFKNLREFVFKNIDGYFKIYSKHTPINLVRDLPQGFSALEPLVDLPIGINITRFQTLLALHRSYLTPGDSSSGWTAGAAAYYVGYLQPRTFLLKYNENGTITDAVDCALDPLSETKCTLKSFTVEKGIYQTSNFRVQPTESIVRFPNITNLCPFGEVFNATRFASVYAWNRKRISNCVADYSVLYNSASFSTFKCYGVSPTKLNDLCFTNVYADSFVIRGDEVRQIAPGQTGKIADYNYKLPDDFTGCVIAWNSNNLDSKVGGNYNYLYRLFRKSNLKPFERDISTEIYQAGSTPCNGVEGFNCYFPLQSYGFQPTNGVGYQPYRVVVLSFELLHAPATVCGPKKSTNLVKNKCVNFNFNGLTGTGVLTESNKKFLPFQQFGRDIADTTDAVRDPQTLEILDITPCSFGGVSVITPGTNTSNQVAVLYQGVNCTEVPVAIHADQLTPTWRVYSTGSNVFQTRAGCLIGAEHVNNSYECDIPIGAGICASYQTQTNSPRRARSVASQSIIAYTMSLGAENSVAYSNNSIAIPTNFTISVTTEILPVSMTKTSVDCTMYICGDSTECSNLLLQYGSFCTQLNRALTGIAVEQDKNTQEVFAQVKQIYKTPPIKDFGGFNFSQILPDPSKPSKRSFIEDLLFNKVTLADAGFIKQYGDCLGDIAARDLICAQKFNGLTVLPPLLTDEMIAQYCSALLAGTITSGWTFGAGAALQIPFAMQMAYRFNGIGVTQNVLYENQKLIANQFNSAIGKIQDSLFSTASALGKLQDVVNQNAQALNTLVKQLSSNFGAISSVLNDILSRLDKVEAEVQIDRLITGRLQSLQTYVTQQLIRAAEIRASANLAATKMSECVLGQSKRVDFCGKGYHLMSFPQCAPHGVVFLHVTYVPAQEKNFTTAPAICHDGKAHFPREGVFVSNGTHWFVTQRNFYEPQIITTDNTFVSGNCDVVIGIVNNTVYDPLQPELDSFKEELDKYFKNHTSPDVDLGDISGINASVVNIQKEIDRLNEVAKNLNESLIDLQELGKYEQYIKGGSGYIPEAPRDGQAYVRKDGEWVLLSTFL

SEQ ID NO: 6604 - protein, 1241 aa, Artificial Sequence
  SARS-CoV-2/Finland/FIN-313/2020__EPI_ISL_414641 spike protein (1-1211)(T874C_S1055C) Foldon construct
MFVFLVLLPLVSSQCVNLTTRTQLPPAYTNSFTRGVYYPDKVFRSSVLHSTQDLFLPFFSNVTWFHAIHVSGTNGTKRFDNPVLPFNDGVYFASTEKSNIIRGWIFGTTLDSKTQSLLIVNNATNVVIKVCEFQFCNDPFLGVYYHKNNKSWMESEFRVYSSANNCTFEYVSQPFLMDLEGKQGNFKNLREFVFKNIDGYFKIYSKHTPINLVRDLPQGFSALEPLVDLPIGINITRFKTLLALHRSYLTPGDSSSGWTAGAAAYYVGYLQPRTFLLKYNENGTITDAVDCALDPLSETKCTLKSFTVEKGIYQTSNFRVQPTESIVRFPNITNLCPFGEVFNATRFASVYAWNRKRISNCVADYSVLYNSASFSTFKCYGVSPTKLNDLCFTNVYADSFVIRGDEVRQIAPGQTGKIADYNYKLPDDFTGCVIAWNSNNLDSKVGGNYNYLYRLFRKSNLKPFERDISTEIYQAGSTPCNGVEGFNCYFPLQSYGFQPTNGVGYQPYRVVVLSFELLHAPATVCGPKKSTNLVKNKCVNFNFNGLTGTGVLTESNKKFLPFQQFGRDIADTTDAVRDPQTLEILDITPCSFGGVSVITPGTNTSNQVAVLYQGVNCTEVPVAIHADQLTPTWRVYSTGSNVFQTRAGCLIGAEHVNNSYECDIPIGAGICASYQTQTNSPRRARSVASQSIIAYTMSLGAENSVAYSNNSIAIPTNFTISVTTEILPVSMTKTSVDCTMYICGDSTECSNLLLQYGSFCTQLNRALTGIAVEQDKNTQEVFAQVKQIYKTPPIKDFGGFNFSQILPDPSKPSKRSFIEDLLFNKVTLADAGFIKQYGDCLGDIAARDLICAQKFNGLTVLPPLLTDEMIAQYCSALLAGTITSGWTFGAGAALQIPFAMQMAYRFNGIGVTQNVLYENQKLIANQFNSAIGKIQDSLSSTASALGKLQDVVNQNAQALNTLVKQLSSNFGAISSVLNDILSRLDKVEAEVQIDRLITGRLQSLQTYVTQQLIRAAEIRASANLAATKMSECVLGQSKRVDFCGKGYHLMSFPQCAPHGVVFLHVTYVPAQEKNFTTAPAICHDGKAHFPREGVFVSNGTHWFVTQRNFYEPQIITTDNTFVSGNCDVVIGIVNNTVYDPLQPELDSFKEELDKYFKNHTSPDVDLGDISGINASVVNIQKEIDRLNEVAKNLNESLIDLQELGKYEQYIKGGSGYIPEAPRDGQAYVRKDGEWVLLSTFL

SEQ ID NO: 6605 - protein, 1241 aa, Artificial Sequence
  SARS-CoV-2/Netherlands/ZuidHolland_2/2020__EPI_ISL_414556 spike protein (1-1211)(T874C_S1055C) Foldon construct
MFVFLVLLPLVSSQCVNLTTRTQLPPAYTNSFTRGVYYPDKVFRSSVLHSTQDLFLPFFSNVTWFHAIHVSGTNGTKRFDNPVLPFNDGVYFASTEKSNIIRGWIFGTTLDSKTQSLLIVNNATNVVIKVCEFQFCNDPFLGVYYHKNNKSWMESEFRVYSSANNCTFEYVSQPFLMDLEGKQGNFKNLREFVFKNIDGYFKIYSKHTPINLVRDLPQGFSALEPLVDLPIGINITRFQTLLALHRSYLTPGDSSSGWTAGAAAYYVGYLQPRTFLLKYNENGTITDAVDCALDPLSETKCTLKSFTVEKGIYQTSNFRVQPTESIVRFPNITNLCPFGEVFNATRFASVYAWNRKRISNCVADYSVLYNSASFSTFKCYGVSPTKLNDLCFTNVYADSFVIRGDEVRQIAPGQTGKIADYNYKLPDDFTGCVIAWNSNNLDSKVGGNYNYLYRLFRKSNLKPFERDISTEIYQAGSTPCNGVEGFNCYFPLQSYGFQPTNGVGYQPYRVVVLSFELLHAPATVCGPKKSTNLVKNKCVNFNFNGLTGTGVLTESNKKFLPFQQFGRDIADTTDAVRDPQTLEILDITPCSFGGVSVITPGTNTSNQVAVLYQGVNCTEVPVAIHADQLTPTWRVYSTGSNVFQTRAGCLIGAEHVNNSYECDIPIGAGICASYQTQTNSPRRARSVASQSIIAYTMSLGAENSVAYSNNSIAIPTNFTISVTTEILPVSMTKTSVDCTMYICGDSTECSNLLLQYGSFCTQLNRALTGIALEQDKNTQEVFAQVKQIYKTPPIKDFGGFNFSQILPDPSKPSKRSFIEDLLFNKVTLADAGFIKQYGDCLGDIAARDLICAQKFNGLTVLPPLLTDEMIAQYCSALLAGTITSGWTFGAGAALQIPFAMQMAYRFNGIGVTQNVLYENQKLIANQFNSAIGKIQDSLSSTASALGKLQDVVNQNAQALNTLVKQLSSNFGAISSVLNDILSRLDKVEAEVQIDRLITGRLQSLQTYVTQQLIRAAEIRASANLAATKMSECVLGQSKRVDFCGKGYHLMSFPQCAPHGVVFLHVTYVPAQEKNFTTAPAICHDGKAHFPREGVFVSNGTHWFVTQRNFYEPQIITTDNTFVSGNCDVVIGIVNNTVYDPLQPELDSFKEELDKYFKNHTSPDVDLGDISGINASVVNIQKEIDRLNEVAKNLNESLIDLQELGKYEQYIKGGSGYIPEAPRDGQAYVRKDGEWVLLSTFL

SEQ ID NO: 6606 - protein, 1241 aa, Artificial Sequence
  SARS-CoV-2/USA/WA-UW31/2020__EPI_ISL_414618 spike protein (1-1211)(T874C_S1055C) Foldon construct
MFVFLVLLPLVSSQCVNLTTRTQLPPAYTNSFTRGVYYPDKVFRSSVLHSTQDLFLPFFSNVTWFHAIHVSGTNGTKRFDNPVLPFNDGVYFASTEKSNIIRGWIFGTTLDSKTQSLLIVNNATNVVIKVCEFQFCNDPFLGVYYHKNNKSWMESEFRVYSSANNCTFEYVSQPFLMDLEGKQGNFKNLREFVFKNIDGYFKIYSKHTPINLVRDLPQGFSALEPLVDLPIGINITRFQTLLALHRSYLTPGDSSSGWTAGAAAYYVGYLQPRTFLLKYNENGTITDAVDCALDPLSETKCTLKSFTVEKGIYQTSNFRVQPTESIVRFPNITNLCPFGEVFNATRFASVYAWNRKRISNCVADYSVLYNSASFSTFKCYGVSPTKLNDLCFTNVYADSFVIRGDEVRQIAPGQTGKIADYNYKLPDDFTGCVIAWNSNNLDSKVGGNYNYLYRLFRKSNLKPFERDISTEIYQAGSTPCNGAEGFNCYFPLQSYGFQPTNGVGYQPYRVVVLSFELLHAPATVCGPKKSTNLVKNKCVNFNFNGLTGTGVLTESNKKFLPFQQFGRDIADTTDAVRDPQTLEILDITPCSFGGVSVITPGTNTSNQVAVLYQDVNCTEVPVAIHADQLTPTWRVYSTGSNVFQTRAGCLIGAEHVNNSYECDIPIGAGICASYQTQTNSPRRARSVASQSIIAYTMSLGAENSVAYSNNSIAIPTNFTISVTTEILPVSMTKTSVDCTMYICGDSTECSNLLLQYGSFCTQLNRALTGIAVEQDKNTQEVFAQVKQIYKTPPIKDFGGFNFSQILPDPSKPSKRSFIEDLLFNKVTLADAGFIKQYGDCLGDIAARDLICAQKFNGLTVLPPLLTDEMIAQYCSALLAGTITSGWTFGAGAALQIPFAMQMAYRFNGIGVTQNVLYENQKLIANQFNSAIGKIQDSLSSTASALGKLQDVVNQNAQALNTLVKQLSSNFGAISSVLNDILSRLDKVEAEVQIDRLITGRLQSLQTYVTQQLIRAAEIRASANLAATKMSECVLGQSKRVDFCGKGYHLMSFPQCAPHGVVFLHVTYVPAQEKNFTTAPAICHDGKAHFPREGVFVSNGTHWFVTQRNFYEPQIITTDNTFVSGNCDVVIGIVNNTVYDPLQPELDSFKEELDKYFKNHTSPDVDLGDISGINASVVNIQKEIDRLNEVAKNLNESLIDLQELGKYEQYIKGGSGYIPEAPRDGQAYVRKDGEWVLLSTFL

SEQ ID NO: 6607 - protein, 1241 aa, Artificial Sequence
  SARS-CoV-2/South Korea/SNU01/2020__EPI_ISL_411929 spike protein (1-1211)(T874C_S1055C) Foldon construct
MFVFLVLLPLVSSQCVNLTTRTQLPPAYTNSFTRGVYYPDKVFRSSVLHSTQDLFLPFFSNVTWFHAIHVSGTNGTKRFDNPVLPFNDGVYFASTEKSNIIRGWIFGTTLDSKTQSLLIVNNATNVVIKVCEFQFCNDPFLGVYYHKNNKSWMESEFRVYSSANNCTFEYVSQPFLMDLEGKQGNFKNLREFVFKNIDGYFKIYSKHTPINLVRDLPQGFWALEPLVDLPIGINITRFQTLLALHRSYLTPGDSSSGWTAGAAAYYVGYLQPRTFLLKYNENGTITDAVDCALDPLSETKCTLKSFTVEKGIYQTSNFRVQPTESIVRFPNITNLCPFGEVFNATRFASVYAWNRKRISNCVADYSVLYNSASFSTFKCYGVSPTKLNDLCFTNVYADSFVIRGDEVRQIAPGQTGKIADYNYKLPDDFTGCVIAWNSNNLDSKVGGNYNYLYRLFRKSNLKPFERDISTEIYQAGSTPCNGVEGFNCYFPLQSYGFQPTNGVGYQPYRVVVLSFELLHAPATVCGPKKSTNLVKNKCVNFNFNGLTGTGVLTESNKKFLPFQQFGRDIADTTDAVRDPQTLEILDITPCSFGGVSVITPGTNTSNQVAVLYQDVNCTEVPVAIHADQLTPTWRVYSTGSNVFQTRAGCLIGAEHVNNSYECDIPIGAGICASYQTQTNSPRRARSVASQSIIAYTMSLGAENSVAYSNNSIAIPTNFTISVTTEILPVSMTKTSVDCTMYICGDSTECSNLLLQYGSFCTQLNRALTGIAVEQDKNTQEVFAQVKQIYKTPPIKDFGGFNFSQILPDPSKPSKRSFIEDLLFNKVTLADAGFIKQYGDCLGDIAARDLICAQKFNGLTVLPPLLTDEMIAQYCSALLAGTITSGWTFGAGAALQIPFAMQMAYRFNGIGVTQNVLYENQKLIANQFNSAIGKIQDSLSSTASALGKLQDVVNQNAQALNTLVKQLSSNFGAISSVLNDILSRLDKVEAEVQIDRLITGRLQSLQTYVTQQLIRAAEIRASANLAATKMSECVLGQSKRVDFCGKGYHLMSFPQCAPHGVVFLHVTYVPAQEKNFTTAPAICHDGKAHFPREGVFVSNGTHWFVTQRNFYEPQIITTDNTFVSGNCDVVIGIVNNTVYDPLQPELDSFKEELDKYFKNHTSPDVDLGDISGINASVVNIQKEIDRLNEVAKNLNESLIDLQELGKYEQYIKGGSGYIPEAPRDGQAYVRKDGEWVLLSTFL

SEQ ID NO: 6608 - protein, 1241 aa, Artificial Sequence
  SARS-CoV-2/China/WF0004/2020__EPI_ISL_413694 spike protein (1-1211)(T874C_S1055C) Foldon construct
MFVFLVLLPLVSSQCVNLTTRTQLPPAYTNSFTRGVYYPDKVFRSSVLHSTQDLFLPFFSNVTWFHAIHVSGTNGTKRFDNPVLPFNDGVYFASTEKSNIIRGWIFGTTLDSKTQSLLIVNNATNVVIKVCEFQFCNDPFLGVYYHKNNKSWTESEFRVYSSANNCTFEYVSQPFLMDLEGKQGNFKNLREFVFKNIDGYFKIYSKHTPINLVRDLPQGFSALEPLVDLPIGINITRFQTLLALHRSYLTPGDSSSGWTAGAAAYYVGYLQPRTFLLKYNENGTITDAVDCALDPLSETKCTLKSFTVEKGIYQTSNFRVQPTESIVRFPNITNLCPFGEVFNATRFASVYAWNRKRISNCVADYSVLYNSASFSTFKCYGVSPTKLNDLCFTNVYADSFVIRGDEVRQIAPGQTGKIADYNYKLPDDFTGCVIAWNSNNLDSKVGGNYNYLYRLFRKSNLKPFERDISTEIYQAGSTPCNGVEGFNCYFPLQSYGFQPTNGVGYQPYRVVVLSFELLHAPATVCGPKKSTNLVKNKCVNFNFNGLTGTGVLTESNKKFLPFQQFGRDIADTTDAVRDPQTLEILDITPCSFGGVSVITPGTNTSNQVAVLYQDVNCTEVPVAIHADQLTPTWRVYSTGSNVFQTRAGCLIGAEHVNNSYECDIPIGAGICASYQTQTNSPRRARSVASQSIIAYTMSLGAENSVAYSNNSIAIPTNFTISVTTEILPVSMTKTSVDCTMYICGDSTECSNLLLQYGSFCTQLNRALTGIAVEQDKNTQEVFAQVKQIYKTPPIKDFGGFNFSQILPDPSKPSKRSFIEDLLFNKVTLADAGFIKQYGDCLGDIAARDLICAQKFNGLTVLPPLLTDEMIAQYCSALLAGTITSGWTFGAGAALQIPFAMQMAYRFNGIGVTQNVLYENQKLIANQFNSAIGKIQDSLSSTASALGKLQDVVNQNAQALNTLVKQLSSNFGAISSVLNDILSRLDKVEAEVQIDRLITGRLQSLQTYVTQQLIRAAEIRASANLAATKMSECVLGQSKRFDFCGKGYHLMSFPQCAPHGVVFLHVTYVPAQEKNFTTAPAICHDGKAHFPREGVFVSNGTHWFVTQRNFYEPQIITTDNTFVSGNCDVVIGIVNNTVYDPLQPELDSFKEELDKYFKNHTSPDVDLGDISGINASVVNIQKEIDRLNEVAKNLNESLIDLQELGKYEQYIKGGSGYIPEAPRDGQAYVRKDGEWVLLSTFL

SEQ ID NO: 6609 - protein, 1241 aa, Artificial Sequence
  SARS-CoV-2/China/WF0028/2020__EPI_ISL_413791 spike protein (1-1211)(T874C_S1055C) Foldon construct
MFVFLVLLPLVSSQCVNLTTRTQLPPAYTNSFTRGVYYPDKVFRSSVLHSTQDLFLPFFSNVTWFHAIHVSGTNGTKRFDNPVLPFNDGVYFASTEKSNIIRGWIFGTTLDSKTQSLLIVNNATNVVIKVCEFQFCNDPFLGVYYHKNNKSWMESEFRVYSSANNCTFEYVSQPFLMDLEGKQGNFKNLREFVFKNIDGYFKIYSKHTPINLVRDLPQGFSALEPLVDLPIGINITRFQTLLALHRSYLTPGDSSSGWTAGAAAYYVGYLQPRTFLLKYNENGTITDAVDCALDPLSETKCTLKSFTVEKGIYQTSNFRVQPTESIVRFPNITNLCPFGEVFNATRFASVYAWNRKRISNCVADYSVLYNSASFSTFKCYGVSPTKLNDLCFTNVYADSFVIRGDEVRQIAPGQTGKIADYNYKLPDDFTGCVIAWNSNNLDSKVGGNYNYLYRLFRKSNLKPFERDISTEIYQAGSTPCNGVEGFNCYFPLQSYGFQPTNGVGYQPYRVVVLSFELLHAPATVCGPKKSTNLVKNKCVNFNFNGLTGTGVLTESNKKFLPFQQFGRDIADTTDAVRDPQTLEILDITPCSFGGVSVITPGTNTSNQVAVLYQDVNCTEVPVAIHADQLTPTWRVYSTGSNVFQTRAGCLIGAEHVNNSYECDIPIGAGICASYQTQTNSPRRARSVASQSIIAYTMSLGAENSVAYSNNSIAIPTNFTISVTTEILPVSMTKTSVDCTMYICGDSTECSNLLLQYGSFCTQLNRALTGIAVEQDKNTQEVFAQVKQIYKTPPIKDFGGFNFSQILPDPSKPSKRSFIEDLLFNKVTLADAGFIKQYGDCLGDIAARDLICAQKFNGLTVLPPLLTDEMIAQYCSALLAGTITSGWTFGAGAALQIPFAMQMAYRFNGIGVTQNVLYENQKLIANQFNSAIGKIQDSLSSTASALGKLQDVVNQNAQALNTLVKQLSSNFGAISSVLNDILSRLDKVEAEVQIDRLITGRLQSLQTYVTQQLIRAAEIRASANLAATKMSECVLGQSKRVDFCGKGYHLMSFPQCAPHGVVFLHVTYVPAQEKNFTTAPAICHDGKAHFPREGVFVSNGTHWFVTQRNFYEPQIITTDNTFVSGNCDVVIGIVNNTVYDPLQPELESFKEELDKYFKNHTSPDVDLGDISGINASVVNIQKEIDRLNEVAKNLNESLIDLQELGKYEQYIKGGSGYIPEAPRDGQAYVRKDGEWVLLSTFL

SEQ ID NO: 6610 - protein, 1241 aa, Artificial Sequence
  SARS-CoV-2/2019-nCoV/USA-CruiseA-18/2020__MT159716.1 spike protein (1-1211)(T874C_S1055C) Foldon construct
MFVFLVLLPLVSSQCVNLTTRTQLPPAYTNSFTRGVYYPDKVFRSSVLHSTQDLFLPFFSNVTWFHAIHVSGTNGTKRFDNPVLPFNDGVYFASTEKSNIIRGWIFGTTLDSKTQSLLIVNNATNVVIKVCEFQFCNDPFLGVYYHKNNKSWMESELRVYSSANNCTFEYVSQPFLMDLEGKQGNFKNLREFVFKNIDGYFKIYSKHTPINLVRDLPQGFSALEPLVDLPIGINITRFQTLLALHRSYLTPGDSSSGWTAGAAAYYVGYLQPRTFLLKYNENGTITDAVDCALDPLSETKCTLKSFTVEKGIYQTSNFRVQPTESIVRFPNITNLCPFGEVFNATRFASVYAWNRKRISNCVADYSVLYNSASFSTFKCYGVSPTKLNDLCFTNVYADSFVIRGDEVRQIAPGQTGKIADYNYKLPDDFTGCVIAWNSNNLDSKVGGNYNYLYRLFRKSNLKPFERDISTEIYQAGSTPCNGVEGFNCYFPLQSYGFQPTNGVGYQPYRVVVLSFELLHAPATVCGPKKSTNLVKNKCVNFNFNGLTGTGVLTESNKKFLPFQQFGRDIADTTDAVRDPQTLEILDITPCSFGGVSVITPGTNTSNQVAVLYQDVNCTEVPVAIHADQLTPTWRVYSTGSNVFQTRAGCLIGAEHVNNSYECDIPIGAGICASYQTQTNSPRRARSVASQSIIAYTMSLGAENSVAYSNNSIAIPTNFTISVTTEILPVSMTKTSVDCTMYICGDSTECSNLLLQYGSFCTQLNRALTGIAVEQDKNTQEVFAQVKQIYKTPPIKDFGGFNFSQILPDPSKPSKRSFIEDLLFNKVTLADAGFIKQYGDCLGDIAARDLICAQKFNGLTVLPPLLTDEMIAQYCSALLAGTITSGWTFGAGAALQIPFAMQMAYRFNGIGVTQNVLYENQKLIANQFNSAIGKIQDSLSSTASALGKLQDVVNQNAQALNTLVKQLSSNFGAISSVLNDILSRLDKVEAEVQIDRLITGRLQSLQTYVTQQLIRAAEIRASANLAATKMSECVLGQSKRVDFCGKGYHLMSFPQCAPHGVVFLHVTYVPAQEKNFTTAPAICHDGKAHFPREGVFVSNGTHWFVTQRNFYEPQIITTDNTFVSGNCDVVIGIVNNTVYDPLQPELDSFKEELDKYFKNHTSPDVDLGDISGINASVVNIQKEIDRLNEVAKNLNESLIDLQELGKYEQYIKGGSGYIPEAPRDGQAYVRKDGEWVLLSTFL

SEQ ID NO: 6611 - protein, 1241 aa, Artificial Sequence
  SARS-CoV-2/SARS-CoV-2/Yunnan-01/human/2020/CHN__MT049951.1 spike protein (1-1211)(T874C_S1055C) Foldon construct
MFVFLVLLPLVSSQCVNLTTRTQLPPANTNSFTRGVYYPDKVFRSSVLHSTQDLFLPFFSNVTWFHAIHVSGTNGTKRFDNPVLPFNDGVYFASTEKSNIIRGWIFGTTLDSKTQSLLIVNNATNVVIKVCEFQFCNDPFLGVYYHKNNKSWMESEFRVYSSANNCTFEYVSQPFLMDLEGKQGNFKNLREFVFKNIDGYFKIYSKHTPINLVRDLPQGFSALEPLVDLPIGINITRFQTLLALHRSYLTPGDSSSGWTAGAAAYYVGYLQPRTFLLKYNENGTITDAVDCALDPLSETKCTLKSFTVEKGIYQTSNFRVQPTESIVRFPNITNLCPFGEVFNATRFASVYAWNRKRISNCVADYSVLYNSASFSTFKCYGVSPTKLNDLCFTNVYADSFVIRGDEVRQIAPGQTGKIADYNYKLPDDFTGCVIAWNSNNLDSKVGGNYNYLYRLFRKSNLKPFERDISTEIYQAGSTPCNGVEGFNCYFPLQSYGFQPTNGVGYQPYRVVVLSFELLHAPATVCGPKKSTNLVKNKCVNFNFNGLTGTGVLTESNKKFLPFQQFGRDIADTTDAVRDPQTLEILDITPCSFGGVSVITPGTNTSNQVAVLYQDVNCTEVPVAIHADQLTPTWRVYSTGSNVFQTRAGCLIGAEHVNNSYECDIPIGAGICASYQTQTNSPRRARSVASQSIIAYTMSLGAENSVAYSNNSIAIPTNFTISVTTEILPVSMTKTSVDCTMYICGDSTECSNLLLQYGSFCTQLNRALTGIAVEQDKNTQEVFAQVKQIYKTPPIKDFGGFNFSQILPDPSKPSKRSFIEDLLFNKVTLADAGFIKQYGDCLGDIAARDLICAQKFNGLTVLPPLLTDEMIAQYCSALLAGTITSGWTFGAGAALQIPFAMQMAYRFNGIGVTQNVLYENQKLIANQFNSAIGKIQDSLSSTASALGKLQDVVNQNAQALNTLVKQLSSNFGAISSVLNDILSRLDKVEAEVQIDRLITGRLQSLQTYVTQQLIRAAEIRASANLAATKMSECVLGQSKRVDFCGKGYHLMSFPQCAPHGVVFLHVTYVPAQEKNFTTAPAICHDGKAHFPREGVFVSNGTHWFVTQRNFYEPQIITTDNTFVSGNCDVVIGIVNNTVYDPLQPELDSFKEELDKYFKNHTSPDVDLGDISGINASVVNIQKEIDRLNEVAKNLNESLIDLQELGKYEQYIKGGSGYIPEAPRDGQAYVRKDGEWVLLSTFL

SEQ ID NO: 6612 - protein, 1241 aa, Artificial Sequence
  SARS-CoV-2/USA/WA-UW292/2020__EPI_ISL_418077 spike protein (1-1211)(T874C_S1055C) Foldon construct
MFVFLVLLPLVSSQCVNLTTRTQLPPAYTNSFTRGVYYPDKVFRSSVLHSTQDLFLPFFSNVTWFHAIHVSGTNGTKRFDNPVLPFNDGVYFASTEKSNIIRGWIFGTTLDSKTQSLLIVNNATNVVIKVCEFQFCNDPFLGVYYHKNNKSWMESEFRVYSSANNCTFEYVSQPFLMDLEGKQGNFKNLREFVFKNIDGYFKIYSKHTPINLVRDLPQGFSALEPLVDLPIGINITRFQTLLALHRSYLTPGDSSSGWTAGAAAYYVGYLQPRTFLLKYNENGTITDAVDCALDPLSETKCTLKSFTVEKGIYQTSNFRVQPTESIVRFPNITNLCPFGEVFNATRFASVYAWNRKRISNCVADYSVLYNSASFSTFKCYGVSPTKLNDLCFTNVYADSFVIRGDEVRQIAPGQTGKIADYNYKLPDDFTGCVIAWNSNNLDSKVGGNYNYLYRLFRKSNLKPFERDISTEIYQASSTPCNGVEGFNCYFPLQSYGFQPTNGVGYQPYRVVVLSFELLHAPATVCGPKKSTNLVKNKCVNFNFNGLTGTGVLTESNKKFLPFQQFGRDIADTTDAVRDPQTLEILDITPCSFGGVSVITPGTNTSNQVAVLYQDVNCTEVPVAIHADQLTPTWRVYSTGSNVFQTRAGCLIGAEHVNNSYECDIPIGAGICASYQTQTNSPRRARSVASQSIIAYTMSLGAENSVAYSNNSIAIPTNFTISVTTEILPVSMTKTSVDCTMYICGDSTECSNLLLQYGSFCTQLNRALTGIAVEQDKNTQEVFAQVKQIYKTPPIKDFGGFNFSQILPDPSKPSKRSFIEDLLFNKVTLADAGFIKQYGDCLGDIAARDLICAQKFNGLTVLPPLLTDEMIAQYCSALLAGTITSGWTFGAGAALQIPFAMQMAYRFNGIGVTQNVLYENQKLIANQFNSAIGKIQDSLSSTASALGKLQDVVNQNAQALNTLVKQLSSNFGAISSVLNDILSRLDKVEAEVQIDRLITGRLQSLQTYVTQQLIRAAEIRASANLAATKMSECVLGQSKRVDFCGKGYHLMSFPQCAPHGVVFLHVTYVPAQEKNFTTAPAICHDGKAHFPREGVFVSNGTHWFVTQRNFYEPQIITTDNTFVSGNCDVVIGIVNNTVYDPLQPELDSFKEELDKYFKNHTSPDVDLGDISGINASVVNIQKEIDRLNEVAKNLNESLIDLQELGKYEQYIKGGSGYIPEAPRDGQAYVRKDGEWVLLSTFL

SEQ ID NO: 6613 - protein, 1241 aa, Artificial Sequence
  SARS-CoV-2/Iceland/192/2020__EPI_ISL_417819 spike protein (1-1211)(T874C_S1055C) Foldon construct
MFVFFVLLPLVSSQCVNLTTRTQLPPAYTNSFTRGVYYPDKVFRSSVLHSTQDLFLPFFSNVTWFHAIHVSGTNGTKRFDNPVLPFNDGVYFASTEKSNIIRGWIFGTTLDSKTQSLLIVNNATNVVIKVCEFQFCNDPFLGVYYHKNNKSWMESEFRVYSSANNCTFEYVSQPFLMDLEGKQGNFKNLREFVFKNIDGYFKIYSKHTPINLVRDLPQGFSALEPLVDLPIGINITRFQTLLALHRSYLTPGDSSSGWTAGAAAYYVGYLQPRTFLLKYNENGTITDAVDCALDPLSETKCTLKSFTVEKGIYQTSNFRVQPTESIVRFPNITNLCPFGEVFNATRFASVYAWNRKRISNCVADYSVLYNSASFSTFKCYGVSPTKLNDLCFTNVYADSFVIRGDEVRQIAPGQTGKIADYNYKLPDDFTGCVIAWNSNNLDSKVGGNYNYLYRLFRKSNLKPFERDISTEIYQAGSTPCNGVEGFNCYFPLQSYGFQPTNGVGYQPYRVVVLSFELLHAPATVCGPKKSTNLVKNKCVNFNFNGLTGTGVLTESNKKFLPFQQFGRDIADTTDAVRDPQTLEILDITPCSFGGVSVITPGTNTSNQVAVLYQGVNCTEVPVAIHADQLTPTWRVYSTGSNVFQTRAGCLIGAEHVNNSYECDIPIGAGICASYQTQTNSPRRARSVASQSIIAYTMSLGAENSVAYSNNSIAIPTNFTISVTTEILPVSMTKTSVDCTMYICGDSTECSNLLLQYGSFCTQLNRALTGIAVEQDKNTQEVFAQVKQIYKTPPIKDFGGFNFSQILPDPSKPSKRSFIEDLLFNKVTLADAGFIKQYGDCLGDIAARDLICAQKFNGLTVLPPLLTDEMIAQYCSALLAGTITSGWTFGAGAALQIPFAMQMAYRFNGIGVTQNVLYENQKLIANQFNSAIGKIQDSLSSTASALGKLQDVVNQNAQALNTLVKQLSSNFGAISSVLNDILSRLDKVEAEVQIDRLITGRLQSLQTYVTQQLIRAAEIRASANLAATKMSECVLGQSKRVDFCGKGYHLMSFPQCAPHGVVFLHVTYVPAQEKNFTTAPAICHDGKAHFPREGVFVSNGTHWFVTQRNFYEPQIITTDNTFVSGNCDVVIGIVNNTVYDPLQPELDSFKEELDKYFKNHTSPDVDLGDISGINASVVNIQKEIDRLNEVAKNLNESLIDLQELGKYEQYIKGGSGYIPEAPRDGQAYVRKDGEWVLLSTFL

SEQ ID NO: 6614 - protein, 1241 aa, Artificial Sequence
  SARS-CoV-2/Belgium/ULG-6939/2020__EPI_ISL_417020 spike protein (1-1211)(T874C_S1055C) Foldon construct
MFVFLVLLPLVSSQCVNLTTRTQLPPAYTNSFTRGVYYPDKVFRSSVLHSTQDLFLPFFSNVTWFHAIHVSGTNGTKRFDNPVLPFNDGVYFASTEKSNIIRGWIFGTTLDSKTQSLLIVNNATNVVIKVCEFQFCNDPFLGVYYHKNNKSWMESEFRVYSSANNCTFEYVSQPFLMDLEGKQGNFKNLREFVFKNIDGYFKIYSKHTPINLVRDLPQGFSALEPLVDLPIGINITRFQTLLALHRSYLTPGDSSSGWTAGAAAYYVGYLQPRTFLLKYNENGTITDAVDCALDPLSETKCTLKSFTVEKGIYQTSNFRVQPTESIVRFPNITNLCPFGEVFNATRFASVYAWNRKRISNCVADYSVLYNSASFSTFKCYGVSPTKLNDLCFTNVYADSFVIRGDEVRQIAPGQTGKIADYNYKLPDDFTGCVIAWNSNNLDSKVGGNYNYLYRLFRKSNLKPFERDISTEIYQAGSTPCNGVEGFNCYFPLQSYGFQPTNGVGYQPYRVVVLSFELLHAPATVCGPKKSTNLVKNKCVNFNFNGLTGTGVLTESNKKFLPFQQFGRDIADTTDAVRDPQTLEILDITPCSFGGVSVITPGTNTSNQVAVLYQGVNCTEVPVAIHADQLTPTWRVYSTGSNVFQTRAGCLIGAEHVNNSYECDIPIGAGICASYQTQTNSPRRARSVASQSIIAYTMSLGAENSVVYSNNSIAIPTNFTISVTTEILPVSMTKTSVDCTMYICGDSTECSNLLLQYGSFCTQLNRALTGIAVEQDKNTQEVFAQVKQIYKTPPIKDFGGFNFSQILPDPSKPSKRSFIEDLLFNKVTLADAGFIKQYGDCLGDIAARDLICAQKFNGLTVLPPLLTDEMIAQYCSALLAGTITSGWTFGAGAALQIPFAMQMAYRFNGIGVTQNVLYENQKLIANQFNSAIGKIQDSLSSTASALGKLQDVVNQNAQALNTLVKQLSSNFGAISSVLNDILSRLDKVEAEVQIDRLITGRLQSLQTYVTQQLIRAAEIRASANLAATKMSECVLGQSKRVDFCGKGYHLMSFPQCAPHGVVFLHVTYVPAQEKNFTTAPAICHDGKAHFPREGVFVSNGTHWFVTQRNFYEPQIITTDNTFVSGNCDVVIGIVNNTVYDPLQPELDSFKEELDKYFKNHTSPDVDLGDISGINASVVNIQKEIDRLNEVAKNLNESLIDLQELGKYEQYIKGGSGYIPEAPRDGQAYVRKDGEWVLLSTFL

SEQ ID NO: 6615 - protein, 1241 aa, Artificial Sequence
  SARS-CoV-2/France/HF2496/2020__EPI_ISL_418231 spike protein (1-1211)(T874C_S1055C) Foldon construct
MFVFLVLLPLVSSQCVNLTTRTQLPPAYTNSFTRGVYYPDKVFRSSVLHSTQDLFLPFFSNVTWFHAIHVSGTNGTKRFDNPVLPFNDGVYFASTEKSNIIRGWIFGTTLDSKTQSLLIVNNATNVVIKVCEFQFCNDPFLGVYYHKNNKSWMESEFRVYSSANNCTFEYVSQPFLMDLEGKQGNFKNLREFVFKNIDGYFKIYSKHTPINLVRDLPQGFSALEPLVDLPIGINITRFQTLLALHRSYLTPGDSSSGWTAGAAAYYVGYLQPRTFLLKYNENGTITDAVDCALDPLSETKCTLKSFTVEKGIYQTSNFRVQPTESIVRFPNITNLCPFGEVFNATRFASVYAWNRKRISNCVADYSVLYNSASFSTFKCYGVSPTKLNDLCFTNVYADSFVIRGDEVRQIAPGQTGKIADYNYKLPDDFTGCVIAWNSNNLDSKVGGNYNYLYRLFRKSNLKPFERDISTEIYQAGSTPCNGVEGFNCYFPLQSYGFQPTNGVGYQPYRVVVLSFELLHAPATVCGPKKSTNLVKNKCVNFNFNGLTGTGVLTESNKKFLPFQQFGRDIADTTDAVRDPQTLEILDITPCSFGGVSVITPGTNTSNQVAVLYQGVNCTEVPVAIHADQLTPTWRVYSTGSNVFQTRAGCLIGAEHVNNSYECDIPIGAGICASYQTQTNSPRRARSVASQSIIAYTMSLGAENSVAYSNNSIAIPTNFTISVTTEILPVSMTKTSVDCTMYICGDSTECSNLLLQYGSFCTQLNRALTGIAVEQDKNTQEVFAQVKQIYKTPPIKDFGGFNFSQILPDPSKPSKRSFIEDLLFNKVTLADAGFIKQYGDCLGDIVARDLICAQKFNGLTVLPPLLTDEMIAQYCSALLAGTITSGWTFGAGAALQIPFAMQMAYRFNGIGVTQNVLYENQKLIANQFNSAIGKIQDSLSSTASALGKLQDVVNQNAQALNTLVKQLSSNFGAISSVLNDILSRLDKVEAEVQIDRLITGRLQSLQTYVTQQLIRAAEIRASANLAATKMSECVLGQSKRVDFCGKGYHLMSFPQCAPHGVVFLHVTYVPAQEKNFTTAPAICHDGKAHFPREGVFVSNGTHWFVTQRNFYEPQIITTDNTFVSGNCDVVIGIVNNTVYDPLQPELDSFKEELDKYFKNHTSPDVDLGDISGINASVVNIQKEIDRLNEVAKNLNESLIDLQELGKYEQYIKGGSGYIPEAPRDGQAYVRKDGEWVLLSTFL

SEQ ID NO: 6616 - protein, 1241 aa, Artificial Sequence
  SARS-CoV-2/USA/WA-UW291/2020__EPI_ISL_418076 spike protein (1-1211)(T874C_S1055C) Foldon construct
MFVFLVLLPLVSSQCVNLTTRTQLPPAYTNSFTRGVYYPDKVFRSSVLHSTQDLFLPFFSNVTWFHAIHVSGTNGTKRFDNPVLPFNDGVYFASTEKSNIIRGWIFGTTLDSKTQSLLIVNNATNVVIKVCEFQFCNDPFLGVYYHKNNKSWMESEFRVYSSANNCTFEYVSQPFLMDLEGKQGNFKNLREFVFKNIDGYFKIYSKHTPINLVRDLPQGFSALEPLVDLPIGINITRFQTLLALHRSYLTPGDSSSGWTAGAAAYYVGYLQPRTFLLKYNENGTITDAVDCALDPLSETKCTLKSFTVEKGIYQTSNFRVQPTESIVRFPNITNLCPFGEVFNATRFASVYAWNRKRISNCVADYSVLYNSASFSTFKCYGVSPTKLNDLCFTNVYADSFVIRGDEVRQIAPGQTGKIADYNYKLPDDFTGCVIAWNSNNLDSKVGGNYNYLYRLFRKSNLKPFERDISTEIYQAGSTPCNGVEGFNCYFPLQSYGFQPTNGVGYQPYRVVVLSFELLHAPATVCGPKKSTNLVKNKCVNFNFNGLTGTGVLTESNKKFLPFQQFGRDIADTTDAVRDPQTLEILDITPCSFGGVSVITPGTNTSNQVAVLYQGVNCTEVPVAIHADQLTPTWRVYSTGSNVFQTRAGCLIGAEHVNNSYECDIPIGAGICASYQTQTNSPRRARSVASQSIIAYTMSLGAENSVAYSNNSIAIPTNFTISVTTEILPVSMTKTSVDCTMYICGDSTECSNLLLQYGSFCTQLNRALTGIAVEQDKNTQEVFAQVKQIYKTPPIKDFGGFNFSQILPDPSKPSKRSFIEDLLFNKVTLADAGFIKQYGDCLGDIAARDLICAQKFNGLTVLPPLLTDEMIAQYCSALLAGTITSGWTFGAGAALQIPFAMQMAYRFNGIGVTQNVLYENQKLIANQFNSAIGKIQYSLSSTASALGKLQDVVNQNAQALNTLVKQLSSNFGAISSVLNDILSRLDKVEAEVQIDRLITGRLQSLQTYVTQQLIRAAEIRASANLAATKMSECVLGQSKRVDFCGKGYHLMSFPQCAPHGVVFLHVTYVPAQEKNFTTAPAICHDGKAHFPREGVFVSNGTHWFVTQRNFYEPQIITTDNTFVSGNCDVVIGIVNNTVYDPLQPELDSFKEELDKYFKNHTSPDVDLGDISGINASVVNIQKEIDRLNEVAKNLNESLIDLQELGKYEQYIKGGSGYIPEAPRDGQAYVRKDGEWVLLSTFL

SEQ ID NO: 6617 - protein, 1241 aa, Artificial Sequence; identical to SEQ ID NO: 6580
  SARS-CoV-2/Portugal/PT0034/2020__EPI_ISL_418019 spike protein (1-1211)(T874C_S1055C) Foldon construct

SEQ ID NO: 6618 - protein, 1241 aa, Artificial Sequence
  SARS-CoV-2/Iceland/202/2020__EPI_ISL_417750 spike protein (1-1211)(T874C_S1055C) Foldon construct
MFVFLVLLPLVSSQCVNLTTRTQLPPAYTNSFTRGVYYPDKVFRSSVLHSTQDLFLPFFSNVTWFHAIHVSGTNGTKRFDNPVLPFNDGVYFASTEKSNIIRGWIFGTTLDSKTQSLLIVNNATNVVIKVCEFQFCNDPFLGVYYHKNNKSWMESEFRVYSSANNCTFEYVSQPFLMDLEGKQGNFKNLREFVFKNIDGYFKIYSKHTPINLVRDLPQGFSALEPLVDLPIGINITRFQTLLALHRSYLTPGDSSSGWTAGAAAYYVGYLQPRTFLLKYNENGTITDAVDCALDPLSETKCTLKSFTVEKGIYQTSNFRVQPTESIVRFPNITNLCPFGEVFNATRFASVYAWNRKRISNCVADYSVLYNSASFSTFKCYGVSPTKLNDLCFTNVYADSFVIRGDEVRQIAPGQTGKIADYNYKLPDDFTGCVIAWNSNNLDSKVGGNYNYLYRLFRKSNLKPFERDISTEIYQAGSTPCNGVEGFNCYFPLQSYGFQPTNGVGYQPYRVVVLSFELLHAPATVCGPKKSTNLVKNKCVNFNFNGLTGTGVLTESNKKFLPFQQFGRDIADTTDAVRDPQTLEILDITPCSFGGVSVITPGTNTSNQVAVLYQDVNCTEVPVAIHADQLTPTWRVYSTGSNVFQTRAGCLIGAEHVNNSYECDIPIGAGICASYQTQTNSPRRARSVASQSIIAYTMSLGAENSVAYSNNSIAIPTNFTISVTTEILPVSMTKTSVDCTMYICGDSTECSNLLLQYGSFCTQLNRALTGIAVEQDKNTQEVFAQVKQIYKTPPIKDFGGFNFSQILPDPSKPSKRSFIEDLLFNKVTLADAGFIKQYGDCLGDIAARDLICAQKFNGLTVLPPLLTDEMIAQYCSALLAGTITSGWTFGAGAALQIPFAMQMAYRFNGIGVTQNVLYENQKLIANQFNSAIGKIQDSLSSTASALGKLQDVVNQNAQALNTLVKQLSSNFGAISSVLNDILSRLDKVEAEVQIDRLITGRLQSLQTYVTQQLIRAAEIRASANLAATKMSECVLGQSKRVDFCGKGYHLMSFPQCAPHGVVFLHVTYVPAQEKNFTTAPAICHDGKAHFPREGVFVSNGTHWFVTQRNFYEPQIITTDNTFVSGNCDVVIGIVNNTVYDPLQPELDSFKEELDKYFKNHTSPDVDLGDIPGINASVVNIQKEIDRLNEVAKNLNESLIDLQELGKYEQYIKGGSGYIPEAPRDGQAYVRKDGEWVLLSTFL

SEQ ID NO: 6619 - protein, 1241 aa, Artificial Sequence
  SARS-CoV-2/USA/WA-UW261/2020__EPI_ISL_418046 spike protein (1-1211)(T874C_S1055C) Foldon construct
MFVFLVLLPLVSSQCVNLTTRTQLPPAYTNSFTRGVYYPDKVFRSSVLHSTQDLFLPFFSNVTWFHAIHVSGTNGTKRFDNPVLPFNDGVYFASTEKSNIIRGWIFGTTLDSKTQSLLIVNNATNVVIKVCEFQFCNDPFLGVYYHKNNKSWMESEFRVYSSANNCTFEYVSQPFLMDLEGKQGNFKNLREFVFKNIDGYFKIYSKHTPINLVRDLPQGFSALEPLVDLPIGINITRFQTLLALHRSYLTPGDSSSGWTAGAAAYYVGYLQPRTFLLKYNENGTITDAVDCALDPLSETKCTLKSFTVEKGIYQTSNFRVQPTESIVRFPNITNLCPFGEVFNATRFTSVYAWNRKRISNCVADYSVLYNSASFSTFKCYGVSPTKLNDLCFTNVYADSFVIRGDEVRQIAPGQTGKIADYNYKLPDDFTGCVIAWNSNNLDSKVGGNYNYLYRLFRKSNLKPFERDISTEIYQAGSTPCNGVEGFNCYFPLQSYGFQPTNGVGYQPYRVVVLSFELLHAPATVCGPKKSTNLVKNKCVNFNFNGLTGTGVLTESNKKFLPFQQFGRDIADTTDAVRDPQTLEILDITPCSFGGVSVITPGTNTSNQVAVLYQDVNCTEVPVAIHADQLTPTWRVYSTGSNVFQTRAGCLIGAEHVNNSYECDIPIGAGICASYQTQTNSPRRARSVASQSIIAYTMSLGAENSVAYSNNSIAIPTNFTISVTTEILPVSMTKTSVDCTMYICGDSTECSNLLLQYGSFCTQLNRALTGIAVEQDKNTQEVFAQVKQIYKTPPIKDFGGFNFSQILPDPSKPSKRSFIEDLLFNKVTLADAGFIKQYGDCLGDIAARDLICAQKFNGLTVLPPLLTDEMIAQYCSALLAGTITSGWTFGAGAALQIPFAMQMAYRFNGIGVTQNVLYENQKLIANQFNSAIGKIQDSLSSTASALGKLQDVVNQNAQALNTLVKQLSSNFGAISSVLNDILSRLDKVEAEVQIDRLITGRLQSLQTYVTQQLIRAAEIRASANLAATKMSECVLGQSKRVDFCGKGYHLMSFPQCAPHGVVFLHVTYVPAQEKNFTTAPAICHDGKAHFPREGVFVSNGTHWFVTQRNFYEPQIITTDNTFVSGNCDVVIGIVNNTVYDPLQPELDSFKEELDKYFKNHTSPDVDLGDISGINASVVNIQKEIDRLNEVAKNLNESLIDLQELGKYEQYIKGGSGYIPEAPRDGQAYVRKDGEWVLLSTFL

SEQ ID NO: 6620 - protein, 1241 aa, Artificial Sequence
  SARS-CoV-2/Portugal/PT0035/2020__EPI_ISL_418020 spike protein (1-1211)(T874C_S1055C) Foldon construct
MFVFLVLLPLVSSQCVNLTTRTQLPPAYTNSFTRGVYYPDKVFRSSVLHSTQDLFLPFFSNVTWFHAIHVSGTNGTKRFDNPVLPFNDGVYFASTEKSNIIRGWIFGTTLDSKTQSLLIVNNATNVVIKVCEFQFCNDPFLGVYYHKNNKSWMESEFRVYSSANNCTFEYVSQPFLMDLEGKQGNFKNLREFVFKNIDGYFKIYSKHTPINLVRDLPQGFSALEPLVDLPIGINITRFQTLLALHRSYLTPGDSSSGWTAGAAAYYVGYLQPRTFLLKYNENGTITDAVDCALDPLSETKCTLKSFTVEKGIYQTSNFRVQPTESIVRFPNITNLCPFGEVFNATRFASVYAWNRKRISNCVADYSVLYNSASFSTFKCYGVSPTKLNDLCFTNVYADSFVIRGDEVRQIAPGQTGKIADYNYKLPDDFTGCVIAWNSNNLDSKVGGNYNYLYRLFRKSNLKPFERDISTEIYQAGSTPCNGVEGFNCYFPLQSYGFQPTNGVGYQPYRVVVLSFELLHAPATVCGPKKSTNLVKNKCVNFNFNGLTGTGVLTESNKKFLPFQQFGRDIADTTDAVRDPQTLEILDITPCSFGGVSVITPGTNTSNQVAVLYQDVNCTEVPVAIHADQLTPTWRVYSTGSNVFQTRAGCLIGAEHVNNSYECDIPIGAGICASYQTQTNSPRRARSVASQSIIAYTMSLGAENSVAYSNNSIAIPTNFTISVTTEILPVSMTKTSVDCTMYICGDSTECSNLLLQYGSFCTQLNRALTGIAVEQDKNTQEVFAQVKQIYKTPPIKDFGGFNFSQILPDPSKPSKRSFIEDLLFNKVTLADAGFIKQYGDCLGDISARDLICAQKFNGLTVLPPLLTDEMIAQYCSALLAGTITSGWTFGAGAALQIPFAMQMAYRFNGIGVTQNVLYENQKLIANQFNSAIGKIQDSLSSTASALGKLQDVVNQNAQALNTLVKQLSSNFGAISSVLNDILSRLDKVEAEVQIDRLITGRLQSLQTYVTQQLIRAAEIRASANLAATKMSECVLGQSKRVDFCGKGYHLMSFPQCAPHGVVFLHVTYVPAQEKNFTTAPAICHDGKAHFPREGVFVSNGTHWFVTQRNFYEPQIITTDNTFVSGNCDVVIGIVNNTVYDPLQPELDSFKEELDKYFKNHTSPDVDLGDISGINASVVNIQKEIDRLNEVAKNLNESLIDLQELGKYEQYIKGGSGYIPEAPRDGQAYVRKDGEWVLLSTFL

SEQ ID NO: 6621 - protein, 1241 aa, Artificial Sequence
  SARS-CoV-2/USA/NY-NYUMC7/2020__EPI_ISL_418192 spike protein (1-1211)(T874C_S1055C) Foldon construct
MFVFLVLLPLVSSQCVNLTTRTQLPPAYTNSFTRGVYYPDKVFRSSVLHSTQDLFLPFFSNVTWFHAIHVSGTNGTKRFDNPVLPFNDGVYFASTEKSNIIRGWIFGTTLDSKTQSLLIVNNATNVVIKVCEFQFCNDPFLGVYHHKNNKSWMESEFRVYSSANNCTFEYVSQPFLMDLEGKQGNFKNLREFVFKNIDGYFKIYSKHTPINLVRDLPQGFSALEPLVDLPIGINITRFQTLLALHRSYLTPGDSSSGWTAGAAAYYVGYLQPRTFLLKYNENGTITDAVDCALDPLSETKCTLKSFTVEKGIYQTSNFRVQPTESIVRFPNITNLCPFGEVFNATRFASVYAWNRKRISNCVADYSVLYNSASFSTFKCYGVSPTKLNDLCFTNVYADSFVIRGDEVRQIAPGQTGKIADYNYKLPDDFTGCVIAWNSNNLDSKVGGNYNYLYRLFRKSNLKPFERDISTEIYQAGSTPCNGVEGFNCYFPLQSYGFQPTNGVGYQPYRVVVLSFELLHAPATVCGPKKSTNLVKNKCVNFNFNGLTGTGVLTESNKKFLPFQQFGRDIADTTDAVRDPQTLEILDITPCSFGGVSVITPGTNTSNQVAVLYQGVNCTEVPVAIHADQLTPTWRVYSTGSNVFQTRAGCLIGAEHVNNSYECDIPIGAGICASYQTQTNSPRRARSVASQSIIAYTMSLGAENSVAYSNNSIAIPTNFTISVTTEILPVSMTKTSVDCTMYICGDSTECSNLLLQYGSFCTQLNRALTGIAVEQDKNTQEVFAQVKQIYKTPPIKDFGGFNFSQILPDPSKPSKRSFIEDLLFNKVTLADAGFIKQYGDCLGDIAARDLICAQKFNGLTVLPPLLTDEMIAQYCSALLAGTITSGWTFGAGAALQIPFAMQMAYRFNGIGVTQNVLYENQKLIANQFNSAIGKIQDSLSSTASALGKLQDVVNQNAQALNTLVKQLSSNFGAISSVLNDILSRLDKVEAEVQIDRLITGRLQSLQTYVTQQLIRAAEIRASANLAATKMSECVLGQSKRVDFCGKGYHLMSFPQCAPHGVVFLHVTYVPAQEKNFTTAPAICHDGKAHFPREGVFVSNGTHWFVTQRNFYEPQIITTDNTFVSGNCDVVIGIVNNTVYDPLQPELDSFKEELDKYFKNHTSPDVDLGDISGINASVVNIQKEIDRLNEVAKNLNESLIDLQELGKYEQYIKGGSGYIPEAPRDGQAYVRKDGEWVLLSTFL

SEQ ID NO: 6622 - protein, 1241 aa, Artificial Sequence
  SARS-CoV-2/Iceland/189/2020__EPI_ISL_417709 spike protein (1-1211)(T874C_S1055C) Foldon construct
MFVFLVLLPLVSSQCVNLTTRTQLPPAYTNSFTRGVYYPDKVFRSSVLHSTQDLFLPFFSNVTWFHAIHVSGTNGTKRFDNPVLPFNDGVYFASTEKSNIIRGWIFGTTLDSKTQSLLIVNNATNVVIKVCEFQFCNDPFLGVYYHKNNKSWMESEFRVYSSANNCTFEYVSQPFLMDLEGKQGNFKNLREFVFKNIDGYFKIYSKHTPINLVRDLPQGFSALEPLVDLPIGINITRFQTLLALHRSYLTPGDSSSGWTAGAAAYYVGYLQPRTFLLKYNENGTITDAVDCALDPLSETKCTLKSFTVEKGIYQTSNFRVQPTESIVRFPNITNLCPFGEVFNATRFASVYAWNRKRISNCVADYSVLYNSASFSTFKCYGVSPTKLNDLCFTNVYADSFVIRGDEVRQIAPGQTGKIADYNYKLPDDFTGCVIAWNSNNLDSKVGGNYNYLYRLFRKSNLKPFERDISTEIYQAGSTPCNGVEGFNCYFPLQSYGFQPTNGVGYQPYRVVVLSFELLHAPATVCGPKKSTNLVKNKCVNFNFNGLTGTGVLTESNKKFLPFQQFGRDIADTTDAVRDPQTLEILDITPCSFGGVSVITPGTNTSNQVAVLYQGVNCTEVPVAIHADQLTPTWRVYSTGSNVFQTRAGCLIGAEHVNNSYECDIPIGAGICASYQTQTNSPRRARSVASQSIIAYTMSLGAENSVAYSNNSIAIPTNFTISVTTEILPVSMTKTSVDCTMYICGDSTECSNLLLQYGSFCTQLNRALTGIAVEQDKNTQEVFAQVKQIYKTPPIKDFGGFNFSQILPDPSKPSKRSFIEDLLFNKVTLADAGFTKQYGDCLGDIAARDLICAQKFNGLTVLPPLLTDEMIAQYCSALLAGTITSGWTFGAGAALQIPFAMQMAYRFNGIGVTQNVLYENQKLIANQFNSAIGKIQDSLSSTASALGKLQDVVNQNAQALNTLVKQLSSNFGAISSVLNDILSRLDKVEAEVQIDRLITGRLQSLQTYVTQQLIRAAEIRASANLAATKMSECVLGQSKRVDFCGKGYHLMSFPQCAPHGVVFLHVTYVPAQEKNFTTAPAICHDGKAHFPREGVFVSNGTHWFVTQRNFYEPQIITTDNTFVSGNCDVVIGIVNNTVYDPLQPELDSFKEELDKYFKNHTSPDVDLGDISGINASVVNIQKEIDRLNEVAKNLNESLIDLQELGKYEQYIKGGSGYIPEAPRDGQAYVRKDGEWVLLSTFL

SEQ ID NO: 6623 - protein, 1241 aa, Artificial Sequence
  SARS-CoV-2/Australia/NSW56/2020__EPI_ISL_417408 spike protein (1-1211)(T874C_S1055C) Foldon construct
MFVFLVLLPLVSSQCVNLTTRTQLPPAYTNSFTRGVYYPDKVFRSSVLHSTQDLFLPFFSNVTWFHAIHVSGTNGTKRFDNPVLPFNDGVYFASTEKSNIIRGWIFGTTLDSKTQSLLIVNNATNVVIKVCEFQFCNDPFLGVYYHKNNKSWMESEFRVYSSANNCTFEYVSQPFLMDLEGKQGNFKNLREFVFKNIDGYFKIYSKHTPINLVRDLPQGFSALEPLVDLPIGINITRFQTLLALHRSYLTPGDSSSGWTAGAAAYYVGYLQPRTFLLKYNENGTITDAVDCALDPLSETKCTLKSFTVEKGIYQTSNFRVQPTESIVRFPNITNLCPFGEVFNATRFASVYAWNRKRISNCVADYSVLYNSASFSTFKCYGVSPTKLNDLCFTNVYADSFVIRGDEVRQIAPGQTGKIADYNYKLPDDFTGCVIAWNSNNLDSKVGGNYNYLYRLFRKSNLKPFERDISTEIYQAGSTPCNGVEGFNCYFPLQSYGFQPTNGVGYQPYRVVVLSFELLHAPATVCGPKKSTNLVKNKCVNFNFNGLTGTGVLTESNKKFLPFQQFGRDIADTTDAVRDPQTLEILDITPCSFGGVSVITPGTNTSNQVAVLYQDVNCTEVPVAIHADQLTPTWRVYSTGSNVFQTRAGCLIGAEHVNNSYECDIPIGAGICASYQTQTNSPRRARSVASQSIIAYTMSLGAENSVAYSNNSIAIPTNFTISVTTEILPVSMTKTSVDCTMYICGDSTECSNLLLQYGSFCTQLNRALTGIAVEQDKNTQEVFAQVKQIYKTPPIKDFGGFNFSQILPDSSKPSKRSFIEDLLFNKVTLADAGFIKQYGDCLGDIAARDLICAQKFNGLTVLPPLLTDEMIAQYCSALLAGTITSGWTFGAGAALQIPFAMQMAYRFNGIGVTQNVLYENQKLIANQFNSAIGKIQDSLSSTASALGKLQDVVNQNAQALNTLVKQLSSNFGAISSVLNDILSRLDKVEAEVQIDRLITGRLQSLQTYVTQQLIRAAEIRASANLAATKMSECVLGQSKRVDFCGKGYHLMSFPQCAPHGVVFLHVTYVPAQEKNFTTAPAICHDGKAHFPREGVFVSNGTHWFVTQRNFYEPQIITTDNTFVSGNCDVVIGIVNNTVYDPLQPELDSFKEELDKYFKNHTSPDVDLGDISGINASVVNIQKEIDRLNEVAKNLNESLIDLQELGKYEQYIKGGSGYIPEAPRDGQAYVRKDGEWVLLSTFL

SEQ ID NO: 6624 - protein, 1241 aa, Artificial Sequence
  SARS-CoV-2/Iceland/280/2020__EPI_ISL_417608 spike protein (1-1211)(T874C_S1055C) Foldon construct
MFVFLVLLPLVSSQCVNLTTRTQLPPAYTNSFTRGVYYPDKVFRSSVLHSTQDLFLPFFSNVTWFHAIHVSGTNGTKRFDNPVLPFNDGVYFASTEKSNIIRGWIFGTTLDSKTQSLLIVNNATNVVIKVCEFQFCNDPFLGVYYHKNNKSWMESEFRVYSSANNCTFEYVSQPFLMDLEGKQGNFKNLREFVFKNIDGYFKIYSKHTPINLVRDLPQGFSALEPLVDLPIGINITRFQTLLALHRSYLTPGDSSSGWTAGAAAYYVGYLQPRTFLLKYNENGTITDAVDCALDPLSETKCTLKSFTVEKGIYQTSNFRVQPTESIVRFPNITNLCPFGEVFNATRFASVYAWNRKRISNCVADYSVLYNSASFSTFKCYGVSPTKLNDLCFTNVYADSFVIRGDEVRQIAPGQTGKIADYNYKLPDDFTGCVIAWNSNNLDSKVGGNYNYLYRLFRKSNLKPFERDISTEIYQAGSTPCNGVEGFNCYFPLQSYGFQPTNGVGYQPYRVVVLSFELLHAPATVCGPKKSTNLVKNKCVNFNFNGLTGTGVLTESNKKFLPFQQFGRDIADTTDAVRDPQTLEILDITPCSFGGVSVITPGTNTSNQVAVLYQGVNCTEVPVAIHADQLTPTWRVYSTGSNVFQTRAGCLIGAEHVNNSYECDIPIGAGICASYHTQTNSPRRARSVASQSIIAYTMSLGAENSVAYSNNSIAIPTNFTISVTTEILPVSMTKTSVDCTMYICGDSTECSNLLLQYGSFCTQLNRALTGIAVEQDKNTQEVFAQVKQIYKTPPIKDFGGFNFSQILPDPSKPSKRSFIEDLLFNKVTLADAGFIKQYGDCLGDIAARDLICAQKFNGLTVLPPLLTDEMIAQYCSALLAGTITSGWTFGAGAALQIPFAMQMAYRFNGIGVTQNVLYENQKLIANQFNSAIGKIQDSLSSTASALGKLQDVVNQNAQALNTLVKQLSSNFGAISSVLNDILSRLDKVEAEVQIDRLITGRLQSLQTYVTQQLIRAAEIRASANLAATKMSECVLGQSKRVDFCGKGYHLMSFPQCAPHGVVFLHVTYVPAQEKNFTTAPAICHDGKAHFPREGVFVSNGTHWFVTQRNFYEPQIITTDNTFVSGNCDVVIGIVNNTVYDPLQPELDSFKEELDKYFKNHTSPDVDLGDISGINASVVNIQKEIDRLNEVAKNLNESLIDLQELGKYEQYIKGGSGYIPEAPRDGQAYVRKDGEWVLLSTFL

SEQ ID NO: 6625 - protein, 1241 aa, Artificial Sequence; identical to SEQ ID NO: 6580
  SARS-CoV-2/Iceland/247/2020__EPI_ISL_417575 spike protein (1-1211)(T874C_S1055C) Foldon construct

SEQ ID NO: 6626 - protein, 1241 aa, Artificial Sequence
  SARS-CoV-2/Iceland/238/2020__EPI_ISL_417566 spike protein (1-1211)(T874C_S1055C) Foldon construct
MFVFLVLLPLVSSQCVNLTTRTQLPPAYTNSFTRGVYYPDKVFRSSVLHSTQDLFLPFFSNVTWFHAIHVSGTNGTKRFDNPVLPFNDGVYFASTEKSNIIRGWIFGTTLDSKTQSLLIVNNATNVVIKVCEFQFCNDPFLGVYYHKNNKSWMESEFRVYSSANNCTFEYVSQPFLMDLEGKQGNFKNLREFVFKNIDGYFKIYSKHTPINLVRDLPQGFSALEPLVDLPIGINITRFQTLLALHRSYLTPGDSSSGWTAGAAAYYVGYLQPRTFLLKYNENGTITDAVDCALDPLSETKCTLKSFTVEKGIYQTSNFRVQPTESIVRFPNITNLCPFGEVFNATRFASVYAWNRKRISNCVADYSVLYNSASFSTFKCYGVSPTKLNDLCFTNVYADSFVIRGDEVRQIAPGQTGKIADYNYKLPDDFTGCVIAWNSNNLDSKVGGNYNYLYRLFRKSNLKPFERDISTEIYQAGSTPCNGVEGFNCYFPLQSYGFQPTNGVGYQPYRVVVLSFELLHAPATVCGPKKSTNLVKNKCVNFNFNGLTGTGVLTESNKKFLPFQQFGRDIADTTDAVRDPQTLEILDITPCSFGGVSVITPGTNTSNQVAVLYQGVNCTEVPVAIHADQLTPTWRVYSTGSNVFQTRAGCLIGAEHVNNSYECDIPIGAGICASYQTQTNSPRRARSVASQSIIAYTMSLGAENSVAYSNNSIAIPTNFTISVTTEILPVSMTKTSVDCTMYICGDSTECSNLLLQYGSFCTQLNRALTGIAVEQDKNTQEVFAQVKQIYKTPPIKDFGGFNFSQILPDPSKPSKRSFIEDLLFNKVTLADVGFIKQYGDCLGDIAARDLICAQKFNGLTVLPPLLTDEMIAQYCSALLAGTITSGWTFGAGAALQIPFAMQMAYRFNGIGVTQNVLYENQKLIANQFNSAIGKIQDSLSSTASALGKLQDVVNQNAQALNTLVKQLSSNFGAISSVLNDILSRLDKVEAEVQIDRLITGRLQSLQTYVTQQLIRAAEIRASANLAATKMSECVLGQSKRVDFCGKGYHLMSFPQCAPHGVVFLHVTYVPAQEKNFTTAPAICHDGKAHFPREGVFVSNGTHWFVTQRNFYEPQIITTDNTFVSGNCDVVIGIVNNTVYDPLQPELDSFKEELDKYFKNHTSPDVDLGDISGINASVVNIQKEIDRLNEVAKNLNESLIDLQELGKYEQYIKGGSGYIPEAPRDGQAYVRKDGEWVLLSTFL

SEQ ID NO: 6627 - protein, 1241 aa, Artificial Sequence
  SARS-CoV-2/Greece/16/2020__EPI_ISL_418265 spike protein (1-1211)(T874C_S1055C) Foldon construct
MFVFLVLLPLVSSQCVNLTTRTQLPPAYTNSFTRGVYYPDKVFRSSVLHSTQDLFLPFFSNVTWFHAIHVSGTNGTKRFDNPVLPFNDGVYFASTEKSNIIRGWIFGTTLDSKTQSLLIVNNATNVVIKVCEFQFCNDPFLGVYYHKNNKSWMESEFRVYSSANNCTFEYVSQPFLMDLEGKQGNFKNLREFVFKNVDGYFKIYSKHTPINLVRDLPQGFSALEPLVDLPIGINITRFQTLLALHRSYLTPGDSSSGWTAGAAAYYVGYLQPRTFLLKYNENGTITDAVDCALDPLSETKCTLKSFTVEKGIYQTSNFRVQPTESIVRFPNITNLCPFGEVFNATRFASVYAWNRKRISNCVADYSVLYNSASFSTFKCYGVSPTKLNDLCFTNVYADSFVIRGDEVRQIAPGQTGKIADYNYKLPDDFTGCVIAWNSNNLDSKVGGNYNYLYRLFRKSNLKPFERDISTEIYQAGSTPCNGVEGFNCYFPLQSYGFQPTNGVGYQPYRVVVLSFELLHAPATVCGPKKSTNLVKNKCVNFNFNGLTGTGVLTESNKKFLPFQQFGRDIADTTDAVRDPQTLEILDITPCSFGGVSVITPGTNTSNQVAVLYQDVNCTEVPVAIHADQLTPTWRVYSTGSNVFQTRAGCLIGAEHVNNSYECDIPIGAGICASYQTQTNSPRRARSVASQSIIAYTMSLGAENSVAYSNNSIAIPTNFTISVTTEILPVSMTKTSVDCTMYICGDSTECSNLLLQYGSFCTQLNRALTGIAVEQDKNTQEVFAQVKQIYKTPPIKDFGGFNFSQILPDPSKPSKRSFIEDLLFNKVTLADAGFIKQYGDCLGDIAARDLICAQKFNGLTVLPPLLTDEMIAQYCSALLAGTITSGWTFGAGAALQIPFAMQMAYRFNGIGVTQNVLYENQKLIANQFNSAIGKIQDSLSSTASALGKLQDVVNQNAQALNTLVKQLSSNFGAISSVLNDILSRLDKVEAEVQIDRLITGRLQSLQTYVTQQLIRAAEIRASANLAATKMSECVLGQSKRVDFCGKGYHLMSFPQCAPHGVVFLHVTYVPAQEKNFTTAPAICHDGKAHFPREGVFVSNGTHWFVTQRNFYEPQIITTDNTFVSGNCDVVIGIVNNTVYDPLQPELDSFKEELDKYFKNHTSPDVDLGDISGINASVVNIQKEIDRLNEVAKNLNESLIDLQELGKYEQYIKGGSGYIPEAPRDGQAYVRKDGEWVLLSTFL

SEQ ID NO: 6628 - protein, 1241 aa, Artificial Sequence
  SARS-CoV-2/Iceland/319/2020__EPI_ISL_417648 spike protein (1-1211)(T874C_S1055C) Foldon construct
MFVFLVLLPLVSSQCVNLTTRTQLPPAYTNSFTRGVYYPDKVFRSSVLHSTQDLFLPFFSNVTWFHAIHVSGTNGTKRFDNPVLPFNDGVYFASTEKSNIIRGWIFGTTLDSKTQSLLIVNNATNVVIKVCEFQFCNDPFLGVYYHKNNKSWMESEFRVYSSANNCTFEYVSQPFLIDLEGKQGNFKNLREFVFKNIDGYFKIYSKHTPINLVRDLPQGFSALEPLVDLPIGINITRFQTLLALHRSYLTPGDSSSGWTAGAAAYYVGYLQPRTFLLKYNENGTITDAVDCALDPLSETKCTLKSFTVEKGIYQTSNFRVQPTESIVRFPNITNLCPFGEVFNATRFASVYAWNRKRISNCVADYSVLYNSASFSTFKCYGVSPTKLNDLCFTNVYADSFVIRGDEVRQIAPGQTGKIADYNYKLPDDFTGCVIAWNSNNLDSKVGGNYNYLYRLFRKSNLKPFERDISTEIYQAGSTPCNGVEGFNCYFPLQSYGFQPTNGVGYQPYRVVVLSFELLHAPATVCGPKKSTNLVKNKCVNFNFNGLTGTGVLTESNKKFLPFQQFGRDIADTTDAVRDPQTLEILDITPCSFGGVSVITPGTNTSNQVAVLYQGVNCTEVPVAIHADQLTPTWRVYSTGSNVFQTRAGCLIGAEHVNNSYECDIPIGAGICASYQTQTNSPRRARSVASQSIIAYTMSLGAENSVAYSNNSIAIPTNFTISVTTEILPVSMTKTSVDCTMYICGDSTECSNLLLQYGSFCTQLNRALTGIAVEQDKNTQEVFAQVKQIYKTPPIKDFGGFNFSQILPDPSKPSKRSFIEDLLFNKVTLADAGFIKQYGDCLGDIAARDLICAQKFNGLTVLPPLLTDEMIAQYCSALLAGTITSGWTFGAGAALQIPFAMQMAYRFNGIGVTQNVLYENQKLIANQFNSAIGKIQDSLSSTASALGKLQDVVNQNAQALNTLVKQLSSNFGAISSVLNDILSRLDKVEAEVQIDRLITGRLQSLQTYVTQQLIRAAEIRASANLAATKMSECVLGQSKRVDFCGKGYHLMSFPQCAPHGVVFLHVTYVPAQEKNFTTAPAICHDGKAHFPREGVFVSNGTHWFVTQRNFYEPQIITTDNTFVSGNCDVVIGIVNNTVYDPLQPELDSFKEELDKYFKNHTSPDVDLGDISGINASVVNIQKEIDRLNEVAKNLNESLIDLQELGKYEQYIKGGSGYIPEAPRDGQAYVRKDGEWVLLSTFL

SEQ ID NO: 6629 - protein, 1241 aa, Artificial Sequence
  SARS-CoV-2/Congo/94/2020__EPI_ISL_417947 spike protein (1-1211)(T874C_S1055C) Foldon construct
MFVFLVLLPLVSSQCVNLTTRTQLPPAYTNSFTRGVYYPDKVFRSSVLHSTQDLFLPFFSNVTWFHAIHVSGTNGTKRFDNPVLPFNDGVYFASTEKSNIIRGWIFGTTLDSKTQSLLIVNNATNVVIKVCEFQFCNDPFLGVYYHKNNKSWMESEFRVYSSANNCTFEYVSQPFLMDLEGKQGNFKNLREFVFKNIDGYFKIYSKHTPINLVRDLPQGFSALEPLVDLPIGINITRFQTLLALHRSYLTPGDSSSGWTAGAAAYYVGYLQPRTFLLKYNENGTITDAVDCALDPLSETKCTLKSFTVEKGIYQTSNFRVQPTESIVRFPNITNLCPFGEVFNATRFASVYAWNRKRISNCVADYSVLYNSASFSTFKCYGVSPTKLNDLCFTNVYADSFVIRGDEVRQIAPGQTGKIADYNYKLPDDFTGCVIAWNSNNLDSKVGGNYNYLYRLFRKSNLKPFERDISTEIYQAGSTPCNGVEGFNCYFPLQSYGFQPTNGVGYQPYRVVVLSFELLHAPATVCGPKKSTNLVKNKCVNFNFNGLTGTGVLTESNKKFLPFQQFGRDIADTTDAVRDPQTLEILDITPCSFGGVSVITPGTNTSNQVAVLYQGVNCTEVPVAIHADQLTPTWRVYSTGSNVFQTRAGCLIGAEHVNNSYECDIPIGAGICASYQTQTNSPRRARSVASQSIIAYTMSLGAENSVAYSNNSIAIPTNFTISVTTEILPVSMTKTSVDCTMYICGDSTECSNLLLQYGSFCTQLNRALTGIAVEQDKNTQEVFAQVKQIYKTPPIKDFGGFNFSQILPDPSKPSKRSFIEDILFNKVTLADAGFIKQYGDCLGDIAARDLICAQKFNGLTVLPPLLTDEMIAQYCSALLAGTITSGWTFGAGAALQIPFAMQMAYRFNGIGVTQNVLYENQKLIANQFNSAIGKIQDSLSSTASALGKLQDVVNQNAQALNTLVKQLSSNFGAISSVLNDILSRLDKVEAEVQIDRLITGRLQSLQTYVTQQLIRAAEIRASANLAATKMSECVLGQSKRVDFCGKGYHLMSFPQCAPHGVVFLHVTYVPAQEKNFTTAPAICHDGKAHFPREGVFVSNGTHWFVTQRNFYEPQIITTDNTFVSGNCDVVIGIVNNTVYDPLQPELDSFKEELDKYFKNHTSPDVDLGDISGINASVVNIQKEIDRLNEVAKNLNESLIDLQELGKYEQYIKGGSGYIPEAPRDGQAYVRKDGEWVLLSTFL

SEQ ID NO: 6630 - protein, 1241 aa, Artificial Sequence
  SARS-CoV-2/Congo/158/2020__EPI_ISL_417950 spike protein (1-1211)(T874C_S1055C) Foldon construct
MFVFLVLLPLVSSQCVNLTTRTQLPPAYTNSFTRGVYYPDKVFRSSVLHSTQDLFLPFFSNVTWFHAIHVSGTNGTKRFDNPVLPFNDGVYFASTEKSNIIRGWIFGTTLDSKTQSLLIVNNATNVVIKVCEFQFCNDPFLGVYYHKNNKSWMESEFRVYSSANNCTFEYVSQPFLMDLEGKQGNFKNLREFVFKNIDGYFKIYSKHTPINLVRDLPQGFSALEPLVDLPIGINITRFQTLLALHRSYLTPGDSSSGWTAGAAAYYVGYLQPRTFLLKYNENGTITDAVDCALDPLSETKCTLKSFTVEKGIYQTSNFRVQPTESIVRFPNITNLCPFGEVFNATRFASVYAWNRKRISNCVADYSVLYNSASFSTFKCYGVSPTKLNDLCFTNVYADSFVIRGDEVRQIAPGQTGKIADYNYKLPDDFTGCVIAWNSNNLDSKVGGNYNYLYRLFRKSNLKPFERDISTEIYQAGSTPCNGVEGFNCYFPLQSYGFQPTNGVGYQPYRVVVLSFELLHAPATVCGPKKSTNLVKNKCVNFNFNGLTGTGVLTESNKKFLPFQQFGRDIADTTDAVRDPQTLEILDITPCSFGGVSVITPGTNTSNQVAVLYQDVNCTEVPVAIHADQLTPTWRVYSTGSNVFQTRAGCLIGAEHVNNSYECDIPIGAGICASYQTQTNSPRRARSVASQSIIAYTMSLGAENSVAYSNNSIAIPTNFTISVTTEILPVSMTKTSVDCTMYICGDSTECSNLLLQYGSFCTQLNRALTGIAVEQDKNTQEVFAQVKQIYKTPPIKDFGGFNFSQILPDPSKPSKRSFIEDLLFNKVTLADAGFIKQYGDCLGDIAARDLICAQKFNGLTVLPPLLTDEMIAQYCSALLAGTITSGWTFGAGAALQIPFAMQMAYRFNGIGVTQNVLYENQKLIANQFNSAIGKIQDSLSSTASALGKLQDVVNQNAQALNTLVKQLSSNFGAISSVLNDILSRLDKVEAEVQIDRLITGRLQSLQTYVTQQLIRAAEIRASANLAATKMSECVLGQSKRVDFCGKGYHLMSFPQCAPHGVVFLHVTYVPAQEKNFTTAPAICHDGKAHFPREGVFVSNGTHWFVTQRNFYEPQIITTDNTFLSGNCDVVIGIVNNTVYDPLQPELDSFKEELDKYFKNHTSPDVDLGDISGINASVVNIQKEIDRLNEVAKNLNESLIDLQELGKYEQYIKGGSGYIPEAPRDGQAYVRKDGEWVLLSTFL

SEQ ID NO: 6631 - protein, 1241 aa, Artificial Sequence
  SARS-CoV-2/USA/UT-00034/2020__EPI_ISL_417977 spike protein (1-1211)(T874C_S1055C) Foldon construct
MFVFLVLLPLVSSQCVNLTTRTQLPPAYTNSFTRGVYYPDKVFRSSVLHSTQDLFLPFFSNVTWFHAIHVSGTNGTKRFDNPVLPFNDGVYFASTEKSNIIRGWIFGTTLDSKTQSLLIVNNATNVVIKVCEFQFCNDPFLGVYYYKNNKSWMESEFRVYSSANNCTFEYVSQPFLMDLEGKQGNFKNLREFVFKNIDGYFKIYSKHTPINLVRDLPQGFSALEPLVDLPIGINITRFQTLLALHRSYLTPGDSSSGWTAGAAAYYVGYLQPRTFLLKYNENGTITDAVDCALDPLSETKCTLKSFTVEKGIYQTSNFRVQPTESIVRFPNITNLCPFGEVFNATRFASVYAWNRKRISNCVADYSVLYNSASFSTFKCYGVSPTKLNDLCFTNVYADSFVIRGDEVRQIAPGQTGKIADYNYKLPDDFTGCVIAWNSNNLDSKVGGNYNYLYRLFRKSNLKPFERDISTEIYQAGSTPCNGVEGFNCYFPLQSYGFQPTNGVGYQPYRVVVLSFELLHAPATVCGPKKSTNLVKNKCVNFNFNGLTGTGVLTESNKKFLPFQQFGRDIADTTDAVRDPQTLEILDITPCSFGGVSVITPGTNTSNQVAVLYQGVNCTEVPVAIHADQLTPTWRVYSTGSNVFQTRAGCLIGAEHVNNSYECDIPIGAGICASYQTQTNSPRRARSVASQSIIAYTMSLGAENSVAYSNNSIAIPTNFTISVTTEILPVSMTKTSVDCTMYICGDSTECSNLLLQYGSFCTQLNRALTGIAVEQDKNTQEVFAQVKQIYKTPPIKDFGGFNFSQILPDPSKPSKRSFIEDLLFNKVTLADAGFIKQYGDCLGDIAARDLICAQKFNGLTVLPPLLTDEMIAQYCSALLAGTITSGWTFGAGAALQIPFAMQMAYRFNGIGVTQNVLYENQKLIANQFNSAIGKIQDSLSSTASALGKLQDVVNQNAQALNTLVKQLSSNFGAISSVLNDILSRLDKVEAEVQIDRLITGRLQSLQTYVTQQLIRAAEIRASANLAATKMSECVLGQSKRVDFCGKGYHLMSFPQCAPHGVVFLHVTYVPAQEKNFTTAPAICHDGKAHFPREGVFVSNGTHWFVTQRNFYEPQIITTDNTFVSGNCDVVIGIVNNTVYDPLQPELDSFKEELDKYFKNHTSPDVDLGDISGINASVVNIQKEIDRLNEVAKNLNESLIDLQELGKYEQYIKGGSGYIPEAPRDGQAYVRKDGEWVLLSTFL

SEQ ID NO: 6632 - protein, 1241 aa, Artificial Sequence
  SARS-CoV-2/USA/UT-00033/2020__EPI_ISL_417976 spike protein (1-1211)(T874C_S1055C) Foldon construct
MFVFLVLLPLVSSQCVNLTTRTQLPPAYTNSFTRGVYYPDKVFRSSVLHSTQDLFLPFFSNVTWFHAIHVSGTNGTKRFDNPVLPFNDGVYFASTEKSNIIRGWIFGTTLDSKTQSLLIVNNATNVVIKVCEFQFCNDPFLGVYYHKNNKSWMESEFRVYSSANNCTFEYVSQPFLMDLEGKQGNFKNLREFVFKNIDGYFKIYSKHTPINLVRDLPQGFSALEPLVDLPIGINITRFQTLLALHRSYLTPGDSSSGLTAGAAAYYVGYLQPRTFLLKYNENGTITDAVDCALDPLSETKCTLKSFTVEKGIYQTSNFRVQPTESIVRFPNITNLCPFGEVFNATRFASVYAWNRKRISNCVADYSVLYNSASFSTFKCYGVSPTKLNDLCFTNVYADSFVIRGDEVRQIAPGQTGKIADYNYKLPDDFTGCVIAWNSNNLDSKVGGNYNYLYRLFRKSNLKPFERDISTEIYQAGSTPCNGVEGFNCYFPLQSYGFQPTNGVGYQPYRVVVLSFELLHAPATVCGPKKSTNLVKNKCVNFNFNGLTGTGVLTESNKKFLPFQQFGRDIADTTDAVRDPQTLEILDITPCSFGGVSVITPGTNTSNQVAVLYQGVNCTEVPVAIHADQLTPTWRVYSTGSNVFQTRAGCLIGAEHVNNSYECDIPIGAGICASYQTQTNSPRRARSVASQSIIAYTMSLGAENSVAYSNNSIAIPTNFTISVTTEILPVSMTKTSVDCTMYICGDSTECSNLLLQYGSFCTQLNRALTGIAVEQDKNTQEVFAQVKQIYKTPPIKDFGGFNFSQILPDPSKPSKRSFIEDLLFNKVTLADAGFIKQYGDCLGDIAARDLICAQKFNGLTVLPPLLTDEMIAQYCSALLAGTITSGWTFGAGAALQIPFAMQMAYRFNGIGVTQNVLYENQKLIANQFNSAIGKIQDSLSSTASALGKLQDVVNQNAQALNTLVKQLSSNFGAISSVLNDILSRLDKVEAEVQIDRLITGRLQSLQTYVTQQLIRAAEIRASANLAATKMSECVLGQSKRVDFCGKGYHLMSFPQCAPHGVVFLHVTYVPAQEKNFTTAPAICHDGKAHFPREGVFVSNGTHWFVTQRNFYEPQIITTDNTFVSGNCDVVIGIVNNTVYDPLQPELDSFKEELDKYFKNHTSPDVDLGDISGINASVVNIQKEIDRLNEVAKNLNESLIDLQELGKYEQYIKGGSGYIPEAPRDGQAYVRKDGEWVLLSTFL

SEQ ID NO: 6633 - protein, 1241 aa, Artificial Sequence
  SARS-CoV-2/USA/WI-13/2020__EPI_ISL_417516 spike protein (1-1211)(T874C_S1055C) Foldon construct
MFVFLVLLPLVSSQCVNLTTRTQLPPAYTNSFTRGVYYPDKVFRSSVLHSTQDLFLPFFSNVTWFHAIHVSGTNGTKRFDNPVLPFNDGVYFASTEKSNIIRGWIFGTTLDSKTQSLLIVNNATNVVIKVCEFQFCNDPFLGVYYHKNNKSWMESEFRVYSSANNCTFEYVSQPFLMDLEGKQGNFKNLREFVFKNIDGYFKIYSKHTPINLVRDLPQGFSALEPLVDLPIGINITRFQTLLALHRSYLTPGDSSSGWTAGAAAYYVGYLQPRTFLLKYNENGTITDAVDCALDPLSETKCTLKSFTVEKGIYQTSNFRVLPTESIVRFPNITNLCPFGEVFNATRFASVYAWNRKRISNCVADYSVLYNSASFSTFKCYGVSPTKLNDLCFTNVYADSFVIRGDEVRQIAPGQTGKIADYNYKLPDDFTGCVIAWNSNNLDSKVGGNYNYLYRLFRKSNLKPFERDISTEIYQAGSTPCNGVEGFNCYFPLQSYGFQPTNGVGYQPYRVVVLSFELLHAPATVCGPKKSTNLVKNKCVNFNFNGLTGTGVLTESNKKFLPFQQFGRDIADTTDAVRDPQTLEILDITPCSFGGVSVITPGTNTSNQVAVLYQGVNCTEVPVAIHADQLTPTWRVYSTGSNVFQTRAGCLIGAEHVNNSYECDIPIGAGICASYQTQTNSPRRARSVASQSIIAYTMSLGAENSVAYSNNSIAIPTNFTISVTTEILPVSMTKTSVDCTMYICGDSTECSNLLLQYGSFCTQLNRALTGIAVEQDKNTQEVFAQVKQIYKTPPIKDFGGFNFSQILPDPSKPSKRSFIEDLLFNKVTLADAGFIKQYGDCLGDIAARDLICAQKFNGLTVLPPLLTDEMIAQYCSALLAGTITSGWTFGAGAALQIPFAMQMAYRFNGIGVTQNVLYENQKLIANQFNSAIGKIQDSLSSTASALGKLQDVVNQNAQALNTLVKQLSSNFGAISSVLNDILSRLDKVEAEVQIDRLITGRLQSLQTYVTQQLIRAAEIRASANLAATKMSECVLGQSKRVDFCGKGYHLMSFPQCAPHGVVFLHVTYVPAQEKNFTTAPAICHDGKAHFPREGVFVSNGTHWFVTQRNFYEPQIITTDNTFVSGNCDVVIGIVNNTVYDPLQPELDSFKEELDKYFKNHTSPDVDLGDISGINASVVNIQKEIDRLNEVAKNLNESLIDLQELGKYEQYIKGGSGYIPEAPRDGQAYVRKDGEWVLLSTFL

SEQ ID NO: 6634 - protein, 1240 aa, Artificial Sequence
  SARS-CoV-2/India/1-27/2020__EPI_ISL_413522 spike protein (1-1210)(T873C_S1054C) Foldon construct
MFVFLVLLPLVSSQCVNLTTRTQLPPAYTNSFTRGVYYPDKVFRSSVLHSTQDLFLPFFSNVTWFHAIHVSGTNGTKRFDNPVLPFNDGVYFASTEKSNIIRGWIFGTTLDSKTQSLLIVNNATNVVIKVCEFQFCNDPFLGVYHKNNKSWMESEFRVYSSANNCTFEYVSQPFLMDLEGKQGNFKNLREFVFKNIDGYFKIYSKHTPINLVRDLPQGFSALEPLVDLPIGINITRFQTLLALHRSYLTPGDSSSGWTAGAAAYYVGYLQPRTFLLKYNENGTITDAVDCALDPLSETKCTLKSFTVEKGIYQTSNFRVQPTESIVRFPNITNLCPFGEVFNATRFASVYAWNRKRISNCVADYSVLYNSASFSTFKCYGVSPTKLNDLCFTNVYADSFVIRGDEVIQIAPGQTGKIADYNYKLPDDFTGCVIAWNSNNLDSKVGGNYNYLYRLFRKSNLKPFERDISTEIYQAGSTPCNGVEGFNCYFPLQSYGFQPTNGVGYQPYRVVVLSFELLHAPATVCGPKKSTNLVKNKCVNFNFNGLTGTGVLTESNKKFLPFQQFGRDIADTTDAVRDPQTLEILDITPCSFGGVSVITPGTNTSNQVAVLYQDVNCTEVPVAIHADQLTPTWRVYSTGSNVFQTRAGCLIGAEHVNNSYECDIPIGAGICASYQTQTNSPRRARSVASQSIIAYTMSLGAENSVAYSNNSIAIPTNFTISVTTEILPVSMTKTSVDCTMYICGDSTECSNLLLQYGSFCTQLNRALTGIAVEQDKNTQEVFAQVKQIYKTPPIKDFGGFNFSQILPDPSKPSKRSFIEDLLFNKVTLADAGFIKQYGDCLGDIAARDLICAQKFNGLTVLPPLLTDEMIAQYCSALLAGTITSGWTFGAGAALQIPFAMQMAYRFNGIGVTQNVLYENQKLIANQFNSAIGKIQDSLSSTASALGKLQDVVNQNAQALNTLVKQLSSNFGAISSVLNDILSRLDKVEAEVQIDRLITGRLQSLQTYVTQQLIRAAEIRASANLAATKMSECVLGQSKRVDFCGKGYHLMSFPQCAPHGVVFLHVTYVPAQEKNFTTAPAICHDGKAHFPREGVFVSNGTHWFVTQRNFYEPQIITTDNTFVSGNCDVVIGIVNNTVYDPLQPELDSFKEELDKYFKNHTSPDVDLGDISGINASVVNIQKEIDRLNEVAKNLNESLIDLQELGKYEQYIKGGSGYIPEAPRDGQAYVRKDGEWVLLSTFL

SEQ ID NO: 6635 - protein, 1235 aa, Artificial Sequence
  SARS-CoV-2/pangolin/Guangxi/P4L/2017__EPI_ISL_410538 spike protein (1-1205)(T868C_S1049C) Foldon construct
MFVFLFVLPLVSSQCVNLTTRTGIPPGYTNSSTRGVYYPDKVFRSSILHLTQDLFLPFFSNVTWFNTINYQGGFKKFDNPVLPFNDGVYFASTEKSNIIRGWIFGTTLDARTQSLLIVNNATNVVIKVCEFQFCTDPFLGVYYHNNNKTWVENEFRVYSSANNCTFEYISQPFLMDLEGKQGNFKNLREFVFKNVDGYFKIYSKHTPIDLVRDLPRGFAALEPLVDLPIGINITRFQTLLALHRSYLTPGNLESGWTTGAAAYYVGYLQQRTFLLSYNQNGTITDAVDCSLDPLSETKCTLKSLTVEKGIYQTSNFRVQPTISIVRFPNITNLCPFGEVFNASKFASVYAWNRKRISNCVADYSVLYNSTSFSTFKCYGVSPTKLNDLCFTNVYADSFVVKGDEVRQIAPGQTGVIADYNYKLPDDFTGCVIAWNSVKQDALTGGNYGYLYRLFRKSKLKPFERDISTEIYQAGSTPCNGQVGLNCYYPLERYGFHPTTGVNYQPFRVVVLSFELLNGPATVCGPKLSTTLVKDKCVNFNFNGLTGTGVLTTSKKQFLPFQQFGRDISDTTDAVRDPQTLEILDITPCSFGGVSVITPGTNTSNQVAVLYQDVNCTEVPMAIHAEQLTPAWRVYSAGANVFQTRAGCLVGAEHVNNSYECDIPVGAGICASYHSMSSLRSVNQRSIIAYTMSLGAENSVAYSNNSIAIPTNFTISVTTEILPVSMTKTSVDCTMYICGDSIECSNLLLQYGSFCTQLNRALTGIAVEQDKNTQEVFAQVKQIYKTPPIKDFGGFNFSQILPDPSKPSKRSFIEDLLFNKVTLADAGFIKQYGDCLGDIAARDLICAQKFNGLTVLPPLLTDEMIAQYCSALLAGTITSGWTFGAGAALQIPFAMQMAYRFNGIGVTQNVLYENQKLIANQFNSAIGKIQDSLSSTASALGKLQDVVNQNAQALNTLVKQLSSNFGAISSVLNDILSRLDKVEAEVQIDRLITGRLQSLQTYVTQQLIRAAEIRASANLAATKMSECVLGQSKRVDFCGKGYHLMSFPQCAPHGVVFLHVTYVPAQEKNFTTAPAICHEGKAHFPREGVFVSNGTHWFITQRNFYEPQIITTDNTFVSGSCDVVIGIVNNTVYDPLQPELDSFKEELDKYFKNHTSPDVDLGDISGINASVVNIQKEIDRLNEVAKNLNESPIDLQELGKYEQYIKGGSGYIPEAPRDGQAYVRKDGEWVLLSTFL

SEQ ID NO: 6636 - protein, 1235 aa, Artificial Sequence
  SARS-CoV-2/pangolin/Guangxi/P5L/2017__EPI_ISL_410540 spike protein (1-1205)(T868C_S1049C) Foldon construct
MFVFLFVLPLVSSQCVNLTTRTGIPPGYTNSSTRGVYYPDKVFRSSILHLTQDLFLPFFSNVTWFNTINYQGGFKKFDNPVLPFNDGVYFASTEKSNIIRGWIFGTTLDARTQSLLIVNNATNVVIKVCEFQFCTDPFLGVYYHNNNKTWVENEFRVYSSANNCTFEYISQPFLMDLEGKQGNFKNLREFVFKNVDGYFKIYSKHTPIDLVRDLPRGFAALEPLVDLPIGINITRFQTLLALHRSYLTPGKLESGWTTGAAAYYVGYLQQRTFLLSYNQNGTITDAVDCSLDPLSETKCTLKSLTVEKGIYQTSNFRVQPTISIVRFPNITNLCPFGEVFNASKFASVYAWNRKRISNCVADYSVLYNSTSFSTFKCYGVSPTKLNDLCFTNVYADSFVVKGDEVRQIAPGQTGVIADYNYKLPDDFTGCVIAWNSVKQDALTGGNYGYLYRLFRKSKLKPFERDISTEIYQAGSTPCNGQVGLNCYYPLERYGFHPTTGVNYQPFRVVVLSFELLNGPATVCGPKLSTTLVKDKCVNFNFNGLTGTGVLTTSKKQFLPFQQFGRDISDTTDAVRDPQTLEILDITPCSFGGVSVITPGTNTSNQVAVLYQDVNCTEVPMAIHAEQLTPAWRVYSAGANVFQTRAGCLVGAEHVNNSYECDIPVGAGICASYHSMSSFRSVNQRSIIAYTMSLGAENSVAYSNNSIAIPTNFTISVTTEILPVSMTKTSVDCTMYICGDSIECSNLLLQYGSFCTQLNRALTGIAVEQDKNTQEVFAQVKQIYKTPPIKDFGGFNFSQILPDPSKPSKRSFIEDLLFNKVTLADAGFIKQYGDCLGDIAARDLICAQKFNGLTVLPPLLTDEMIAQYCSALLAGTITSGWTFGAGAALQIPFAMQMAYRFNGIGVTQNVLYENQKLIANQFNSAIGKIQDSLSSTASALGKLQDVVNQNAQALNTLVKQLSSNFGAISSVLNDILSRLDKVEAEVQIDRLITGRLQSLQTYVTQQLIRAAEIRASANLAATKMSECVLGQSKRVDFCGKGYHLMSFPQCAPHGVVFLHVTYVPAQEKNFTTAPAICHEGKAHFPREGVFVSNGTHWFITQRNFYEPQIITTDNTFVSGSCDVVIGIVNNTVYDPLQPELDSFKEELDKYFKNHTSPDVDLGDISGINASVVNIQKEIDRLNEVAKNLNESLIDLQELGKYEQYIKGGSGYIPEAPRDGQAYVRKDGEWVLLSTFL

SEQ ID NO: 6637 - protein, 1235 aa, Artificial Sequence
  SARS-CoV-2/pangolin/Guangxi/P5E/2017__EPI_ISL_410541 spike protein (1-1205)(T868C_S1049C) Foldon construct
MFVFLFVLPLVSSQCVNLTTRTGIPPGYTNSSTRGVYYPDKVFRSSILHLTQDLFLPFFSNVTWFNTITYQGGSKKFDNPVLPFNDGVYFASTEKSNIIRGWIFGTTLDARTQSLLIVNNATNVVIKVCEFQFCTDPFLGVYYHNNNKTWVENEFRVYSSANNCTFEYISQPFLMDLEGKQGNFKNLREFVFKNVDGYFKIYSKHTPIDLVRDLPRGFAALEPLVDLPIGINITRFQTLLALHRSYLTPGKLESGWTTGAAAYYVGYLQQRTFLLSYNQNGTITDAVDCSLDPLSETKCTLKSLTVEKGIYQTSNFRVQPTISIVRFPNITNLCPFGEVFNASKFASVYAWNRKRISNCVADYSVLYNSTSFSTFKCYGVSPTKLNDLCFTNVYADSFVVKGDEVRQIAPGQTGVIADYNYKLPDDFTGCVIAWNSVKQDALTGDNYGYLYRLFRKSKLKPFERDISTEIYQAGSTPCNGQVGLNCYYPLERYGFHPTTGVNYQPFRVVVLSFELLNGPATVCGPKLSTTLVKDKCVNFNFNGLTGTGVLTTSKKQFLPFQQFGRDISDTTDAVRDPQTLEILDITPCSFGGVSVITPGTNTSNQVAVLYQDVNCTEVPMAIHAEQLTPAWRVYSAGANVFQTRAGCLVGAEHVNNSYECDIPVGAGICASYHSMSSFRSVNQRSIIAYTMSLGAENSVAYSNNSIAIPTNFTISVTTEILPVSMTKTSVDCTMYICGDSIECSNLLLQYGSFCTQLNRALTGIAVEQDKNTQEVFAQVKQIYKTPPIKDFGGFNFSQILPDPSKPSKRSFIEDLLFNKVTLADAGFIKQYGDCLGDIAARDLICAQKFNGLTVLPPLLTDEMIAQYCSALLAGTITSGWTFGAGAALQIPFAMQMAYRFNGIGVTQNVLYENQKLIANQFNSAIGKIQDSLSSTASALGKLQDVVNQNAQALNTLVKQLSSNFGAISSVLNDILSRLDKVEAEVQIDRLITGRLQSLQTYVTQQLIRAAEIRASANLAATKMSECVLGQSKRVDFCGKGYHLMSFPQCAPHGVVFLHVTYVPAQEKNFTTAPAICHEGKAHFPREGVFVSNGTHWFITQRNFYEPQIITTDNTFVSGSCDVVIGIVNNTVYDPLQPELDSFKEELDKYFKNHTSPDVDLGDISGINASVVNIQKEIDRLNEVAKNLNESLIDLQELGKYEQYIKGGSGYIPEAPRDGQAYVRKDGEWVLLSTFL

SEQ ID NO: 6638 - protein, 1233 aa, Artificial Sequence
  SARS-CoV-2/pangolin/Guangxi/P1E/2017__EPI_ISL_410539 spike protein (1-1203)(T866C_S1047C) Foldon construct
MFVFLFVLPLVSSQCVNLTTRTGIQPGYTNSSTRGVYYPDKVFRSSILHLTQDLFLPFFSNVTWFNTINYQGGFKKFDNPVLPFNDGVYFASTEKSNIIRGWIFGTTLDARTQSLLIVNNATNVVIKVCEFQFCTDPFLGVYYHNNNKTWVENEFRVYSSANNCTFEYISQPFLMDLEGKQGNFKNLREFVFKNVDGYFKIYSKHTPIDLVRDLPRGFAALEPLVDLPIGINITRFQTLLALHRSYLTPGKLESGWTTGAAAYYVGYLQQRTFLLSYNQNGTITDAVDCSLDPLSETKCTLKSLTVEKGIYQTSNFRVQPTISIVRFPNITNLCPFGEVFNASKFASVYAWNRKRISNCVADYSVLYNSTSFSTFKCYGVSPTKLNDLCFTNVYADSFVVKGDEVRQIAPGQTGVIADYNYKLPDDFTGCVIAWNSVKQDALTGGNYLYRLFRKSKLKPFERDISTEIYQAGSTPCNGQVGLNCYYPLERYGFHPTTGVNYQPFRVVVLSFELLNGPATVCGPKLSTTLVKDKCVNFNFNGLTGTGVLTTSKKQFLPFQQFGRDISDTTDAVRDPQTLEILDITPCSFGGVSVITPGTNTSNQVAVLYQDVNCTEVPMAIHAEQLTPAWRVYSAGANVFQTRAGCLVGAEHVNNSYECDIPVGAGICASYHSMSSLRSVNQRSIIAYTMSLGAENSVAYSNNSIAIPTNFTISVTTEILPVSMTKTSVDCTMYICGDSIECSNLLLQYGSFCTQLNRALTGIAVEQDKNTQEVFAQVKQIYKTPPIKDFGGFNFSQILPDPSKPSKRSFIEDLLFNKVTLADAGFIKQYGDCLGDIAARDLICAQKFNGLTVLPPLLTDEMIAQYCSALLAGTITSGWTFGAGAALQIPFAMQMAYRFNGIGVTQNVLYENQKLIANQFNSAIGKIQDSLSSTASALGKLQDVVNQNAQALNTLVKQLSSNFGAISSVLNDILSRLDKVEAEVQIDRLITGRLQSLQTYVTQQLIRAAEIRASANLAATKMSECVLGQSKRVDFCGKGYHLMSFPQCAPHGVVFLHVTYVPAQEKNFTTAPAICHEGKAHFPREGVFVSNGTHWFITQRNFYEPQIITTDNTFVSGSCDVVIGIVNNTVYDPLQPELDSFKEELDKYFKNHTSPDVDLGDISGINASVVNIQKEIDRLNEVAKNLNESLIDLQELGKYEQYIKGGSGYIPEAPRDGQAYVRKDGEWVLLSTFL

SEQ ID NO: 6639 - protein, 1365 aa, Artificial Sequence
  SARS-CoV-2/Wuhan/WIV05/2019__EPI_ISL_402128 spike protein (1-1211) WhcAg construct
MFVFLVLLPLVSSQCVNLTTRTQLPPAYTNSFTRGVYYPDKVFRSSVLHSTQDLFLPFFSNVTWFHAIHVSGTNGTKRFDNPVLPFNDGVYFASTEKSNIIRGWIFGTTLDSKTQSLLIVNNATNVVIKVCEFQFCNDPFLGVYYHKNNKSWMESEFRVYSSANNCTFEYVSQPFLMDLEGKQGNFKNLREFVFKNIDGYFKIYSKHTPINLVRDLPQGFSALEPLVDLPIGINITRFQTLLALHRSYLTPGDSSSGWTAGAAAYYVGYLQPRTFLLKYNENGTITDAVDCALDPLSETKCTLKSFTVEKGIYQTSNFRVQPTESIVRFPNITNLCPFGEVFNATRFASVYAWNRKRISNCVADYSVLYNSASFSTFKCYGVSPTKLNDLCFTNVYADSFVIRGDEVRQIAPGQTGKIADYNYKLPDDFTGCVIAWNSNNLDSKVGGNYNYLYRLFRKSNLKPFERDISTEIYQAGSTPCNGVEGFNCYFPLQSYGFQPTNGVGYQPYRVVVLSFELLHAPATVCGPKKSTNLVKNKCVNFNFNGLTGTGVLTESNKKFLPFQQFGRDIADTTDAVRDPQTLEILDITPCSFGGVSVITPGTNTSNQVAVLYQDVNCTEVPVAIHADQLTPTWRVYSTGSNVFQTRAGCLIGAEHVNNSYECDIPIGAGICASYQTQTNSPRRARSVASQSIIAYTMSLGAENSVAYSNNSIAIPTNFTISVTTEILPVSMTKTSVDCTMYICGDSTECSNLLLQYGSFCTQLNRALTGIAVEQDKNTQEVFAQVKQIYKTPPIKDFGGFNFSQILPDPSKPSKRSFIEDLLFNKVTLADAGFIKQYGDCLGDIAARDLICAQKFNGLTVLPPLLTDEMIAQYTSALLAGTITSGWTFGAGAALQIPFAMQMAYRFNGIGVTQNVLYENQKLIANQFNSAIGKIQDSLSSTASALGKLQDVVNQNAQALNTLVKQLSSNFGAISSVLNDILSRLDKVEAEVQIDRLITGRLQSLQTYVTQQLIRAAEIRASANLAATKMSECVLGQSKRVDFCGKGYHLMSFPQSAPHGVVFLHVTYVPAQEKNFTTAPAICHDGKAHFPREGVFVSNGTHWFVTQRNFYEPQIITTDNTFVSGNCDVVIGIVNNTVYDPLQPELDSFKEELDKYFKNHTSPDVDLGDISGINASVVNIQKEIDRLNEVAKNLNESLIDLQELGKYEQYIKGGGGSDIDPYKEFGSSYQLLNFLPLDFFPDLNALVDTATALYEEELTGREHCSPHHTAIRQALVCWDELTKLIAWMSSNITSEQVRTIIVNHVNDTWGLKVRQSLWFHLSCLTFGQHTVQEFLVSFGVWIRTPAPYRPPNAPILSTLPEHTVIC

SEQ ID NO: 6640 - protein, 1361 aa, Artificial Sequence
  SARS-CoV-2/bat/Yunnan/RaTG13/2013__EPI_ISL_402131 spike protein (1-1207) WhcAg construct
MFVFLVLLPLVSSQCVNLTTRTQLPPAYTNSSTRGVYYPDKVFRSSVLHLTQDLFLPFFSNVTWFHAIHVSGTNGIKRFDNPVLPFNDGVYFASTEKSNIIRGWIFGTTLDSKTQSLLIVNNATNVVIKVCEFQFCNDPFLGVYYHKNNKSWMESEFRVYSSANNCTFEYVSQPFLMDLEGKQGNFKNLREFVFKNIDGYFKIYSKHTPINLVRDLPPGFSALEPLVDLPIGINITRFQTLLALHRSYLTPGDSSSGWTAGAAAYYVGYLQPRTFLLKYNENGTITDAVDCALDPLSETKCTLKSFTVEKGIYQTSNFRVQPTDSIVRFPNITNLCPFGEVFNATTFASVYAWNRKRISNCVADYSVLYNSTSFSTFKCYGVSPTKLNDLCFTNVYADSFVITGDEVRQIAPGQTGKIADYNYKLPDDFTGCVIAWNSKHIDAKEGGNFNYLYRLFRKANLKPFERDISTEIYQAGSKPCNGQTGLNCYYPLYRYGFYPTDGVGHQPYRVVVLSFELLNAPATVCGPKKSTNLVKNKCVNFNFNGLTGTGVLTESNKKFLPFQQFGRDIADTTDAVRDPQTLEILDITPCSFGGVSVITPGTNASNQVAVLYQDVNCTEVPVAIHADQLTPTWRVYSTGSNVFQTRAGCLIGAEHVNNSYECDIPIGAGICASYQTQTNSRSVASQSIIAYTMSLGAENSVAYSNNSIAIPTNFTISVTTEILPVSMTKTSVDCTMYICGDSTECSNLLLQYGSFCTQLNRALTGIAVEQDKNTQEVFAQVKQIYKTPPIKDFGGFNFSQILPDPSKPSKRSFIEDLLFNKVTLADAGFIKQYGDCLGDIAARDLICAQKFNGLTVLPPLLTDEMIAQYTSALLAGTITSGWTFGAGAALQIPFAMQMAYRFNGIGVTQNVLYENQKLIANQFNSAIGKIQDSLSSTASALGKLQDVVNQNAQALNTLVKQLSSNFGAISSVLNDILSRLDKVEAEVQIDRLITGRLQSLQTYVTQQLIRAAEIRASANLAATKMSECVLGQSKRVDFCGKGYHLMSFPQSAPHGVVFLHVTYVPAQEKNFTTAPAICHDGKAHFPREGVFVSNGTHWFVTQRNFYEPQIITTDNTFVSGSCDVVIGIVNNTVYDPLQPELDSFKEELDKYFKNHTSPDVDLGDISGINASVVNIQKEIDRLNEVAKNLNESLIDLQELGKYEQYIKGGGGSDIDPYKEFGSSYQLLNFLPLDFFPDLNALVDTATALYEEELTGREHCSPHHTAIRQALVCWDELTKLIAWMSSNITSEQVRTIIVNHVNDTWGLKVRQSLWFHLSCLTFGQHTVQEFLVSFGVWIRTPAPYRPPNAPILSTLPEHTVIC

SEQ ID NO: 6641 - protein, 1365 aa, Artificial Sequence
  SARS-CoV-2/Wuhan/HBCDC-HB-01/2019__EPI_ISL_402132 spike protein (1-1211) WhcAg construct
MFVFLVLLPLVSSQCVNLTTRTQLPPAYTNSITRGVYYPDKVFRSSVLHSTQDLFLPFFSNVTWFHAIHVSGTNGTKRFDNPVLPFNDGVYFASTEKSNIIRGWIFGTTLDSKTQSLLIVNNATNVVIKVCEFQFCNDPFLGVYYHKNNKSWMESEFRVYSSANNCTFEYVSQPFLMDLEGKQGNFKNLREFVFKNIDGYFKIYSKHTPINLVRDLPQGFSALEPLVDLPIGINITRFQTLLALHRSYLTPGDSSSGWTAGAAAYYVGYLQPRTFLLKYNENGTITDAVDCALDPLSETKCTLKSFTVEKGIYQTSNFRVQPTESIVRFPNITNLCPFGEVFNATRFASVYAWNRKRISNCVADYSVLYNSASFSTFKCYGVSPTKLNDLCFTNVYADSFVIRGDEVRQIAPGQTGKIADYNYKLPDDFTGCVIAWNSNNLDSKVGGNYNYLYRLFRKSNLKPFERDISTEIYQAGSTPCNGVEGFNCYFPLQSYGFQPTNGVGYQPYRVVVLSFELLHAPATVCGPKKSTNLVKNKCVNFNFNGLTGTGVLTESNKKFLPFQQFGRDIADTTDAVRDPQTLEILDITPCSFGGVSVITPGTNTSNQVAVLYQDVNCTEVPVAIHADQLTPTWRVYSTGSNVFQTRAGCLIGAEHVNNSYECDIPIGAGICASYQTQTNSPRRARSVASQSIIAYTMSLGAENSVAYSNNSIAIPTNFTISVTTEILPVSMTKTSVDCTMYICGDSTECSNLLLQYGSFCTQLNRALTGIAVEQDKNTQEVFAQVKQIYKTPPIKDFGGFNFSQILPDPSKPSKRSFIEDLLFNKVTLADAGFIKQYGDCLGDIAARDLICAQKFNGLTVLPPLLTDEMIAQYTSALLAGTITSGWTFGAGAALQIPFAMQMAYRFNGIGVTQNVLYENQKLIANQFNSAIGKIQDSLSSTASALGKLQDVVNQNAQALNTLVKQLSSNFGAISSVLNDILSRLDKVEAEVQIDRLITGRLQSLQTYVTQQLIRAAEIRASANLAATKMSECVLGQSKRVDFCGKGYHLMSFPQSAPHGVVFLHVTYVPAQEKNFTTAPAICHDGKAHFPREGVFVSNGTHWFVTQRNFYEPQIITTDNTFVSGNCDVVIGIVNNTVYDPLQPELDSFKEELDKYFKNHTSPDVDLGDISGINASVVNIQKEIDRLNEVAKNLNESLIDLQELGKYEQYIKGGGGSDIDPYKEFGSSYQLLNFLPLDFFPDLNALVDTATALYEEELTGREHCSPHHTAIRQALVCWDELTKLIAWMSSNITSEQVRTIIVNHVNDTWGLKVRQSLWFHLSCLTFGQHTVQEFLVSFGVWIRTPAPYRPPNAPILSTLPEHTVIC

SEQ ID NO: 6642 - protein, 1365 aa, Artificial Sequence
  SARS-CoV-2/Guangdong/20SF028/2020__EPI_ISL_403936 spike protein (1-1211) WhcAg construct
MFVFLVLLPLVSSQCVNLTTRTQLPPAYTNSFTRGVYYPDKVFRSSVLYSTQDLFLPFFSNVTWFHAIHVSGTNGTKRFDNPVLPFNDGVYFASTEKSNIIRGWIFGTTLDSKTQSLLIVNNATNVVIKVCEFQFCNDPFLGVYYHKNNKSWMESEFRVYSSANNCTFEYVSQPFLMDLEGKQGNFKNLREFVFKNIDGYFKIYSKHTPINLVRDLPQGFSALEPLVDLPIGINITRFQTLLALHRSYLTPGDSSSGWTAGAAAYYVGYLQPRTFLLKYNENGTITDAVDCALDPLSETKCTLKSFTVEKGIYQTSNFRVQPTESIVRFPNITNLCPFGEVFNATRFASVYAWNRKRISNCVADYSVLYNSASFSTFKCYGVSPTKLNDLCFTNVYADSFVIRGDEVRQIAPGQTGKIADYNYKLPDDFTGCVIAWNSNNLDSKVGGNYNYLYRLFRKSNLKPFERDISTEIYQAGSTPCNGVEGFNCYFPLQSYGFQPTNGVGYQPYRVVVLSFELLHAPATVCGPKKSTNLVKNKCVNFNFNGLTGTGVLTESNKKFLPFQQFGRDIADTTDAVRDPQTLEILDITPCSFGGVSVITPGTNTSNQVAVLYQDVNCTEVPVAIHADQLTPTWRVYSTGSNVFQTRAGCLIGAEHVNNSYECDIPIGAGICASYQTQTNSPRRARSVASQSIIAYTMSLGAENSVAYSNNSIAIPTNFTISVTTEILPVSMTKTSVDCTMYICGDSTECSNLLLQYGSFCTQLNRALTGIAVEQDKNTQEVFAQVKQIYKTPPIKDFGGFNFSQILPDPSKPSKRSFIEDLLFNKVTLADAGFIKQYGDCLGDIAARDLICAQKFNGLTVLPPLLTDEMIAQYTSALLAGTITSGWTFGAGAALQIPFAMQMAYRFNGIGVTQNVLYENQKLIANQFNSAIGKIQDSLSSTASALGKLQDVVNQNAQALNTLVKQLSSNFGAISSVLNDILSRLDKVEAEVQIDRLITGRLQSLQTYVTQQLIRAAEIRASANLAATKMSECVLGQSKRVDFCGKGYHLMSFPQSAPHGVVFLHVTYVPAQEKNFTTAPAICHDGKAHFPREGVFVSNGTHWFVTQRNFYEPQIITTDNTFVSGNCDVVIGIVNNTVYDPLQPELDSFKEELDKYFKNHTSPDVDLGDISGINASVVNIQKEIDRLNEVAKNLNESLIDLQELGKYEQYIKGGGGSDIDPYKEFGSSYQLLNFLPLDFFPDLNALVDTATALYEEELTGREHCSPHHTAIRQALVCWDELTKLIAWMSSNITSEQVRTIIVNHVNDTWGLKVRQSLWFHLSCLTFGQHTVQEFLVSFGVWIRTPAPYRPPNAPILSTLPEHTVIC

SEQ ID NO: 6643 - protein, 1365 aa, Artificial Sequence
  SARS-CoV-2/Shenzhen/SZTH-001/2020__EPI_ISL_406592 spike protein (1-1211) WhcAg construct
MFVFLVLLPLVSSQCVNLTTRTQLPPAYTNSFTRGVYYPDKVFRSSVLHSTQDLFLPFFSNVTWFHAIHVSGTNGTKRFDNPVLPFNDGVYFASTEKSNIIRGWIFGTTLDSKTQSLLIVNNATNVVIKVCEFQFCNDPFLGVYYHKNNKSWMESEFRVYSSANNCTFEYVSQPFLMDLEGKQGNFKNLREFVFKNIDGYFKIYSKHTPINLVRDLPQGFSALEPLVDLPIGINITRFQTLLALHRSYLTPGDSSSGWTAGAAAYYVGYLQPRTFLLKYNENGTITDAVDCALDPLSETKCTLKSFTVEKGIYQTSNFRVQPTESIVRFPNITNLCPFGEVFNATRFASVYAWNRKRISNCVADYSVLYNSASFSTFKCYGVSPTKLNDLCFTNVYADSFVIRGDEVRQIAPGQTGKIADYNYKLPDDFTGCVIAWNSNNLDSKVGGNYNYLYRLFRKSNLKPFERDISTEIYQAGSTPCNGVEGFNCYFPLQSYGFQPTNGVGYQPYRVVVLSFELLHAPATVCGPKKSTNLVKNKCVNFNFNGLTGTGVLTESNKKFLPFQQFGRDIADTTDAVRDPQTLEILDITPCSFGGVSVITPGTNTSNQVAVLYQDVNCTEVPVAIHADQLTPTWRVYSTGSNVFQTRAGCLIGAEHVNNSYECDIPIGAGICASYQTQTNSPRRARSVASQSIIAYTMSLGAENSVAYSNNSIAIPTNFTISVTTEILPVSMTKTSVDCTMYICGDSTECSNLLLQYGSFCTQLNRALTGIAVEQDKNTQEVFAQVKQIYKTPPIKDFGGFNFSQILPDPSKPSKRSFIEDLLFNKVTLADAGFIKQYGDCLGDIAARDLICAQKFNGLTVLPPLLTDEMIAQYTSALLAGTITSGWTFGAGAALQIPFAMQMAYRFNGIGVTQNVLYENQKLIANQFNSAIGKIQDSLSSTASALGKLQDVVNQNAQALNTLVKQLSSNFGAISSVLNDILSRLDKVEAEVQIDRLITGRLQSLQTYVTQQLIRAAEIRASANLAATKMSECVLGQSKRVDFCGKGYHLMSFPQSAPHGVVFLHVTYVPAQEKNFTTAPAICHDGKAHFPREGVFVSNGTHWFVTQRNFYEPQIITTDNTFVSGNCDVLIGIVNNTVYDPLQPELDSFKEELDKYFKNHTSPDVDLGDISGINASVVNIQKEIDRLNEVAKNLNESLIDLQELGKYEQYIKGGGGSDIDPYKEFGSSYQLLNFLPLDFFPDLNALVDTATALYEEELTGREHCSPHHTAIRQALVCWDELTKLIAWMSSNITSEQVRTIIVNHVNDTWGLKVRQSLWFHLSCLTFGQHTVQEFLVSFGVWIRTPAPYRPPNAPILSTLPEHTVIC

SEQ ID NO: 6644 - protein, 1365 aa, Artificial Sequence
  SARS-CoV-2/Shenzhen/SZTH-004/2020__EPI_ISL_406595 spike protein (1-1211) WhcAg construct
MFVFLVLLPLVSSQCVNLTTRTQLPPAYTNSFTRGVYYPDKVFRSSVLHSTQDLFLPFFSNVTWFHAIHVSGTNGTKRFDNPVLPFNDGVYFASTEKSNIIRGWIFGTTLDSKTQSLLIVNNATNVVIKVCEFQFCNDPFLGVYYHKNNKSWMESEFRVYSSANNCTFEYVSQPFLMDLEGKQGNFKNLREFVFKNIDGYFKIYSKHTPINLVRDLPQGFSALEPLVDLPIGINITRFQTLLALHRSYLTPGDSSSGWTAGAAAYYVGYLQPRTFLLKYNENGTITDAVDCALDPLSETKCTLKSFTVEKGIYQTSNFRVQPTESIVRFPNITNLCPFGEVFNATRFASVYAWDRKRISNCVAYYSVLYNSASFSTFKCYGVSPTKLNDLCFTNVYADSFVIRGDEVRQIAPGQTGKIADYNYKLPDDFTGCVIAWNSNNLDSKVGGNYNYLYRLFRKSNLKPFERDISTEIYQAGSTPCNGVEGFNCYFPLQSYGFQPTNGVGYQPYRVVVLSFELLHAPATVCGPKKSTNLVKNKCVNFNFNGLTGTGVLTESNKKFLPFQQFGRDIADTTDAVRDPQTLEILDITPCSFGGVSVITPGTNTSNQVAVLYQDVNCTEVPVAIHADQLTPTWRVYSTGSNVFQTRAGCLIGAEHVNNSYECDIPIGAGICASYQTQTNSPRRARSVASQSIIAYTMSLGAENSVAYSNNSIAIPTNFTISVTTEILPVSMTKTSVDCTMYICGDSTECSNLLLQYGSFCTQLNRALTGIAVEQDKNTQEVFAQVKQIYKTPPIKDFGGFNFSQILPDPSKPSKRSFIEDLLFNKVTLADAGFIKQYGDCLGDIAARDLICAQKFNGLTVLPPLLTDEMIAQYTSALLAGTITSGWTFGAGAALQIPFAMQMAYRFNGIGVTQNVLYENQKLIANQFNSAIGKIQDSLSSTASALGKLQDVVNQNAQALNTLVKQLSSNFGAISSVLNDILSRLDKVEAEVQIDRLITGRLQSLQTYVTQQLIRAAEIRASANLAATKMSECVLGQSKRVDFCGKGYHLMSFPQSAPHGVVFLHVTYVPAQEKNFTTAPAICHDGKAHFPREGVFVSNGTHWFVTQRNFYEPQIITTDNTFVSGNCDVVIGIVNNTVYDPLQPELDSFKEELDKYFKNHTSPDVDLGDISGINASVVNIQKEIDRLNEVAKNLNESLIDLQELGKYEQYIKGGGGSDIDPYKEFGSSYQLLNFLPLDFFPDLNALVDTATALYEEELTGREHCSPHHTAIRQALVCWDELTKLIAWMSSNITSEQVRTIIVNHVNDTWGLKVRQSLWFHLSCLTFGQHTVQEFLVSFGVWIRTPAPYRPPNAPILSTLPEHTVIC

SEQ ID NO: 6645 - protein, 1365 aa, Artificial Sequence
  SARS-CoV-2/France/IDF0372/2020__EPI_ISL_406596 spike protein (1-1211) WhcAg construct
MFVFLVLLPLVSSQCVNLTTRTQLPPAYTNSFTRGVYYPDKVFRSSVLHSTQDLFLPFFSNVTWFHAIHVSGTNGTKRFDNPVLPFNDGVYFASTEKSNIIRGWIFGTTLDSKTQSLLIVNNATNVVIKVCEFQFCNDPFLGVYYHKNNKSWMESEFRVYSSANNCTFEYVSQPFLMDLEGKQGNFKNLREFVFKNIDGYFKIYSKHTPINLVRDLPQGFSALEPLVDLPIGINITRFQTLLALHRSYLTPGDSSSGWTAGAAAYYVGYLQPRTFLLKYNENGTITDAVDCALDPLSETKCTLKSFTVEKGIYQTSNFRVQPTESIVRFPNITNLCPFGEVFNATRFASVYAWNRKRISNCVADYSFLYNSASFSTFKCYGVSPTKLNDLCFTNVYADSFVIRGDEVRQIAPGQTGKIADYNYKLPDDFTGCVIAWNSNNLDSKVGGNYNYLYRLFRKSNLKPFERDISTEIYQAGSTPCNGVEGFNCYFPLQSYGFQPTNGVGYQPYRVVVLSFELLHAPATVCGPKKSTNLVKNKCVNFNFNGLTGTGVLTESNKKFLPFQQFGRDIADTTDAVRDPQTLEILDITPCSFGGVSVITPGTNTSNQVAVLYQDVNCTEVPVAIHADQLTPTWRVYSTGSNVFQTRAGCLIGAEHVNNSYECDIPIGAGICASYQTQTNSPRRARSVASQSIIAYTMSLGAENSVAYSNNSIAIPTNFTISVTTEILPVSMTKTSVDCTMYICGDSTECSNLLLQYGSFCTQLNRALTGIAVEQDKNTQEVFAQVKQIYKTPPIKDFGGFNFSQILPDPSKPSKRSFIEDLLFNKVTLADAGFIKQYGDCLGDIAARDLICAQKFNGLTVLPPLLTDEMIAQYTSALLAGTITSGWTFGAGAALQIPFAMQMAYRFNGIGVTQNVLYENQKLIANQFNSAIGKIQDSLSSTASALGKLQDVVNQNAQALNTLVKQLSSNFGAISSVLNDILSRLDKVEAEVQIDRLITGRLQSLQTYVTQQLIRAAEIRASANLAATKMSECVLGQSKRVDFCGKGYHLMSFPQSAPHGVVFLHVTYVPAQEKNFTTAPAICHDGKAHFPREGVFVSNGTHWFVTQRNFYEPQIITTDNTFVSGNCDVVIGIVNNTVYDPLQPELDSFKEELDKYFKNHTSPDVDLGDISGINASVVNIQKEIDRLNEVAKNLNESLIDLQELGKYEQYIKGGGGSDIDPYKEFGSSYQLLNFLPLDFFPDLNALVDTATALYEEELTGREHCSPHHTAIRQALVCWDELTKLIAWMSSNITSEQVRTIIVNHVNDTWGLKVRQSLWFHLSCLTFGQHTVQEFLVSFGVWIRTPAPYRPPNAPILSTLPEHTVIC

SEQ ID NO: 6646 - protein, 1365 aa, Artificial Sequence
  SARS-CoV-2/Australia/VIC01/2020__EPI_ISL_406844 spike protein (1-1211) WhcAg construct
MFVFLVLLPLVSSQCVNLTTRTQLPPAYTNSFTRGVYYPDKVFRSSVLHSTQDLFLPFFSNVTWFHAIHVSGTNGTKRFDNPVLPFNDGVYFASTEKSNIIRGWIFGTTLDSKTQSLLIVNNATNVVIKVCEFQFCNDPFLGVYYHKNNKSWMESEFRVYSSANNCTFEYVSQPFLMDLEGKQGNFKNLREFVFKNIDGYFKIYSKHTPINLVRDLPQGFSALEPLVDLPIGINITRFQTLLALHRRYLTPGDSSSGWTAGAAAYYVGYLQPRTFLLKYNENGTITDAVDCALDPLSETKCTLKSFTVEKGIYQTSNFRVQPTESIVRFPNITNLCPFGEVFNATRFASVYAWNRKRISNCVADYSVLYNSASFSTFKCYGVSPTKLNDLCFTNVYADSFVIRGDEVRQIAPGQTGKIADYNYKLPDDFTGCVIAWNSNNLDSKVGGNYNYLYRLFRKSNLKPFERDISTEIYQAGSTPCNGVEGFNCYFPLQSYGFQPTNGVGYQPYRVVVLSFELLHAPATVCGPKKSTNLVKNKCVNFNFNGLTGTGVLTESNKKFLPFQQFGRDIADTTDAVRDPQTLEILDITPCSFGGVSVITPGTNTSNQVAVLYQDVNCTEVPVAIHADQLTPTWRVYSTGSNVFQTRAGCLIGAEHVNNSYECDIPIGAGICASYQTQTNSPRRARSVASQSIIAYTMSLGAENSVAYSNNSIAIPTNFTISVTTEILPVSMTKTSVDCTMYICGDSTECSNLLLQYGSFCTQLNRALTGIAVEQDKNTQEVFAQVKQIYKTPPIKDFGGFNFSQILPDPSKPSKRSFIEDLLFNKVTLADAGFIKQYGDCLGDIAARDLICAQKFNGLTVLPPLLTDEMIAQYTSALLAGTITSGWTFGAGAALQIPFAMQMAYRFNGIGVTQNVLYENQKLIANQFNSAIGKIQDSLSSTASALGKLQDVVNQNAQALNTLVKQLSSNFGAISSVLNDILSRLDKVEAEVQIDRLITGRLQSLQTYVTQQLIRAAEIRASANLAATKMSECVLGQSKRVDFCGKGYHLMSFPQSAPHGVVFLHVTYVPAQEKNFTTAPAICHDGKAHFPREGVFVSNGTHWFVTQRNFYEPQIITTDNTFVSGNCDVVIGIVNNTVYDPLQPELDSFKEELDKYFKNHTSPDVDLGDISGINASVVNIQKEIDRLNEVAKNLNESLIDLQELGKYEQYIKGGGGSDIDPYKEFGSSYQLLNFLPLDFFPDLNALVDTATALYEEELTGREHCSPHHTAIRQALVCWDELTKLIAWMSSNITSEQVRTIIVNHVNDTWGLKVRQSLWFHLSCLTFGQHTVQEFLVSFGVWIRTPAPYRPPNAPILSTLPEHTVIC

SEQ ID NO: 6647 - protein, 1365 aa, Artificial Sequence
  SARS-CoV-2/Germany/BavPat1/2020__EPI_ISL_406862 spike protein (1-1211) WhcAg construct
MFVFLVLLPLVSSQCVNLTTRTQLPPAYTNSFTRGVYYPDKVFRSSVLHSTQDLFLPFFSNVTWFHAIHVSGTNGTKRFDNPVLPFNDGVYFASTEKSNIIRGWIFGTTLDSKTQSLLIVNNATNVVIKVCEFQFCNDPFLGVYYHKNNKSWMESEFRVYSSANNCTFEYVSQPFLMDLEGKQGNFKNLREFVFKNIDGYFKIYSKHTPINLVRDLPQGFSALEPLVDLPIGINITRFQTLLALHRSYLTPGDSSSGWTAGAAAYYVGYLQPRTFLLKYNENGTITDAVDCALDPLSETKCTLKSFTVEKGIYQTSNFRVQPTESIVRFPNITNLCPFGEVFNATRFASVYAWNRKRISNCVADYSVLYNSASFSTFKCYGVSPTKLNDLCFTNVYADSFVIRGDEVRQIAPGQTGKIADYNYKLPDDFTGCVIAWNSNNLDSKVGGNYNYLYRLFRKSNLKPFERDISTEIYQAGSTPCNGVEGFNCYFPLQSYGFQPTNGVGYQPYRVVVLSFELLHAPATVCGPKKSTNLVKNKCVNFNFNGLTGTGVLTESNKKFLPFQQFGRDIADTTDAVRDPQTLEILDITPCSFGGVSVITPGTNTSNQVAVLYQGVNCTEVPVAIHADQLTPTWRVYSTGSNVFQTRAGCLIGAEHVNNSYECDIPIGAGICASYQTQTNSPRRARSVASQSIIAYTMSLGAENSVAYSNNSIAIPTNFTISVTTEILPVSMTKTSVDCTMYICGDSTECSNLLLQYGSFCTQLNRALTGIAVEQDKNTQEVFAQVKQIYKTPPIKDFGGFNFSQILPDPSKPSKRSFIEDLLFNKVTLADAGFIKQYGDCLGDIAARDLICAQKFNGLTVLPPLLTDEMIAQYTSALLAGTITSGWTFGAGAALQIPFAMQMAYRFNGIGVTQNVLYENQKLIANQFNSAIGKIQDSLSSTASALGKLQDVVNQNAQALNTLVKQLSSNFGAISSVLNDILSRLDKVEAEVQIDRLITGRLQSLQTYVTQQLIRAAEIRASANLAATKMSECVLGQSKRVDFCGKGYHLMSFPQSAPHGVVFLHVTYVPAQEKNFTTAPAICHDGKAHFPREGVFVSNGTHWFVTQRNFYEPQIITTDNTFVSGNCDVVIGIVNNTVYDPLQPELDSFKEELDKYFKNHTSPDVDLGDISGINASVVNIQKEIDRLNEVAKNLNESLIDLQELGKYEQYIKGGGGSDIDPYKEFGSSYQLLNFLPLDFFPDLNALVDTATALYEEELTGREHCSPHHTAIRQALVCWDELTKLIAWMSSNITSEQVRTIIVNHVNDTWGLKVRQSLWFHLSCLTFGQHTVQEFLVSFGVWIRTPAPYRPPNAPILSTLPEHTVIC

SEQ ID NO: 6648 - protein, 1365 aa, Artificial Sequence
  SARS-CoV-2/Wuhan/HBCDC-HB-02/2020__EPI_ISL_412978 spike protein (1-1211) WhcAg construct
MFVFLVLLPLVSSQCVNLTTRTQLPPAYTNSFTRGVYYPDKVFRSSVLHSTQDLFLPFFSNVTWFHAIHVSGTNGTKRFDNPVLPFNDGVYFASTEKSNIIRGWIFGTTLDSKTQSLLIVNNATNVVIKVCEFQFCNDPFLGVYYHKNNKSWMESEFRVYSSANNCTFEYVSQPFLMDLEGKQGNFKNLREFVFKNIDGYFKIYSKHTPINLVRDLPQGFSALEPLVDLPIGINITRFQTLLALHRSYLTPGDSSSGWTAGAAAYYVGYLQPRTFLLKYNENGTITDAVDCALDPLSETKCTLKSFTVEKGIYQTSNFRVQPTESIVRFPNITNLCPFGEVFNATRFASVYAWNRKRISNCVADYSVLYNSASFSTFKCYGVSPTKLNDLCFTNVYADSFVIRGDEVRQIAPGQTGKIADYNYKLPDDFTGCVIAWNSNNLDSKVGGNYNYLYRLFRKSNLKPFERDISTEIYQAGSTPCNGVEGFNCYFPLQSYGFQPTNGVGYQPYRVVVLSFELLHAPATVCGPKKSTNLVKNKCVNFNFNGLTGTGVLTESNKKFLPFQQFGRDIADTTDAVRDPQTLEILDITPCSFGGVSVITPGTNTSNQVAVLYQDVNCTEVPVAIHADQLTPTWRVYSTGSNVFQTRAGCLIGAEHVNNSYECDIPIGAGICASYQTQTNSPRRARSVASQSIIAYTMSLGAENSVAYSNNSIAIPTNFTISVTTEILPVSMTKTSVDCTMYICGDSTECSNFLLQYGSFCTQLNRALTGIAVEQDKNTQEVFAQVKQIYKTPPIKDFGGFNFSQILPDPSKPSKRSFIEDLLFNKVTLADAGFIKQYGDCLGDIAARDLICAQKFNGLTVLPPLLTDEMIAQYTSALLAGTITSGWTFGAGAALQIPFAMQMAYRFNGIGVTQNVLYENQKLIANQFNSAIGKIQDSLSSTASALGKLQDVVNQNAQALNTLVKQLSSNFGAISSVLNDILSRLDKVEAEVQIDRLITGRLQSLQTYVTQQLIRAAEIRASANLAATKMSECVLGQSKRVDFCGKGYHLMSFPQSAPHGVVFLHVTYVPAQEKNFTTAPAICHDGKAHFPREGVFVSNGTHWFVTQRNFYEPQIITTDNTFVSGNCDVVIGIVNNTVYDPLQPELDSFKEELDKYFKNHTSPDVDLGDISGINASVVNIQKEIDRLNEVAKNLNESLIDLQELGKYEQYIKGGGGSDIDPYKEFGSSYQLLNFLPLDFFPDLNALVDTATALYEEELTGREHCSPHHTAIRQALVCWDELTKLIAWMSSNITSEQVRTIIVNHVNDTWGLKVRQSLWFHLSCLTFGQHTVQEFLVSFGVWIRTPAPYRPPNAPILSTLPEHTVIC

SEQ ID NO: 6649 - protein, 1365 aa, Artificial Sequence
  SARS-CoV-2/Australia/QLD02/2020__EPI_ISL_407896 spike protein (1-1211) WhcAg construct
MFVFLVLLPLVSSQCVNLTTRTQLPPAYTNSFTRGVYYPDKVFRSSVLHSTQDLFLPFFSNVTWFHAIHVSGTNGTKRFDNPVLPFNDGVYFASTEKSNIIRGWIFGTTLDSKTQSLLIVNNATNVVIKVCEFQFCNDPFLGVYYHKNNKSWMESEFRVYSSANNCTFEYVSQPFLMDLEGKQGNFKNLREFVFKNIDGYFKIYSKHTPINLVRDLPQGFSALEPLVDLPIGINITRFQTLLALHRSYLTPGDSSSGWTAGAAAYYVGYLQPRTFLLKYNENGTITDAVDCALDPLSETKCTLKSFTVEKGIYQTSNFRVQPTESIVRFPNITNLCPFGEVFNATRFASVYAWNRKRISNCVADYSVLYNSASFSTFKCYGVSPTKLNDLCFTNVYADSFVIRGDEVRQIAPGQTGKIADYNYKLPDDFTGCVIAWNSNNLDSKVGGNYNYLYRLFRKSNLKPFERDISTEIYQAGSTPCNGVEGFNCYFPLQSYGFQPTNGVGYQPYRVVVLSFELLHAPATVCGPKKSTNLVKNKCVNFNFNGLTGTGVLTESNKKFLPFQQFGRDIADTTDAVRDPQTLEILDITPCSFGGVSVITPGTNTSNQVAVLYQDVNCTEVPVAIHADQLTPTWRVYSTGSNVFQTRAGCLIGAEHVNNSYECDIPIGAGICASYQTQTNSPRRARSVASQSIIAYTMSLGAENSVAYSNNSIAIPTNFTISVTTEILPVSMTKTSVDCTMYICGDSTECSNLLLQYGSFCTQLNRALTGIAVEQDKNTQEVFAQVKQIYKTPPIKDFGGFNFSQILPDPSKPSKRSFIEDLLFNKVTLADAGFIKQYGDCLGDIAARDLICAQKFNGLTVLPPLLTDEMIAQYTSALLAGTITSGWTFGAGAALQIPFAMQMAYRFNGIGVTQNVLYENQKLIANQFNSAIGKIQDSLSSTASALGKLQDVVNQNAQALNTLVKQLSSNFGAISSVLNDILSRLDKVEAEVQIDRLITGRLQSLQTYVTQQLIRAAEIRASANLAATKMSECVLGQSKRVDFCGKGYHLMSFPQSAPHGVVFLHVTYVPAQEKNFTTAPAICHDGKAHFPREGVFVSNGTHWFVTQRNFYEPQIITTDNTFVSGNCDVVIGIVNNTVYDPLQLELDSFKEELDKYFKNHTSPDVDLGDISGINASVVNIQKEIDRLNEVAKNLNESLIDLQELGKYEQYIKGGGGSDIDPYKEFGSSYQLLNFLPLDFFPDLNALVDTATALYEEELTGREHCSPHHTAIRQALVCWDELTKLIAWMSSNITSEQVRTIIVNHVNDTWGLKVRQSLWFHLSCLTFGQHTVQEFLVSFGVWIRTPAPYRPPNAPILSTLPEHTVIC

SEQ ID NO: 6650 - protein, 1365 aa, Artificial Sequence
  SARS-CoV-2/India/1-31/2020__EPI_ISL_413523 spike protein (1-1211) WhcAg construct
MFVFLVLLPLVSSQCVNLTTRTQLPPAYTNSFTRGVYYPDKVFRSSVLHSTQDLFLPFFSNVTWFHAIHVSGTNGTKRFDNPVLPFNDGVYFASTEKSNIIRGWIFGTTLDSKTQSLLIVNNATNVVIKVCEFQFCNDPFLGVYYHKNNKSWMESEFRVYSSANNCTFEYVSQPFLMDLEGKQGNFKNLREFVFKNIDGYFKIYSKHTPINLVRDLPQGFSALEPLVDLPIGINITRFQTLLALHRSYLTPGDSSSGWTAGAAAYYVGYLQPRTFLLKYNENGTITDAVDCALDPLSETKCTLKSFTVEKGIYQTSNFRVQPTESIVRFPNITNLCPFGEVFNATRFASVYAWNRKRISNCVADYSVLYNSASFSTFKCYGVSPTKLNDLCFTNVYADSFVIRGDEVRQIAPGQTGKIADYNYKLPDDFTGCVIAWNSNNLDSKVGGNYNYLYRLFRKSNLKPFERDISTEIYQAGSTPCNGVEGFNCYFPLQSYGFQPTNGVGYQPYRVVVLSFELLHAPATVCGPKKSTNLVKNKCVNFNFNGLTGTGVLTESNKKFLPFQQFGRDIADTTDAVRDPQTLEILDITPCSFGGVSVITPGTNTSNQVAVLYQDVNCTEVPVAIHADQLTPTWRVYSTGSNVFQTRAGCLIGAEHVNNSYECDIPIGAGICASYQTQTNSPRRARSVASQSIIAYTMSLGAENSVAYSNNSIAIPTNFTISVTTEILPVSMTKTSVDCTMYICGDSTECSNLLLQYGSFCTQLNRALTGIAVEQDKNTQEVFAQVKQIYKTPPIKDFGGFNFSQILPDPSKPSKRSFIEDLLFNKVTLADAGFIKQYGDCLGDIAARDLICAQKFNGLTVLPPLLTDEMIAQYTSALLAGTITSGWTFGAGAALQIPFAMQMAYRFNGIGVTQNVLYENQKLIANQFNSVIGKIQDSLSSTASALGKLQDVVNQNAQALNTLVKQLSSNFGAISSVLNDILSRLDKVEAEVQIDRLITGRLQSLQTYVTQQLIRAAEIRASANLAATKMSECVLGQSKRVDFCGKGYHLMSFPQSAPHGVVFLHVTYVPAQEKNFTTAPAICHDGKAHFPREGVFVSNGTHWFVTQRNFYEPQIITTDNTFVSGNCDVVIGIVNNTVYDPLQPELDSFKEELDKYFKNHTSPDVDLGDISGINASVVNIQKEIDRLNEVAKNLNESLIDLQELGKYEQYIKGGGGSDIDPYKEFGSSYQLLNFLPLDFFPDLNALVDTATALYEEELTGREHCSPHHTAIRQALVCWDELTKLIAWMSSNITSEQVRTIIVNHVNDTWGLKVRQSLWFHLSCLTFGQHTVQEFLVSFGVWIRTPAPYRPPNAPILSTLPEHTVIC

SEQ ID NO: 6651 - protein, 1365 aa, Artificial Sequence
  SARS-CoV-2/Guangdong/GD2020087-P0008/2020__EPI_ISL_413863 spike protein (1-1211) WhcAg construct
MFVFLVLLPLVSSQCVNLTTRTQLPPAYTNSFTRGVYYPDKVFRSSVLHSTQDLFLPFFSNVTWFHAIHVSGTNGTKRFDNPVLPFNDGVYFASTEKSNIIRGWIFGTTLDSKTQSLLIVNNATNVVIKVCEFQFCNDPFLGVYYHKNNKSWMESEFRVYSSANNCTFEYVSQPFLMDLEGKQGNFKNLREFVFKNIDGYFKIYSKHTPINLVRDLPQGFSALEPLVDLPIGINITRFQTLLALHRSYLTPGDSSSGWTAGAAAYYVGYLQPRTFLLKYNENGTITDAVDCALDPLSETKCTLKSFTVEKGIYQTSNFRVQPTESIVRFPNITNLCPFGEVFNATRFASVYAWNRKRISNCVADYSVLYNSASFSTFKCYGVSPTKLNDLCFTNVYADSFVIRGDEVREIAPGQTGKIADYNYKLPDDFTGCVIAWNSNNLDSKVGGNYNYLYRLFRKSNLKPFERDISTEIYQAGSTPCNGVEGFNCYFPLQSYGFQPTNGVGYQPYRVVVLSFELLHAPATVCGPKKSTNLVKNKCVNFNFNGLTGTGVLTESNKKFLPFQQFGRDIADTTDAVRDPQTLEILDITPCSFGGVSVITPGTNTSNQVAVLYQDVNCTEVPVAIHADQLTPTWRVYSTGSNVFQTRAGCLIGAEHVNNSYECDIPIGAGICASYQTQTNSPRRARSVASQSIIAYTMSLGAENSVAYSNNSIAIPTNFTISVTTEILPVSMTKTSVDCTMYICGDSTECSNLLLQYGSFCTQLNRALTGIAVEQDKNTQEVFAQVKQIYKTPPIKDFGGFNFSQILPDPSKPSKRSFIEDLLFNKVTLADAGFIKQYGDCLGDIAARDLICAQKFNGLTVLPPLLTDEMIAQYTSALLAGTITSGWTFGAGAALQIPFAMQMAYRFNGIGVTQNVLYENQKLIANQFNSAIGKIQDSLSSTASALGKLQDVVNQNAQALNTLVKQLSSNFGAISSVLNDILSRLDKVEAEVQIDRLITGRLQSLQTYVTQQLIRAAEIRASANLAATKMSECVLGQSKRVDFCGKGYHLMSFPQSAPHGVVFLHVTYVPAQEKNFTTAPAICHDGKAHFPREGVFVSNGTHWFVTQRNFYEPQIITTDNTFVSGNCDVVIGIVNNTVYDPLQPELDSFKEELDKYFKNHTSPDVDLGDISGINASVVNIQKEIDRLNEVAKNLNESLIDLQELGKYEQYIKGGGGSDIDPYKEFGSSYQLLNFLPLDFFPDLNALVDTATALYEEELTGREHCSPHHTAIRQALVCWDELTKLIAWMSSNITSEQVRTIIVNHVNDTWGLKVRQSLWFHLSCLTFGQHTVQEFLVSFGVWIRTPAPYRPPNAPILSTLPEHTVIC

SEQ ID NO: 6652 - protein, 1365 aa, Artificial Sequence
  SARS-CoV-2/Sweden/01/2020__EPI_ISL_411951 spike protein (1-1211) WhcAg construct
MFVFLVLLPLVSSQCVNLTTRTQLPPAYTNSFTRGVYYPDKVFRSSVLHSTQDLFLPFFSNVTWFHAIHVSGTNGTKRFDNPVLPFNDGVYFASTEKSNIIRGWIFGTTLDSKTQSLLIVNNATNVVIKVCEFQFCNDPFLGVYYHKNNKSWMESEFRVYSSANNCTFEYVSQPFLMDLEGKQGNFKNLREFVFKNIDGYFKIYSKHTPINLVRDLPQGFSALEPLVDLPIGINITRFQTLLALHRSYLTPGDSSSGWTAGAAAYYVGYLQPRTFLLKYNENGTITDAVDCALDPLSETKCTLKSFTVEKGIYQTSNFRVQPTESIVRFPNITNLCPFGEVFNATRFASVYAWNRKRISNCVADYSVLYNSASFSTFKCYGVSPTKLNDLCFTNVYADSFVIRGDEVRQIAPGQTGKIADYNYKLPDDFTGCVIAWNSNNLDSKVGGNYNYLYRLFRKSNLKPFERDISTEIYQAGSTPCNGVEGFNCYFPLQSYGFQPTNGVGYQPYRVVVLSFELLHAPATVCGPKKSTNLVKNKCVNFNFNGLTGTGVLTESNKKFLPFQQFGRDIADTTDAVRDPQTLEILDITPCSFGGVSVITPGTNTSNQVAVLYQDVNCTEVPVAIHADQLTPTWRVYSTGSNVFQTRAGCLIGAEHVNNSYECDIPIGAGICASYQTQTNSPRRARSVASQSIIAYTMSLGAENSVAYSNNSIAIPTNFTISVTTEILPVSMTKTSVDCTMYICGDSTECSNLLLQYGSFCTQLNRALTGIAVEQDKNTQEVFAQVKQIYKTPPIKDCGGFNFSQILPDPSKPSKRSFIEDLLFNKVTLADAGFIKQYGDCLGDIAARDLICAQKFNGLTVLPPLLTDEMIAQYTSALLAGTITSGWTFGAGAALQIPFAMQMAYRFNGIGVTQNVLYENQKLIANQFNSAIGKIQDSLSSTASALGKLQDVVNQNAQALNTLVKQLSSNFGAISSVLNDILSRLDKVEAEVQIDRLITGRLQSLQTYVTQQLIRAAEIRASANLAATKMSECVLGQSKRVDFCGKGYHLMSFPQSAPHGVVFLHVTYVPAQEKNFTTAPAICHDGKAHFPREGVFVSNGTHWFVTQRNFYEPQIITTDNTFVSGNCDVVIGIVNNTVYDPLQPELDSFKEELDKYFKNHTSPDVDLGDISGINASVVNIQKEIDRLNEVAKNLNESLIDLQELGKYEQYIKGGGGSDIDPYKEFGSSYQLLNFLPLDFFPDLNALVDTATALYEEELTGREHCSPHHTAIRQALVCWDELTKLIAWMSSNITSEQVRTIIVNHVNDTWGLKVRQSLWFHLSCLTFGQHTVQEFLVSFGVWIRTPAPYRPPNAPILSTLPEHTVIC

SEQ ID NO: 6653 - protein, 1365 aa, Artificial Sequence
  SARS-CoV-2/Tianmen/HBCDC-HB-07/2020__EPI_ISL_412983 spike protein (1-1211) WhcAg construct
MFVFLVLLPLVSSQCVNLTTRTQLPPAYTNSFTRGVYYPDKVFRSSVLHSTQDLFLPFFSNVTWFHAIHVSGTNGTKRFDNPVLPFNDGVYFASTEKSNIIRGWIFGTTLDSKTQSLLIVNNATNVVIKVCEFQFCNDPFLGVYYHKNNKSWMESEFRVYSSANNCTFEYVSQPFLMDLEGKQGNFKNLREFVFKNIDGYFKIYSKHTPINLVRDLPQGFSALEPLVDLPIGINITRFQTLLALHRSYLTPGDSSSGWTAGAAAYYVGYLQPRTFLLKYNENGTITDAVDCALDPLSETKCTLKSFTVEKGIYQTSNFRVQPTESIVRFPNITNLCPFGEVFNATRFASVYAWNRKRISNCVADYSVLYNSASFSTFKCYGVSPTKLNDLCFTNVYADSFVIRGDEVRQIAPGQTGKIADYNYKLPDDFTGCVIAWNSNNLDSKVGGNYNYLYRLFRKSNLKPFERDISTEIYQAGSTPCNGVEGFNCYFPLQSYGFQPTNGVGYQPYRVVVLSFELLHAPATVCGPKKSTNLVKNKCVNFNFNGLTGTGVLTESNKKFLPFQQFGRDIADTTDAVRDPQTLEILDITPCSFGGVSVITPGTNTSNQVAVLYQDLNCTEVPVAIHADQLTPTWRVYSTGSNVFQTRAGCLIGAEHVNNSYECDIPIGAGICASYQTQTNSPRRARSVASQSIIAYTMSLGAENSVAYSNNSIAIPTNFTISVTTEILPVSMTKTSVDCTMYICGDSTECSNLLLQYGSFCTQLNRALTGIAVEQDKNTQEVFAQVKQIYKTPPIKDFGGFNFSQILPDPSKPSKRSFIEDLLFNKVTLADAGFIKQYGDCLGDIAARDLICAQKFNGLTVLPPLLTDEMIAQYTSALLAGTITSGWTFGAGAALQIPFAMQMAYRFNGIGVTQNVLYENQKLIANQFNSAIGKIQDSLSSTASALGKLQDVVNQNAQALNTLVKQLSSNFGAISSVLNDILSRLDKVEAEVQIDRLITGRLQSLQTYVTQQLIRAAEIRASANLAATKMSECVLGQSKRVDFCGKGYHLMSFPQSAPHGVVFLHVTYVPAQEKNFTTAPAICHDGKAHFPREGVFVSNGTHWFVTQRNFYEPQIITTDNTFVSGNCDVVIGIVNNTVYDPLQPELDSFKEELDKYFKNHTSPDVDLGDISGINASVVNIQKEIDRLNEVAKNLNESLIDLQELGKYEQYIKGGGGSDIDPYKEFGSSYQLLNFLPLDFFPDLNALVDTATALYEEELTGREHCSPHHTAIRQALVCWDELTKLIAWMSSNITSEQVRTIIVNHVNDTWGLKVRQSLWFHLSCLTFGQHTVQEFLVSFGVWIRTPAPYRPPNAPILSTLPEHTVIC

SEQ ID NO: 6654 - protein, 1365 aa, Artificial Sequence
  SARS-CoV-2/Hong Kong/case42_VM20002493/2020__EPI_ISL_414527 spike protein (1-1211) WhcAg construct
MFVFLVLLPLVSSQCVNLTTRTQLPPAYTNSFTRGVYYPDKVFRSSVLHSTQDLFLPFFSNVTWFHAIHVSGTNGTKRFDNPVLPFNDGVYFASTEKSNIIRGWIFGTTLDSKTQSLLIVNNATNVVIKVCEFQFCNDPFLGVYYHKNNKSWMESEFRVYSSANNCTFEYVSQPFLMDLEGKQGNFKNLREFVFKNIDGYFKIYSKHTPINLVRDLPQGFSALEPLVDLPIGINITRFQTLLALHRSYLTPGDSSSGWTAGAAAYYVGYLQPRTFLLKYNENGTITDAVDCALDPLSETKCTLKSFTVEKGIYQTSNFRVQPTESIVRFPNITNLCPFGEVFNATRFASVYAWNRKRISNCVADYSVLYNSASFSTFKCYGVSPTKLNDLCFTNVYADSFVIRGDEVRQIAPGQTGKIADYNYKLPDDFTGCVIAWNSNNLDSKVGGNYNYLYRLFRKSNLKPFERDISTEIYQAGSTPCNGVEGFNCYFPLQSYGFQPTNGVGYQPYRVVVLSFELLHAPATVCGPKKSTNLVKNKCVNFNFNGLTGTGVLTESNKKFLPFQQFGRDIADTTDAVRDPQTLEILDITPCSFGGVSVITPGTNTSNQVAVLYQDVNCTEVPVAIHADQLTPTWRVYSTGSNVFQTRAGCLIGAEHVNNSYECDIPIGAGICASYQTQTNSPRRARSVASQSIIAYTMSLGAENSVAYSNNSIAIPTNFAISVTTEILPVSMTKTSVDCTMYICGDSTECSNLLLQYGSFCTQLNRALTGIAVEQDKNTQEVFAQVKQIYKTPPIKDFGGFNFSQILPDPSKPSKRSFIEDLLFNKVTLADAGFIKQYGDCLGDIAARDLICAQKFNGLTVLPPLLTDEMIAQYTSALLAGTITSGWTFGAGAALQIPFAMQMAYRFNGIGVTQNVLYENQKLIANQFNSAIGKIQDSLSSTASALGKLQDVVNQNAQALNTLVKQLSSNFGAISSVLNDILSRLDKVEAEVQIDRLITGRLQSLQTYVTQQLIRAAEIRASANLAATKMSECVLGQSKRVDFCGKGYHLMSFPQSAPHGVVFLHVTYVPAQEKNFTTAPAICHDGKAHFPREGVFVSNGTHWFVTQRNFYEPQIITTDNTFVSGNCDVVIGIVNNTVYDPLQPELDSFKEELDKYFKNHTSPDVDLGDISGINASVVNIQKEIDRLNEVAKNLNESLIDLQELGKYEQYIKGGGGSDIDPYKEFGSSYQLLNFLPLDFFPDLNALVDTATALYEEELTGREHCSPHHTAIRQALVCWDELTKLIAWMSSNITSEQVRTIIVNHVNDTWGLKVRQSLWFHLSCLTFGQHTVQEFLVSFGVWIRTPAPYRPPNAPILSTLPEHTVIC

SEQ ID NO: 6655 - protein, 1365 aa, Artificial Sequence
  SARS-CoV-2/USA/CruiseA-23/2020__EPI_ISL_414482 spike protein (1-1211) WhcAg construct
MFVFLVLLPLVSSQCVNLTTRTQLPPAYTNSFTRGVYYPDKVFRSSVLHSTQDLFLPFFSNVTWFHAIHVSGTNGTKRFDNPVLPFNDGVYFASTEKSNIIRGWIFGTTLDSKTQSLLIVNNATNVVIKVCEFQFCNDPFLGVYYHKNNKSWMESEFRVYSSANNCTFEYVSQPFLMDLEVKQGNFKNLREFVFKNIDGYFKIYSKHTPINLVRDLPQGFSALEPLVDLPIGINITRFQTLLALHRSYLTPGDSSSGWTAGAAAYYVGYLQPRTFLLKYNENGTITDAVDCALDPLSETKCTLKSFTVEKGIYQTSNFRVQPTESIVRFPNITNLCPFGEVFNATRFASVYAWNRKRISNCVADYSVLYNSASFSTFKCYGVSPTKLNDLCFTNVYADSFVIRGDEVRQIAPGQTGKIADYNYKLPDDFTGCVIAWNSNNLDSKVGGNYNYLYRLFRKSNLKPFERDISTEIYQAGSTPCNGVEGFNCYFPLQSYGFQPTNGVGYQPYRVVVLSFELLHAPATVCGPKKSTNLVKNKCVNFNFNGLTGTGVLTESNKKFLPFQQFGRDIADTTDAVRDPQTLEILDITPCSFGGVSVITPGTNTSNQVAVLYQDVNCTEVPVAIHADQLTPTWRVYSTGSNVFQTRAGCLIGAEHVNNSYECDIPIGAGICASYQTQTNSPRRARSVASQSIIAYTMSLGAENSVAYSNNSIAIPTNFTISVTTEILPVSMTKTSVDCTMYICGDSTECSNLLLQYGSFCTQLNRALTGIAVEQDKNTQEVFAQVKQIYKTPPIKDFGGFNFSQILPDPSKPSKRSFIEDLLFNKVTLADAGFIKQYGDCLGDIAARDLICAQKFNGLTVLPPLLTDEMIAQYTSALLAGTITSGWTFGAGAALQIPFAMQMAYRFNGIGVTQNVLYENQKLIANQFNSAIGKIQDSLSSTASALGKLQDVVNQNAQALNTLVKQLSSNFGAISSVLNDILSRLDKVEAEVQIDRLITGRLQSLQTYVTQQLIRAAEIRASANLAATKMSECVLGQSKRVDFCGKGYHLMSFPQSAPHGVVFLHVTYVPAQEKNFTTAPAICHDGKAHFPREGVFVSNGTHWFVTQRNFYEPQIITTDNTFVSGNCDVVIGIVNNTVYDPLQPELDSFKEELDKYFKNHTSPDVDLGDISGINASVVNIQKEIDRLNEVAKNLNESLIDLQELGKYEQYIKGGGGSDIDPYKEFGSSYQLLNFLPLDFFPDLNALVDTATALYEEELTGREHCSPHHTAIRQALVCWDELTKLIAWMSSNITSEQVRTIIVNHVNDTWGLKVRQSLWFHLSCLTFGQHTVQEFLVSFGVWIRTPAPYRPPNAPILSTLPEHTVIC

SEQ ID NO: 6656 - protein, 1365 aa, Artificial Sequence
  SARS-CoV-2/Hong Kong/case85_VM20002868/2020__EPI_ISL_414519 spike protein (1-1211) WhcAg construct
MFVFLVLVPLVSSQCVNLTTRTQLPPAYTNSFTRGVYYPDKVFRSSVLHSTQDLFLPFFSNVTWFHAIHVSGTNGTKRFDNPVLPFNDGVYFASTEKSNIIRGWIFGTTLDSKTQSLLIVNNATNVVIKVCEFQFCNDPFLGVYYHKNNKSWMESEFRVYSSANNCTFEYVSQPFLMDLEGKQGNFKNLREFVFKNIDGYFKIYSKHTPINLVRDLPQGFSALEPLVDLPIGINITRFQTLLALHRSYLTPGDSSSGWTAGAAAYYVGYLQPRTFLLKYNENGTITDAVDCALDPLSETKCTLKSFTVEKGIYQTSNFRVQPTESIVRFPNITNLCPFGEVFNATRFASVYAWNRKRISNCVADYSVLYNSASFSTFKCYGVSPTKLNDLCFTNVYADSFVIRGDEVRQIAPGQTGKIADYNYKLPDDFTGCVIAWNSNNLDSKVGGNYNYLYRLFRKSNLKPFERDISTEIYQAGSTPCNGVEGFNCYFPLQSYGFQPTNGVGYQPYRVVVLSFELLHAPATVCGPKKSTNLVKNKCVNFNFNGLTGTGVLTESNKKFLPFQQFGRDIADTTDAVRDPQTLEILDITPCSFGGVSVITPGTNTSNQVAVLYQDVNCTEVPVAIHADQLTPTWRVYSTGSNVFQTRAGCLIGAEHVNNSYECDIPIGAGICASYQTQTNSPRRARSVASQSIIAYTMSLGAENSVAYSNNSIAIPTNFTISVTTEILPVSMTKTSVDCTMYICGDSTECSNLLLQYGSFCTQLNRALTGIAVEQDKNTQEVFAQVKQIYKTPPIKDFGGFNFSQILPDPSKPSKRSFIEDLLFNKVTLADAGFIKQYGDCLGDIAARDLICAQKFNGLTVLPPLLTDEMIAQYTSALLAGTITSGWTFGAGAALQIPFAMQMAYRFNGIGVTQNVLYENQKLIANQFNSAIGKIQDSLSSTASALGKLQDVVNQNAQALNTLVKQLSSNFGAISSVLNDILSRLDKVEAEVQIDRLITGRLQSLQTYVTQQLIRAAEIRASANLAATKMSECVLGQSKRVDFCGKGYHLMSFPQSAPHGVVFLHVTYVPAQEKNFTTAPAICHDGKAHFPREGVFVSNGTHWFVTQRNFYEPQIITTDNTFVSGNCDVVIGIVNNTVYDPLQPELDSFKEELDKYFKNHTSPDVDLGDISGINASVVNIQKEIDRLNEVAKNLNESLIDLQELGKYEQYIKGGGGSDIDPYKEFGSSYQLLNFLPLDFFPDLNALVDTATALYEEELTGREHCSPHHTAIRQALVCWDELTKLIAWMSSNITSEQVRTIIVNHVNDTWGLKVRQSLWFHLSCLTFGQHTVQEFLVSFGVWIRTPAPYRPPNAPILSTLPEHTVIC

SEQ ID NO: 6657 - protein, 1365 aa, Artificial Sequence; identical to SEQ ID NO: 6647
  SARS-CoV-2/England/200990660/2020__EPI_ISL_414523 spike protein (1-1211) WhcAg construct

SEQ ID NO: 6658 - protein, 1365 aa, Artificial Sequence
  SARS-CoV-2/Australia/NSW09/2020__EPI_ISL_413595 spike protein (1-1211) WhcAg construct
MFVFLVLLPLVSSQCVNLTTRTQLPPAYTNSFTRGVYYPDKVFRSSVLHSTQDLFLPFFSNVTWFHAIHVSGTNGTKRFDNPVLPFNDGVYFASTEKSNIIRGWIFGTTLDSKTQSLLIVNNATNVVIKVCEFQFCNDPFLGVYYHKNNKSWMESEFRVYSSANNCTFEYVSQPFLMDLEGKQGNFKNLREFVFKNIDGYFKIYSKHTPINLVRDLPQGFSALEPLVDLPIGINITRFQTLLALHRSYLTPGDSSSGWTAGAAAYYVGYLQPRTFLLKYNENGTITDAVDCALDPLSETKCTLKSFTVEKGIYQTSNFRVQPTESIVRFPNITNLCPFGEVFNATRFASVYAWNRKRISNCVADYSVLYNSASFSTFKCYGVSPTKLNDLCFTNVYADSFVIRGDEVRQIAPGQTGKIADYNYKLPDDFTGCVIAWNSNNLDSKVGGNYNYLYRLFRKSNLKPFERDISTEIYQAGSTPCNGVEGFNCYFPLQSYGFQPTNGVGYQPYRVVVLSFELLHAPATVCGPKKSTNLVKNKCVNFNFNGLTGTGVLTESNKKFLPFQQFGRDIADTTDAVRDPQTLEILDITPCSFGGVSVITPGTNTSNQVAVLYQDVNCTEVPVAIHADQLTPTWRVYSTGSNVFQTRAGCLIGAEHVNNSYECDIPIGAGICASYQTQTNSPRRARSVASQSIIAYTMSLGAENSVAYSNNSIAIPTNFTISVTTEILPVSMTKTSVDCTMYICGDSTECSNLLLQYGSFCTQLNRALTGIAVEQDKNTQEVFAQVKQIYKTPPIKDFGGFNFSQILPDPSKPSKRSFIEDLLFNKVTLADAGFIKQYGDCLGDIAARDLICAQKFNGLTVLPPLLTDEMIAQYTSALLAGTITSGWTFGAGAALQIPFAMQMAYRFNGIGVTQNVLYENQKLIANQFNSAIGKIQDSLSFTASALGKLQDVVNQNAQALNTLVKQLSSNFGAISSVLNDILSRLDKVEAEVQIDRLITGRLQSLQTYVTQQLIRAAEIRASANLAATKMSECVLGQSKRVDFCGKGYHLMSFPQSAPHGVVFLHVTYVPAQEKNFTTAPAICHDGKAHFPREGVFVSNGTHWFVTQRNFYEPQIITTDNTFVSGNCDVVIGIVNNTVYDPLQPELDSFKEELDKYFKNHTSPDVDLGDISGINASVVNIQKEIDRLNEVAKNLNESLIDLQELGKYEQYIKGGGGSDIDPYKEFGSSYQLLNFLPLDFFPDLNALVDTATALYEEELTGREHCSPHHTAIRQALVCWDELTKLIAWMSSNITSEQVRTIIVNHVNDTWGLKVRQSLWFHLSCLTFGQHTVQEFLVSFGVWIRTPAPYRPPNAPILSTLPEHTVIC

SEQ ID NO: 6659 - protein, 1365 aa, Artificial Sequence; identical to SEQ ID NO: 6639
  SARS-CoV-2/Australia/NSW10/2020__EPI_ISL_413596 spike protein (1-1211) WhcAg construct

SEQ ID NO: 6660 - protein, 1365 aa, Artificial Sequence
  SARS-CoV-2/Switzerland/1000477797/2020__EPI_ISL_413023 spike protein (1-1211) WhcAg construct
MFVFLVLLPLVSSQCVNLTTRTQLPPAYTNSFTRGVYYPDKVFRSSVLHSTQDLFLPFFSNVTWFHAIHVSGTNGTKRFDNPVLPFNDGVYFASTEKSNIIRGWIFGTTLDSKTQSLLIVNNATNVVIKVCEFQFCNDPFLGVYYHKNNKSWMESEFRVYSSANNCTFEYVSQPFLMDLEGKQGNFKNLREFVFKNIDGYFNIYSKHTPINLVRDLPQGFSALEPLVDLPIGINITRFQTLLALHRSYLTPGDSSSGWTAGAAAYYVGYLQPRTFLLKYNENGTITDAVDCALDPLSETKCTLKSFTVEKGIYQTSNFRVQPTESIVRFPNITNLCPFGEVFNATRFASVYAWNRKRISNCVADYSVLYNSASFSTFKCYGVSPTKLNDLCFTNVYADSFVIRGDEVRQIAPGQTGKIADYNYKLPDDFTGCVIAWNSNNLDSKVGGNYNYLYRLFRKSNLKPFERDISTEIYQAGSTPCNGVEGFNCYFPLQSYGFQPTNGVGYQPYRVVVLSFELLHAPATVCGPKKSTNLVKNKCVNFNFNGLTGTGVLTESNKKFLPFQQFGRDIADTTDAVRDPQTLEILDITPCSFGGVSVITPGTNTSNQVAVLYQGVNCTEVPVAIHADQLTPTWRVYSTGSNVFQTRAGCLIGAEHVNNSYECDIPIGAGICASYQTQTNSPRRARSVASQSIIAYTMSLGAENSVAYSNNSIAIPTNFTISVTTEILPVSMTKTSVDCTMYICGDSTECSNLLLQYGSFCTQLNRALTGIAVEQDKNTQEVFAQVKQIYKTPPIKDFGGFNFSQILPDPSKPSKRSFIEDLLFNKVTLADAGFIKQYGDCLGDIAARDLICAQKFNGLTVLPPLLTDEMIAQYTSALLAGTITSGWTFGAGAALQIPFAMQMAYRFNGIGVTQNVLYENQKLIANQFNSAIGKIQDSLSSTASALGKLQDVVNQNAQALNTLVKQLSSNFGAISSVLNDILSRLDKVEAEVQIDRLITGRLQSLQTYVTQQLIRAAEIRASANLAATKMSECVLGQSKRVDFCGKGYHLMSFPQSAPHGVVFLHVTYVPAQEKNFTTAPAICHDGKAHFPREGVFVSNGTHWFVTQRNFYEPQIITTDNTFVSGNCDVVIGIVNNTVYDPLQPELDSFKEELDKYFKNHTSPDVDLGDISGINASVVNIQKEIDRLNEVAKNLNESLIDLQELGKYEQYIKGGGGSDIDPYKEFGSSYQLLNFLPLDFFPDLNALVDTATALYEEELTGREHCSPHHTAIRQALVCWDELTKLIAWMSSNITSEQVRTIIVNHVNDTWGLKVRQSLWFHLSCLTFGQHTVQEFLVSFGVWIRTPAPYRPPNAPILSTLPEHTVIC

SEQ ID NO: 6661 - protein, 1365 aa, Artificial Sequence
  SARS-CoV-2/Belgium/BA-02291/2020__EPI_ISL_415159 spike protein (1-1211) WhcAg construct
MFVFLVLLPLVSSQCVNLTTRTQLPPAYTNSFTRGVYYPDKVFRSSVLHSTQDLFLPFFSNVTWFHAIHVSGTNGTKRFDNPVLPFNDGVYFASTEKSNIIRGWIFGTTLDSKTQSLLIVNNATNVVIKVCEFQFCNDPFLGVYYHKNNKSWMESEFRVYSSANNCTFEYVSQPFLMDLEGKQGNFKNLREFVFKNIDGYFKIYSKHTPINLVRDLPQGFSALEPLVDLPIGINITRFQTLLALHRSYLTPGDSSSGWTAGAAAYYVGYLQPRTFLLKYNENGTITDAVDCALDPLSETKCTLKSFTVEKGIYQTSNFRVQPTESIVRFPNITNLCPFGEVFNATRFASVYAWNRKRISNCVADYSVLYNSASFSTFKCYGVSPTKLNDLCFTNVYADSFVIRGDEVRQIAPGQTGKIADYNYKLPDDFTGCVIAWNSNNLDSKVGGNYNYLYRLFRRSNLKPFERDISTEIYQAGSTPCNGVEGFNCYFPLQSYGFQPTNGVGYQPYRVVVLSFELLPAPATVCGPKKSTNLVKNKCVNFNFNGLTGTGVLTESNKKFLPFQQFGRDIADTTDAVRDPQTLEILDITPCSFGGVSVITPGTNTSNQVAVLYQGVNCTEVPVAIHADQLTPTWRVYSTGSNVFQTRAGCLIGAEHVNNSYECDIPIGAGICASYQTQTNSPRRARSVASQSIIAYTMSLGAENSVAYSNNSIAIPTNFTISVTTEILPVSMTKTSVDCTMYICGDSTECSNLLLQYGSFCTQLNRALTGIAVEQDKNTQEVFAQVKQIYKTPPIKDFGGFNFSQILPDPSKPSKRSFIEDLLFNKVTLADAGFIKQYGDCLGDIAARDLICAQKFNGLTVLPPLLTDEMIAQYTSALLAGTITSGWTFGAGAALQIPFAMQMAYRFNGIGVTQNVLYENQKLIANQFNSAIGKIQDSLSSAAPALGKLQDVVNQNAQALNTLVKQLSSNFGAISSVLNDILSRLDKVEAEVQIDRLITGRLQSLQTYVTQQLIRAAEIRASANLAATKMSECVLGQSKRVDFCGKGYHLMSFPQSAPHGVVFLHVTYVPAQEKNFTTAPAICHDGKAHFPREGVFVSNGTHWFVTQRNFYEPQIITTDNTFVSGNCDVVIGIVNNTVYDPLQPELDSFKEELDKYFKNHTSPDVDLGDISGINASVVNIQKEIDRLNEVAKNLNESLIDLQELGKYEQYIKGGGGSDIDPYKEFGSSYQLLNFLPLDFFPDLNALVDTATALYEEELTGREHCSPHHTAIRQALVCWDELTKLIAWMSSNITSEQVRTIIVNHVNDTWGLKVRQSLWFHLSCLTFGQHTVQEFLVSFGVWIRTPAPYRPPNAPILSTLPEHTVIC

SEQ ID NO: 6662 - protein, 1365 aa, Artificial Sequence
  SARS-CoV-2/USA/WA8-UW5/2020__EPI_ISL_413486 spike protein (1-1211) WhcAg construct
MFVFLVLLPLVSSQCVNLTTRTQLPPAYTNSFTRGVYYPDKVFRSSVLHSTQDLFLPFFSNVTWFHAIHVSGTNGTKRFDNPVLPFNDGVYFASTEKSNIIRGWIFGTTLDSKTQSLLIVNNATNVVIKVCEFQFCNDPFLGVYYHKNNKSWMESEFRVYSSANNCTFEYVSQPFLMDLEGKQGNFKNLREFVFKNIDGYFKIYSKHTPINLVRDLPQGFSALEPLVDLPIGINITRFQTLLALHRSYLTPGDSSSGWTAGAAAYYVGYLQPRTFLLKYNENGTITDAVDCALDPLSETKCTLKSFTVEKGIYQTSNFRVQPTESIVRFPNITNLCPFGEVFNATRFASVYAWNRKRISNCVADYSVLYNSASFSTFKCYGVSPTKLNDLCFTNVYADSFVIRGDEVRQIAPGQTGKIADYNYKLPDDFTGCVIAWNSNNLDSKVGGNYNYLYRLFRKSNLKPFERDISTEIYQAGSTPCNGVEGFNCYFPLQSYGFQPTNGVGYQPYRVVVLSFELLHAPATVCGPKKSTNLVKNKCVNFNFNGLTGTGVLTESNKKFLPFQQFGRDIADTTDAVRDPQTLEILDITPCSFGGVSVITPGTNTSNQVAVLYQDVNCTEVPVAIHADQLTPTWRVYSTGSNVFQTRAGCLIGAEYVNNSYECDIPIGAGICASYQTQTNSPRRARSVASQSIIAYTMSLGAENSVAYSNNSIAIPTNFTISVTTEILPVSMTKTSVDCTMYICGDSTECSNLLLQYGSFCTQLNRALTGIAVEQDKNTQEVFAQVKQIYKTPPIKDFGGFNFSQILPDPSKPSKRSFIEDLLFNKVTLADAGFIKQYGDCLGDIAARDLICAQKFNGLTVLPPLLTDEMIAQYTSALLAGTITSGWTFGAGAALQIPFAMQMAYRFNGIGVTQNVLYENQKLIANQFNSAIGKIQDSLSSTASALGKLQDVVNQNAQALNTLVKQLSSNFGAISSVLNDILSRLDKVEAEVQIDRLITGRLQSLQTYVTQQLIRAAEIRASANLAATKMSECVLGQSKRVDFCGKGYHLMSFPQSAPHGVVFLHVTYVPAQEKNFTTAPAICHDGKAHFPREGVFVSNGTHWFVTQRNFYEPQIITTDNTFVSGNCDVVIGIVNNTVYDPLQPELDSFKEELDKYFKNHTSPDVDLGDISGINASVVNIQKEIDRLNEVAKNLNESLIDLQELGKYEQYIKGGGGSDIDPYKEFGSSYQLLNFLPLDFFPDLNALVDTATALYEEELTGREHCSPHHTAIRQALVCWDELTKLIAWMSSNITSEQVRTIIVNHVNDTWGLKVRQSLWFHLSCLTFGQHTVQEFLVSFGVWIRTPAPYRPPNAPILSTLPEHTVIC

SEQ ID NO: 6663 - protein, 1365 aa, Artificial Sequence
  SARS-CoV-2/England/20102000506/2020__EPI_ISL_415147 spike protein (1-1211) WhcAg construct
MFVFLVLLPLVSSQCVNLTTRTQLPPAYTNSFTRGVYYPDKVFRSSVLHSTQDLFLPFFSNVTWFHAIHVSGTNGTKRFDNPVLPFNDGVYFASTEKSNIIRGWIFGTTLDSKTQSLLIVNNATNVVIKVCEFQFCNDPFLGVYYHKNNKSWMESEFRVYSSANNCTFEYVSQPFLMDLEGKQGNFKNLREFVFKNIDGYFKIYSKHTPINLVRDLPQGFSALEPLVDLPIGINITRFQTLLALHRSYLTPGDSSSGWTAGAAAYYVGYLQPRTFLLKYNENGTITDAVDCALDPLSETKCTLKSFTVEKGIYQTSNFRVQPTESIVRFPNITNLCPFGEVFNATRFASVYAWNRKRISNCVADYSVLYNSASFSTFKCYGVSPTKLNDLCFTNVYADSFVIRGDEVRQIAPGQTGKIADYNYKLPDDFTGCVIAWNSNNLDSKVGGNYNYLYRLFRKSNLKPFERDISTEIYQAGSTPCNGVEGFNCYFPLQSYGFQPTNGVGYQPYRVVVLSFELLHAPATVCGPKKSTNLVKNKCVNFNFNGLTGTGVLTESNKKFLPFQQFGRDIADTTDAVRDPQTLEILDITPCSFGGVSVITPGTNTSNQVAVLYQGVNCTEVPVAIHADQLTPTWRVYSTGSNVFQTRAGCLIGAEHVNNSYECDIPIGAGICASYQTQTNSPRRARSVASQSIIAYTMSLGAENSVAYSNNSIAIPTNFTISVTTEILPVSMTKTSVDCTMYICGDSTECSNLLLQYGSFCTQLNRALTGIAVEQDKNTQEVFAQVKQIYKTPPIKDFGGFNFSQILPDPSKPSKRSFIEDLLFNKVTLADAGFIKQYGYCLGDIAARDLICAQKFNGLTVLPPLLTDEMIAQYTSALLAGTITSGWTFGAGAALQIPFAMQMAYRFNGIGVTQNVLYENQKLIANQFNSAIGKIQDSLSSTASALGKLQDVVNQNAQALNTLVKQLSSNFGAISSVLNDILSRLDKVEAEVQIDRLITGRLQSLQTYVTQQLIRAAEIRASANLAATKMSECVLGQSKRVDFCGKGYHLMSFPQSAPHGVVFLHVTYVPAQEKNFTTAPAICHDGKAHFPREGVFVSNGTHWFVTQRNFYEPQIITTDNTFVSGNCDVVIGIVNNTVYDPLQPELDSFKEELDKYFKNHTSPDVDLGDISGINASVVNIQKEIDRLNEVAKNLNESLIDLQELGKYEQYIKGGGGSDIDPYKEFGSSYQLLNFLPLDFFPDLNALVDTATALYEEELTGREHCSPHHTAIRQALVCWDELTKLIAWMSSNITSEQVRTIIVNHVNDTWGLKVRQSLWFHLSCLTFGQHTVQEFLVSFGVWIRTPAPYRPPNAPILSTLPEHTVIC

SEQ ID NO: 6664 - protein, 1365 aa, Artificial Sequence
  SARS-CoV-2/Belgium/VAG-03013/2020__EPI_ISL_415155 spike protein (1-1211) WhcAg construct
MFVFLVLLPLVSSQCVNLTTRTQLPPAYTNSFTRGVYYPDKVFRSSVLHSTQDLFLPFFSNVTWFHAIHVSGTNGTKRFDNPVLPFNDGVYFASTEKSNIIRGWIFGTTLDSKTQSLLIVNNATNVVIKVCEFQFCNDPFLGVYYHKNNKSWMESEFRVYSSANNCTFEYVSQPFLMDLEGKQGNFKNLREFVFKNIDGYFKIYSKHTPINLVRDLPQGFSALEPLVDLPIGINITRFQTLLALHRSYLTPGDSSSGWTAGAAAYYVGYLQPRTFLLKYNENGTITDAVDCALDPLSETKCTLKSFTVEKGIYQTSNFRVQPTESIVRFPNITNLCPFGEVFNATRFASVYAWNRKRISNCVADYSVLYNSASFSTFKCYGVSPTKLNDLCFTNVYADSFVIRGDEVRQIAPGQTGKIADYNYKLPDDFTGCVIAWNSNNLDSKVGGNYNYLYRLFRKSNLKPFERDISTEIYQAGSTPCNGVEGFNCYFPLQSYGFQPTNGVGYQPYRVVVLSFELLHAPATVCGPKKSTNLVKNKCVNFNFNGLTGTGVLTESNKKFLPFQQFGRDIADTTDAVRDPQTLEILDITPCSFGGVSVITPGTNTSNQVAVLYQGVNCTEVPVAIHADQLTPTWRVYSTGSNVFQTRAGCLIGAEHVNNSYECDIPIGAGICASYQTQTNSPRRARSVASQSIIAYTMSLGAENSVAYSNNSIAIPTNFTISVTTEILPVSMTKTSVDCTMYICGDSTECSNLLLQYGSFCTQLNRALTGIAVEQDKNTQEVFAQVKQIYKTPPIKDFGGFNFSQILPDPSKPSKRSFIEDLLFNKVTLADAGFIKQYGDCLGDIAARDLICAQKFNGLTVLPPLLTDEMIAQYTSALLAGTITSGWTFGAGAALQIPFAMQMAYRFNGIGVTQNVLYENQKLIANQFNSAIGKIQDSLSSTATALGKLQDVVNQNAQALNTLVKQLSSNFGAISSVLNDILSRLDKVEAEVQIDRLITGRLQSLQTYVTQQLIRAAEIRASANLAATKMSECVLGQSKRVDFCGKGYHLMSFPQSAPHGVVFLHVTYVPAQEKNFTTAPAICHDGKAHFPREGVFVSNGTHWFVTQRNFYEPQIITTDNTFVSGNCDVVIGIVNNTVYDPLQPELDSFKEELDKYFKNHTSPDVDLGDISGINASVVNIQKEIDRLNEVAKNLNESLIDLQELGKYEQYIKGGGGSDIDPYKEFGSSYQLLNFLPLDFFPDLNALVDTATALYEEELTGREHCSPHHTAIRQALVCWDELTKLIAWMSSNITSEQVRTIIVNHVNDTWGLKVRQSLWFHLSCLTFGQHTVQEFLVSFGVWIRTPAPYRPPNAPILSTLPEHTVIC

SEQ ID NO: 6665 - protein, 1365 aa, Artificial Sequence
  SARS-CoV-2/Belgium/BC-03016/2020__EPI_ISL_415157 spike protein (1-1211) WhcAg construct
MFVFLVLLPLVSSQCVNLTTRTQLPPAYTNSFTRGVYYPDKVFRSSVLHSTQDLFLPFFSNVTWFHAIHVSGTNGTKRFDNPVLPFNDGVYFASTEKSNIIRGWIFGTTLDSKTQSLLIVNNATNVVIKVCEFQFCNDPFLGVYYHKNNKSWMESEFRVYSSANNCTFEYVSQPFLMDLEGKQGNFKNLREFVFKNIDGYFKIYSKHTPINLVRDLPQGFSALEPLVDLPIGINITRFQTLLALHRSYLTPGDSSSGWTAGAAAYYVGYLQPRTFLLKYNENGTITDAVDCALDPLSETKCTLKSFTVEKGIYQTSNFRVQPTESIVRFPNITNLCPFGEVFNATRFASVYAWNRKRISNCVADYSVLYNSASFSTFKCYGVSPTKLNDLCFTNVYADSFVIRGDEVRQIAPGQTGKIADYNYKLPDDFTGCVIAWNSNNLDSKVGGNYNYLYRLFRKSNLKPFERDISTEIYQAGSTPCNGVEGFNCYFPLQSYGFQPTNGVGYQPYRVVVLSFELLHAPATVCGPKKSTNLVKNKCVNFNFNGLTGTGVLTESNKKFLPFQQFGRDIADTTDAVRDPQTLEILDITPCSFGGVSVITPGTNTSNQVAVLYQGVNCTEVPVAIHADQLTPTWRVYSTGSNVFQTRAGCLIGAEHVNNSYECDIPIGAGICASYQTQTNSPRRARSVASQSIIAYTMSLGAENSVAYSNNSIAIPTNFTISVTTEILPVSMTKTSVDCTMYICGDSTECSNLLLQYGSFCTQLNRALTGIAVEQDKNTQEVFAQVKQIYKTPPIKDFGGFNFSQILPDPSKPSKRSFIEDLLFNKVTLADAGFIKQYGDCLGDIAARDLICAQKFNGLTVLPPLLTDEMIAQYTSALLAGTITSGWTFGAGAALQIPFAMQMAYRFNGIGVTQNVLYENQKLIANQFNSAIGKIQDSLSSTAPALGKLQDVVNQNAQALNTLVKQLSSNFGAISSVLNDILSRLDKVEAEVQIDRLITGRLQSLQTYVTQQLIRAAEIRASANLAATKMSECVLGQSKRVDFCGKGYHLMSFPQSAPHGVVFLHVTYVPAQEKNFTTAPAICHDGKAHFPREGVFVSNGTHWFVTQRNFYEPQIITTDNTFVSGNCDVVIGIVNNTVYDPLQPELDSFKEELDKYFKNHTSPDVDLGDISGINASVVNIQKEIDRLNEVAKNLNESLIDLQELGKYEQYIKGGGGSDIDPYKEFGSSYQLLNFLPLDFFPDLNALVDTATALYEEELTGREHCSPHHTAIRQALVCWDELTKLIAWMSSNITSEQVRTIIVNHVNDTWGLKVRQSLWFHLSCLTFGQHTVQEFLVSFGVWIRTPAPYRPPNAPILSTLPEHTVIC

SEQ ID NO: 6666 - protein, 1365 aa, Artificial Sequence
  SARS-CoV-2/Germany/BavPat3/2020__EPI_ISL_414521 spike protein (1-1211) WhcAg construct
MFVFLVLLPLVSSQCVNLTTRTQLPPAYTNSFTRGVYYPDKVFRSSVLHSTQDLFLPFFSNVTWFHAIHVSGTNGTKRFDNPVLPFNDGVYFASTEKSNIIRGWIFGTTLDSKTQSLLIVNNATNVVIKVCEFQFCNDPFLGVYYHKNNKSWMESEFRVYSSANNCTFEYVSQPFLMDLEGKQGNFKNLREFVFKNIDGYFKIYSKHTPINLVRDLPQGFSALEPLVDLPIGINITRFQTLLALHRSYLTPGDSSSGWTAGAAAYYVGYLQPRTFLLKYNENGTITDAVDCALDPLSETKCTLKSFTVEKGIYQTSNFRVQPTESIVRFPNITNLCPFGEVFNATRFASVYAWNRKRISNCVADYSVLYNSASFSTFKCYGVSPTKLNDLCFTNVYADSFVIRGDEVRQIAPGQTGKIADYNYKLPDDFTGCVIAWNSNNLDSKVGGNYNYLYRLFRKSNLKPFERDISTEIYQAGSTPCNGVEGFNCYFPLQSYGFQPTNGVGYQPYRVVVLSFELLHAPATVCGPKKSTNLVKNKCVNFNFNGLTGTGVLTESNKKFLPFQQFGRDIADTTDAVRDPQTLEILDITPCSFGGVSVITPGTNTSNQVAVLYQDVNCTEVPVAIHADQLTPTWRVYSTGSNVFQTRAGCLIGAEHVNNSYECDIPIGAGICASYQTQTNSPRRARSVASQSIIAYTMSLGAENSVAYSNNSIAIPTNFTISVTTEILPVSMTKTSVDCTMYICGDSTECSNLLLQYGSFCTQLNRALTGIAVEQDKNTQQVFAQVKQIYKTPPIKDFGGFNFSQILPDPSKPSKRSFIEDLLFNKVTLADAGFIKQYGDCLGDIAARDLICAQKFNGLTVLPPLLTDEMIAQYTSALLAGTITSGWTFGAGAALQIPFAMQMAYRFNGIGVTQNVLYENQKLIANQFNSAIGKIQDSLSSTASALGKLQDVVNQNAQALNTLVKQLSSNFGAISSVLNDILSRLDKVEAEVQIDRLITGRLQSLQTYVTQQLIRAAEIRASANLAATKMSECVLGQSKRVDFCGKGYHLMSFPQSAPHGVVFLHVTYVPAQEKNFTTAPAICHDGKAHFPREGVFVSNGTHWFVTQRNFYEPQIITTDNTFVSGNCDVVIGIVNNTVYDPLQPELDSFKEELDKYFKNHTSPDVDLGDISGINASVVNIQKEIDRLNEVAKNLNESLIDLQELGKYEQYIKGGGGSDIDPYKEFGSSYQLLNFLPLDFFPDLNALVDTATALYEEELTGREHCSPHHTAIRQALVCWDELTKLIAWMSSNITSEQVRTIIVNHVNDTWGLKVRQSLWFHLSCLTFGQHTVQEFLVSFGVWIRTPAPYRPPNAPILSTLPEHTVIC

SEQ ID NO: 6667 - protein, 1365 aa, Artificial Sequence
  SARS-CoV-2/France/HF1805/2020__EPI_ISL_414628 spike protein (1-1211) WhcAg construct
MFVFLVLLPLVSSQCVNLTTRTQLPPAYTNSFTRGVYYPDKVFRSSVLHSTQDLFLPFFSNVTWFHAIHVSGTNGTKRFDNPVLPFNDGVYFASTEKSNIIRGWIFGTTLDSKTQSLLIVNNATNVVIKVCEFQFCNDPFLGVYYHKNNKSWMESEFRVYSSANNCTFEYVSQPFLMDLEGKQGNFKNLREFVFKNIDGYFKIYSKHTPINLVRDLPQGFSALEPLVDLPIGINITRFQTLLALHRSYLTPGDSSSGWTAGAAAYYVGYLQPRTFLLKYNENGTITDAVDCALDPLSETKCTLKSFTVEKGIYQTSNFRVQPTESIVRFPNITNLCPFGEVFNATRFASVYAWNRKRISNCVADYSVLYNSASFSTFKCYGVSPTKLNDLCFTNVYADSFVIRGDEVRQIAPGQTGKIADYNYKLPDDFTGCVIAWNSNNLDSKVGGNYNYLYRLFRKSNLKPFERDISTEIYQAGSTPCNGVEGFNCYFPLQSYGFQPTNGVGYQPYRVVVLSFELLHAPATVCGPKKSTNLVKNKCVNFNFNGLTGTGVLTESNKKFLPFQQFGRDIADTTDAVRDPQTLEILDITPCSFGGVSVITPGTNTSNQVAVLYQGVNCTEVPVAIHADQLTPTWRVYSTGSNVFQTRAGCLIGAEHVNNSYECDIPIGAGICASYQTQTNSPRRARSVASQSIIAYTMSLGAENSVAYSNNSIAIPTNFTISVTTEILPVSMTKTSVDCTMYICGDSTECSNLLLQYGSFCTQLNRALTGIAVEQDKNTQEVFAQVKQIYKTPPIKDFGGFNFSQILPDPSKPSKRSFIEDLLFNKVTLADAGFIKQYGDCLGDIAARDLICAQKFNGLTVLPPLLTDEMIAQYTSALLAGTITSGWTFGAGAALQIPFAMQMAYRFNGIGVTQNVLYENQKLIANQFNSAIGKIQDSLSSTASALGKLQDVVNQNAQALNTLVKQLSSNFGAISSVLNDILSRLDKVEAEVQIDRLITGRLQSLQTYVTQQLIRAAEIRASANLAATKMSECVLGQSKRVDFCGKGYHLMSFPQSAPHGVVFLHVTYVPAQEKNFTTAPAICHDGKAHFPREGVFVSNGTHWFVTQRNFYEPQIITTDNTFVSGNCDVVIGVVNNTVYDPLQPELDSFKEELDKYFKNHTSPDVDLGDISGINASVVNIQKEIDRLNEVAKNLNESLIDLQELGKYEQYIKGGGGSDIDPYKEFGSSYQLLNFLPLDFFPDLNALVDTATALYEEELTGREHCSPHHTAIRQALVCWDELTKLIAWMSSNITSEQVRTIIVNHVNDTWGLKVRQSLWFHLSCLTFGQHTVQEFLVSFGVWIRTPAPYRPPNAPILSTLPEHTVIC

SEQ ID NO: 6668 - protein, 1365 aa, Artificial Sequence
  SARS-CoV-2/Netherlands/ZuidHolland_9/2020__EPI_ISL_414445 spike protein (1-1211) WhcAg construct
MFVFLVLLPLVSSQCVNLTTRTQLPPAYTNSFTRGVYYPDKVFRSSVLHSTQDLFLPFFSNVTWFHAIHVSGTNGTKRFDNPVLPFNDGVYFASTEKSNIIRGWIFGTTLDSKTQSLLIVNNATNVVIKVCEFQFCNDPFLGVYYHKNNKSWMESEFRVYSSANNCTFEYVSQPFLMDLEGKQGNFKNLREFVFKNIDGYFKIYSKHTPINLVRDLPQGFSALEPLVDLPIGINITRFQTLLALHRSYLTPGDSSSGWTAGAAAYYVGYLQPRTFLLKYNENGTITDAVDCALDPLSETKCTLKSFTVEKGIYQTSNFRVQPTESIVRFPNITNLCPFGEVFNATRFASVYAWNRKRISNCVADYSVLYNSASFSTFKCYGVSPTKLNDLCFTNVYADSFVIRGDEVRQIAPGQTGKIADYNYKLPDDFTGCVIAWNSNNLDSKVGGNYNYLYRLFRKSNLKPFERDISTEIYQAGSTPCNGVEGFNCYFPLQSYGFQPTNGVGYQPYRVVVLSFELLHAPATVCGPKKSTNLVKNKCVNFNFNGLTGTGVLTESNKKFLPFQQFGRDIADTTDAVRDPQTLEILDITPCSFGGVSVITPGTNTSNQVAVLYQGVNCTEVPVAIHADQLTPTWRVYSTGSNVFQTRAGCLIGAEHVNNSYECDIPIGAGICASYQTQTNSPRRARSVASQSIIAYTMSLGAENSVAYSNNSIAIPTNFTISVTTEILPVSMTKTSVDCTMYICGDSTECSNLLLQYGSFCTQLNRALTGIAVEQDKNTQEVFAQVKQIYKTPPIKDFGGFNFSQILPDPSKPSKRSFIEDLLFNKVTLADAGFIKQYGDCLGDIAARDLICVQKFNGLTVLPPLLTDEMIAQYTSALLAGTITSGWTFGAGAALQIPFAMQMAYRFNGIGVTQNVLYENQKLIANQFNSAIGKIQDSLSSTASALGKLQDVVNQNAQALNTLVKQLSSNFGAISSVLNDILSRLDKVEAEVQIDRLITGRLQSLQTYVTQQLIRAAEIRASANLAATKMSECVLGQSKRVDFCGKGYHLMSFPQSAPHGVVFLHVTYVPAQEKNFTTAPAICHDGKAHFPREGVFVSNGTHWFVTQRNFYEPQIITTDNTFVSGNCDVVIGIVNNTVYDPLQPELDSFKEELDKYFKNHTSPDVDLGDISGINASVVNIQKEIDRLNEVAKNLNESLIDLQELGKYEQYIKGGGGSDIDPYKEFGSSYQLLNFLPLDFFPDLNALVDTATALYEEELTGREHCSPHHTAIRQALVCWDELTKLIAWMSSNITSEQVRTIIVNHVNDTWGLKVRQSLWFHLSCLTFGQHTVQEFLVSFGVWIRTPAPYRPPNAPILSTLPEHTVIC

SEQ ID NO: 6669 - protein, 1365 aa, Artificial Sequence
  SARS-CoV-2/Finland/FIN03032020A/2020__EPI_ISL_413602 spike protein (1-1211) WhcAg construct
MFVFLVLLPLVSSQCVNLTTRTQLPPAYTNSFTRGVYYPDKVFRSSVLHSTQDLFLPFFSNVTWFHAIHVSGTNGTKRFDNPVLPFNDGVYFASTEKSNIIRGWIFGTTLDSKTQSLLIVNNATNVVIKVCEFQFCNDPFLGVYYHKNNKSWMESEFRVYSSANNCTFEYVSQPFLMDLEGKQGNFKNLREFVFKNIDGYFKIYSKHTPINLVRDLPQGFSALEPLVDLPIGINITRFQTLLALHRSYLTPGDSSSGWTAGAAAYYVGYLQPRTFLLKYNENGTITDAVDCALDPLSETKCTLKSFTVEKGIYQTSNFRVQPTESIVRFPNITNLCPFGEVFNATRFASVYAWNRKRISNCVADYSVLYNSASFSTFKCYGVSPTKLNDLCFTNVYADSFVIRGDEVRQIAPGQTGKIADYNYKLPDDFTGCVISWNSNNLDSKVGGNYNYLYRLFRKSNLKPFERDISTEIYQAGSTPCNGVEGFNCYFPLQSYGFQPTNGVGYQPYRVVVLSFELLHAPATVCGPKKSTNLVKNKCVNFNFNGLTGTGVLTESNKKFLPFQQFGRDIADTTDAVRDPQTLEILDITPCSFGGVSVITPGTNTSNQVAVLYQGVNCTEVPVAIHADQLTPTWRVYSTGSNVFQTRAGCLIGAEHVNNSYECDIPIGAGICASYQTQTNSPRRARSVASQSIIAYTMSLGAENSVAYSNNSIAIPTNFTISVTTEILPVSMTKTSVDCTMYICGDSTECSNLLLQYGSFCTQLNRALTGIAVEQDKNTQEVFAQVKQIYKTPPIKDFGGFNFSQILPDPSKPSKRSFIEDLLFNKVTLADAGFIKQYGDCLGDIAARDLICAQKFNGLTVLPPLLTDEMIAQYTSALLAGTITSGWTFGAGAALQIPFAMQMAYRFNGIGVTQNVLYENQKLIANQFNSAIGKIQDSLSSTASALGKLQDVVNQNAQALNTLVKQLSSNFGAISSVLNDILSRLDKVEAEVQIDRLITGRLQSLQTYVTQQLIRAAEIRASANLAATKMSECVLGQSKRVDFCGKGYHLMSFPQSAPHGVVFLHVTYVPAQEKNFTTAPAICHDGKAHFPREGVFVSNGTHWFVTQRNFYEPQIITTDNTFVSGNCDVVIGIVNNTVYDPLQPELDSFKEELDKYFKNHTSPDVDLGDISGINASVVNIQKEIDRLNEVAKNLNESLIDLQELGKYEQYIKGGGGSDIDPYKEFGSSYQLLNFLPLDFFPDLNALVDTATALYEEELTGREHCSPHHTAIRQALVCWDELTKLIAWMSSNITSEQVRTIIVNHVNDTWGLKVRQSLWFHLSCLTFGQHTVQEFLVSFGVWIRTPAPYRPPNAPILSTLPEHTVIC

SEQ ID NO: 6670 - protein, 1365 aa, Artificial Sequence
  SARS-CoV-2/France/GE1977/2020__EPI_ISL_414632 spike protein (1-1211) WhcAg construct
MFVFLVLLPLVSSQCVNLTTRTQLPPAYTNSFTRGVYYPDKVFRSSVLHSTQDLFLPFFSNVTWFHAIHVSGTNGTKRFDNPVLPFNDGVYFASTEKSNIIRGWIFGTTLDSKTQSLLIVNNATNVVIKVCEFQFCNDPFLGVYYHKNNKSWMESEFRVYSSANNCTFEYVSQPFLMDLEGKQGNFKNLREFVFKNIDGYFKIYSKHTPINLVRDLPQGFSALEPLVDLPIGINITRFQTLLALHRSYLTPGDSSSGWTAGAAAYYVGYLQPRTFLLKYNENGTITDAVDCALDPLSETKCTLKSFTVEKGIYQTSNFRVQPTESIVRFPNITNLCPFGEVFNATRFASVYAWNRKRISNCVADYSVLYNSASFSTFKCYGVSPTKLNDLCFTNVYADSFVIRGDEVRQIAPGQTGKIADYNYKLPDDFTGCVIAWNSNNLDSKVGGNYNYLYRLFRKSNLKPFERDISTEIYQAGSTPCNGVEGFNCYFPLQSYGFQPTNGVGYQPYRVVVLSFELLHAPATVCGPKKSTNLVKNKCVNFNFNGLTGTGVLTESNKKFLPFQQFGRDIADTTDAVRDPQTLEILDITPCSFGGVSVITPGTNTSNQVAVLYQGVNCTEVPVAIHADQLTPTWRVYSTGSNVFQTRAGCLIGAEHVNNSYECDIPIGAGICASYQTQTNSPRRARSVASQSIIAYTMSLGAENSVAYSNNSIAIPTNFTISVTTEILPVSMTKTSVDCTMYICGDSTECSNLLLQYGSFCTQLNRALTGIAVEQDKNTQEVFAQVKQIYKTPPIKDFGGFNFSQILPDPSKPSKRSFIEDLLFNKVTLADAGFIKQYGDCLGDIAARDLICAQKFNGLTVLPPLLTDEMIAQYTSALLAGTITSGWTFGAGAALQIPFAMQMAYRFNGIGVTQNVLYENQKLIANQFNSAIGKIQDSLFSTASALGKLQDVVNQNAQALNTLVKQLSSNFGAISSVLNDILSRLDKVEAEVQIDRLITGRLQSLQTYVTQQLIRAAEIRASANLAATKMSECVLGQSKRVDFCGKGYHLMSFPQSAPHGVVFLHVTYVPAQEKNFTTAPAICHDGKAHFPREGVFVSNGTHWFVTQRNFYEPQIITTDNTFVSGNCDVVIGIVNNTVYDPLQPELDSFKEELDKYFKNHTSPDVDLGDISGINASVVNIQKEIDRLNEVAKNLNESLIDLQELGKYEQYIKGGGGSDIDPYKEFGSSYQLLNFLPLDFFPDLNALVDTATALYEEELTGREHCSPHHTAIRQALVCWDELTKLIAWMSSNITSEQVRTIIVNHVNDTWGLKVRQSLWFHLSCLTFGQHTVQEFLVSFGVWIRTPAPYRPPNAPILSTLPEHTVIC

SEQ ID NO: 6671 - protein, 1365 aa, Artificial Sequence
  SARS-CoV-2/Finland/FIN-313/2020__EPI_ISL_414641 spike protein (1-1211) WhcAg construct
MFVFLVLLPLVSSQCVNLTTRTQLPPAYTNSFTRGVYYPDKVFRSSVLHSTQDLFLPFFSNVTWFHAIHVSGTNGTKRFDNPVLPFNDGVYFASTEKSNIIRGWIFGTTLDSKTQSLLIVNNATNVVIKVCEFQFCNDPFLGVYYHKNNKSWMESEFRVYSSANNCTFEYVSQPFLMDLEGKQGNFKNLREFVFKNIDGYFKIYSKHTPINLVRDLPQGFSALEPLVDLPIGINITRFKTLLALHRSYLTPGDSSSGWTAGAAAYYVGYLQPRTFLLKYNENGTITDAVDCALDPLSETKCTLKSFTVEKGIYQTSNFRVQPTESIVRFPNITNLCPFGEVFNATRFASVYAWNRKRISNCVADYSVLYNSASFSTFKCYGVSPTKLNDLCFTNVYADSFVIRGDEVRQIAPGQTGKIADYNYKLPDDFTGCVIAWNSNNLDSKVGGNYNYLYRLFRKSNLKPFERDISTEIYQAGSTPCNGVEGFNCYFPLQSYGFQPTNGVGYQPYRVVVLSFELLHAPATVCGPKKSTNLVKNKCVNFNFNGLTGTGVLTESNKKFLPFQQFGRDIADTTDAVRDPQTLEILDITPCSFGGVSVITPGTNTSNQVAVLYQGVNCTEVPVAIHADQLTPTWRVYSTGSNVFQTRAGCLIGAEHVNNSYECDIPIGAGICASYQTQTNSPRRARSVASQSIIAYTMSLGAENSVAYSNNSIAIPTNFTISVTTEILPVSMTKTSVDCTMYICGDSTECSNLLLQYGSFCTQLNRALTGIAVEQDKNTQEVFAQVKQIYKTPPIKDFGGFNFSQILPDPSKPSKRSFIEDLLFNKVTLADAGFIKQYGDCLGDIAARDLICAQKFNGLTVLPPLLTDEMIAQYTSALLAGTITSGWTFGAGAALQIPFAMQMAYRFNGIGVTQNVLYENQKLIANQFNSAIGKIQDSLSSTASALGKLQDVVNQNAQALNTLVKQLSSNFGAISSVLNDILSRLDKVEAEVQIDRLITGRLQSLQTYVTQQLIRAAEIRASANLAATKMSECVLGQSKRVDFCGKGYHLMSFPQSAPHGVVFLHVTYVPAQEKNFTTAPAICHDGKAHFPREGVFVSNGTHWFVTQRNFYEPQIITTDNTFVSGNCDVVIGIVNNTVYDPLQPELDSFKEELDKYFKNHTSPDVDLGDISGINASVVNIQKEIDRLNEVAKNLNESLIDLQELGKYEQYIKGGGGSDIDPYKEFGSSYQLLNFLPLDFFPDLNALVDTATALYEEELTGREHCSPHHTAIRQALVCWDELTKLIAWMSSNITSEQVRTIIVNHVNDTWGLKVRQSLWFHLSCLTFGQHTVQEFLVSFGVWIRTPAPYRPPNAPILSTLPEHTVIC

SEQ ID NO: 6672 - protein, 1365 aa, Artificial Sequence
  SARS-CoV-2/Netherlands/ZuidHolland_2/2020__EPI_ISL_414556 spike protein (1-1211) WhcAg construct
MFVFLVLLPLVSSQCVNLTTRTQLPPAYTNSFTRGVYYPDKVFRSSVLHSTQDLFLPFFSNVTWFHAIHVSGTNGTKRFDNPVLPFNDGVYFASTEKSNIIRGWIFGTTLDSKTQSLLIVNNATNVVIKVCEFQFCNDPFLGVYYHKNNKSWMESEFRVYSSANNCTFEYVSQPFLMDLEGKQGNFKNLREFVFKNIDGYFKIYSKHTPINLVRDLPQGFSALEPLVDLPIGINITRFQTLLALHRSYLTPGDSSSGWTAGAAAYYVGYLQPRTFLLKYNENGTITDAVDCALDPLSETKCTLKSFTVEKGIYQTSNFRVQPTESIVRFPNITNLCPFGEVFNATRFASVYAWNRKRISNCVADYSVLYNSASFSTFKCYGVSPTKLNDLCFTNVYADSFVIRGDEVRQIAPGQTGKIADYNYKLPDDFTGCVIAWNSNNLDSKVGGNYNYLYRLFRKSNLKPFERDISTEIYQAGSTPCNGVEGFNCYFPLQSYGFQPTNGVGYQPYRVVVLSFELLHAPATVCGPKKSTNLVKNKCVNFNFNGLTGTGVLTESNKKFLPFQQFGRDIADTTDAVRDPQTLEILDITPCSFGGVSVITPGTNTSNQVAVLYQGVNCTEVPVAIHADQLTPTWRVYSTGSNVFQTRAGCLIGAEHVNNSYECDIPIGAGICASYQTQTNSPRRARSVASQSIIAYTMSLGAENSVAYSNNSIAIPTNFTISVTTEILPVSMTKTSVDCTMYICGDSTECSNLLLQYGSFCTQLNRALTGIALEQDKNTQEVFAQVKQIYKTPPIKDFGGFNFSQILPDPSKPSKRSFIEDLLFNKVTLADAGFIKQYGDCLGDIAARDLICAQKFNGLTVLPPLLTDEMIAQYTSALLAGTITSGWTFGAGAALQIPFAMQMAYRFNGIGVTQNVLYENQKLIANQFNSAIGKIQDSLSSTASALGKLQDVVNQNAQALNTLVKQLSSNFGAISSVLNDILSRLDKVEAEVQIDRLITGRLQSLQTYVTQQLIRAAEIRASANLAATKMSECVLGQSKRVDFCGKGYHLMSFPQSAPHGVVFLHVTYVPAQEKNFTTAPAICHDGKAHFPREGVFVSNGTHWFVTQRNFYEPQIITTDNTFVSGNCDVVIGIVNNTVYDPLQPELDSFKEELDKYFKNHTSPDVDLGDISGINASVVNIQKEIDRLNEVAKNLNESLIDLQELGKYEQYIKGGGGSDIDPYKEFGSSYQLLNFLPLDFFPDLNALVDTATALYEEELTGREHCSPHHTAIRQALVCWDELTKLIAWMSSNITSEQVRTIIVNHVNDTWGLKVRQSLWFHLSCLTFGQHTVQEFLVSFGVWIRTPAPYRPPNAPILSTLPEHTVIC

SEQ ID NO: 6673 - protein, 1365 aa, Artificial Sequence
  SARS-CoV-2/USA/WA-UW31/2020__EPI_ISL_414618 spike protein (1-1211) WhcAg construct
MFVFLVLLPLVSSQCVNLTTRTQLPPAYTNSFTRGVYYPDKVFRSSVLHSTQDLFLPFFSNVTWFHAIHVSGTNGTKRFDNPVLPFNDGVYFASTEKSNIIRGWIFGTTLDSKTQSLLIVNNATNVVIKVCEFQFCNDPFLGVYYHKNNKSWMESEFRVYSSANNCTFEYVSQPFLMDLEGKQGNFKNLREFVFKNIDGYFKIYSKHTPINLVRDLPQGFSALEPLVDLPIGINITRFQTLLALHRSYLTPGDSSSGWTAGAAAYYVGYLQPRTFLLKYNENGTITDAVDCALDPLSETKCTLKSFTVEKGIYQTSNFRVQPTESIVRFPNITNLCPFGEVFNATRFASVYAWNRKRISNCVADYSVLYNSASFSTFKCYGVSPTKLNDLCFTNVYADSFVIRGDEVRQIAPGQTGKIADYNYKLPDDFTGCVIAWNSNNLDSKVGGNYNYLYRLFRKSNLKPFERDISTEIYQAGSTPCNGAEGFNCYFPLQSYGFQPTNGVGYQPYRVVVLSFELLHAPATVCGPKKSTNLVKNKCVNFNFNGLTGTGVLTESNKKFLPFQQFGRDIADTTDAVRDPQTLEILDITPCSFGGVSVITPGTNTSNQVAVLYQDVNCTEVPVAIHADQLTPTWRVYSTGSNVFQTRAGCLIGAEHVNNSYECDIPIGAGICASYQTQTNSPRRARSVASQSIIAYTMSLGAENSVAYSNNSIAIPTNFTISVTTEILPVSMTKTSVDCTMYICGDSTECSNLLLQYGSFCTQLNRALTGIAVEQDKNTQEVFAQVKQIYKTPPIKDFGGFNFSQILPDPSKPSKRSFIEDLLFNKVTLADAGFIKQYGDCLGDIAARDLICAQKFNGLTVLPPLLTDEMIAQYTSALLAGTITSGWTFGAGAALQIPFAMQMAYRFNGIGVTQNVLYENQKLIANQFNSAIGKIQDSLSSTASALGKLQDVVNQNAQALNTLVKQLSSNFGAISSVLNDILSRLDKVEAEVQIDRLITGRLQSLQTYVTQQLIRAAEIRASANLAATKMSECVLGQSKRVDFCGKGYHLMSFPQSAPHGVVFLHVTYVPAQEKNFTTAPAICHDGKAHFPREGVFVSNGTHWFVTQRNFYEPQIITTDNTFVSGNCDVVIGIVNNTVYDPLQPELDSFKEELDKYFKNHTSPDVDLGDISGINASVVNIQKEIDRLNEVAKNLNESLIDLQELGKYEQYIKGGGGSDIDPYKEFGSSYQLLNFLPLDFFPDLNALVDTATALYEEELTGREHCSPHHTAIRQALVCWDELTKLIAWMSSNITSEQVRTIIVNHVNDTWGLKVRQSLWFHLSCLTFGQHTVQEFLVSFGVWIRTPAPYRPPNAPILSTLPEHTVIC

SEQ ID NO: 6674 - protein, 1365 aa, Artificial Sequence
  SARS-CoV-2/South Korea/SNU01/2020__EPI_ISL_411929 spike protein (1-1211) WhcAg construct
MFVFLVLLPLVSSQCVNLTTRTQLPPAYTNSFTRGVYYPDKVFRSSVLHSTQDLFLPFFSNVTWFHAIHVSGTNGTKRFDNPVLPFNDGVYFASTEKSNIIRGWIFGTTLDSKTQSLLIVNNATNVVIKVCEFQFCNDPFLGVYYHKNNKSWMESEFRVYSSANNCTFEYVSQPFLMDLEGKQGNFKNLREFVFKNIDGYFKIYSKHTPINLVRDLPQGFWALEPLVDLPIGINITRFQTLLALHRSYLTPGDSSSGWTAGAAAYYVGYLQPRTFLLKYNENGTITDAVDCALDPLSETKCTLKSFTVEKGIYQTSNFRVQPTESIVRFPNITNLCPFGEVFNATRFASVYAWNRKRISNCVADYSVLYNSASFSTFKCYGVSPTKLNDLCFTNVYADSFVIRGDEVRQIAPGQTGKIADYNYKLPDDFTGCVIAWNSNNLDSKVGGNYNYLYRLFRKSNLKPFERDISTEIYQAGSTPCNGVEGFNCYFPLQSYGFQPTNGVGYQPYRVVVLSFELLHAPATVCGPKKSTNLVKNKCVNFNFNGLTGTGVLTESNKKFLPFQQFGRDIADTTDAVRDPQTLEILDITPCSFGGVSVITPGTNTSNQVAVLYQDVNCTEVPVAIHADQLTPTWRVYSTGSNVFQTRAGCLIGAEHVNNSYECDIPIGAGICASYQTQTNSPRRARSVASQSIIAYTMSLGAENSVAYSNNSIAIPTNFTISVTTEILPVSMTKTSVDCTMYICGDSTECSNLLLQYGSFCTQLNRALTGIAVEQDKNTQEVFAQVKQIYKTPPIKDFGGFNFSQILPDPSKPSKRSFIEDLLFNKVTLADAGFIKQYGDCLGDIAARDLICAQKFNGLTVLPPLLTDEMIAQYTSALLAGTITSGWTFGAGAALQIPFAMQMAYRFNGIGVTQNVLYENQKLIANQFNSAIGKIQDSLSSTASALGKLQDVVNQNAQALNTLVKQLSSNFGAISSVLNDILSRLDKVEAEVQIDRLITGRLQSLQTYVTQQLIRAAEIRASANLAATKMSECVLGQSKRVDFCGKGYHLMSFPQSAPHGVVFLHVTYVPAQEKNFTTAPAICHDGKAHFPREGVFVSNGTHWFVTQRNFYEPQIITTDNTFVSGNCDVVIGIVNNTVYDPLQPELDSFKEELDKYFKNHTSPDVDLGDISGINASVVNIQKEIDRLNEVAKNLNESLIDLQELGKYEQYIKGGGGSDIDPYKEFGSSYQLLNFLPLDFFPDLNALVDTATALYEEELTGREHCSPHHTAIRQALVCWDELTKLIAWMSSNITSEQVRTIIVNHVNDTWGLKVRQSLWFHLSCLTFGQHTVQEFLVSFGVWIRTPAPYRPPNAPILSTLPEHTVIC

SEQ ID NO: 6675 - protein, 1365 aa, Artificial Sequence
  SARS-CoV-2/China/WF0004/2020__EPI_ISL_413694 spike protein (1-1211) WhcAg construct
MFVFLVLLPLVSSQCVNLTTRTQLPPAYTNSFTRGVYYPDKVFRSSVLHSTQDLFLPFFSNVTWFHAIHVSGTNGTKRFDNPVLPFNDGVYFASTEKSNIIRGWIFGTTLDSKTQSLLIVNNATNVVIKVCEFQFCNDPFLGVYYHKNNKSWTESEFRVYSSANNCTFEYVSQPFLMDLEGKQGNFKNLREFVFKNIDGYFKIYSKHTPINLVRDLPQGFSALEPLVDLPIGINITRFQTLLALHRSYLTPGDSSSGWTAGAAAYYVGYLQPRTFLLKYNENGTITDAVDCALDPLSETKCTLKSFTVEKGIYQTSNFRVQPTESIVRFPNITNLCPFGEVFNATRFASVYAWNRKRISNCVADYSVLYNSASFSTFKCYGVSPTKLNDLCFTNVYADSFVIRGDEVRQIAPGQTGKIADYNYKLPDDFTGCVIAWNSNNLDSKVGGNYNYLYRLFRKSNLKPFERDISTEIYQAGSTPCNGVEGFNCYFPLQSYGFQPTNGVGYQPYRVVVLSFELLHAPATVCGPKKSTNLVKNKCVNFNFNGLTGTGVLTESNKKFLPFQQFGRDIADTTDAVRDPQTLEILDITPCSFGGVSVITPGTNTSNQVAVLYQDVNCTEVPVAIHADQLTPTWRVYSTGSNVFQTRAGCLIGAEHVNNSYECDIPIGAGICASYQTQTNSPRRARSVASQSIIAYTMSLGAENSVAYSNNSIAIPTNFTISVTTEILPVSMTKTSVDCTMYICGDSTECSNLLLQYGSFCTQLNRALTGIAVEQDKNTQEVFAQVKQIYKTPPIKDFGGFNFSQILPDPSKPSKRSFIEDLLFNKVTLADAGFIKQYGDCLGDIAARDLICAQKFNGLTVLPPLLTDEMIAQYTSALLAGTITSGWTFGAGAALQIPFAMQMAYRFNGIGVTQNVLYENQKLIANQFNSAIGKIQDSLSSTASALGKLQDVVNQNAQALNTLVKQLSSNFGAISSVLNDILSRLDKVEAEVQIDRLITGRLQSLQTYVTQQLIRAAEIRASANLAATKMSECVLGQSKRFDFCGKGYHLMSFPQSAPHGVVFLHVTYVPAQEKNFTTAPAICHDGKAHFPREGVFVSNGTHWFVTQRNFYEPQIITTDNTFVSGNCDVVIGIVNNTVYDPLQPELDSFKEELDKYFKNHTSPDVDLGDISGINASVVNIQKEIDRLNEVAKNLNESLIDLQELGKYEQYIKGGGGSDIDPYKEFGSSYQLLNFLPLDFFPDLNALVDTATALYEEELTGREHCSPHHTAIRQALVCWDELTKLIAWMSSNITSEQVRTIIVNHVNDTWGLKVRQSLWFHLSCLTFGQHTVQEFLVSFGVWIRTPAPYRPPNAPILSTLPEHTVIC

SEQ ID NO: 6676 - protein, 1365 aa, Artificial Sequence
  SARS-CoV-2/China/WF0028/2020__EPI_ISL_413791 spike protein (1-1211) WhcAg construct
MFVFLVLLPLVSSQCVNLTTRTQLPPAYTNSFTRGVYYPDKVFRSSVLHSTQDLFLPFFSNVTWFHAIHVSGTNGTKRFDNPVLPFNDGVYFASTEKSNIIRGWIFGTTLDSKTQSLLIVNNATNVVIKVCEFQFCNDPFLGVYYHKNNKSWMESEFRVYSSANNCTFEYVSQPFLMDLEGKQGNFKNLREFVFKNIDGYFKIYSKHTPINLVRDLPQGFSALEPLVDLPIGINITRFQTLLALHRSYLTPGDSSSGWTAGAAAYYVGYLQPRTFLLKYNENGTITDAVDCALDPLSETKCTLKSFTVEKGIYQTSNFRVQPTESIVRFPNITNLCPFGEVFNATRFASVYAWNRKRISNCVADYSVLYNSASFSTFKCYGVSPTKLNDLCFTNVYADSFVIRGDEVRQIAPGQTGKIADYNYKLPDDFTGCVIAWNSNNLDSKVGGNYNYLYRLFRKSNLKPFERDISTEIYQAGSTPCNGVEGFNCYFPLQSYGFQPTNGVGYQPYRVVVLSFELLHAPATVCGPKKSTNLVKNKCVNFNFNGLTGTGVLTESNKKFLPFQQFGRDIADTTDAVRDPQTLEILDITPCSFGGVSVITPGTNTSNQVAVLYQDVNCTEVPVAIHADQLTPTWRVYSTGSNVFQTRAGCLIGAEHVNNSYECDIPIGAGICASYQTQTNSPRRARSVASQSIIAYTMSLGAENSVAYSNNSIAIPTNFTISVTTEILPVSMTKTSVDCTMYICGDSTECSNLLLQYGSFCTQLNRALTGIAVEQDKNTQEVFAQVKQIYKTPPIKDFGGFNFSQILPDPSKPSKRSFIEDLLFNKVTLADAGFIKQYGDCLGDIAARDLICAQKFNGLTVLPPLLTDEMIAQYTSALLAGTITSGWTFGAGAALQIPFAMQMAYRFNGIGVTQNVLYENQKLIANQFNSAIGKIQDSLSSTASALGKLQDVVNQNAQALNTLVKQLSSNFGAISSVLNDILSRLDKVEAEVQIDRLITGRLQSLQTYVTQQLIRAAEIRASANLAATKMSECVLGQSKRVDFCGKGYHLMSFPQSAPHGVVFLHVTYVPAQEKNFTTAPAICHDGKAHFPREGVFVSNGTHWFVTQRNFYEPQIITTDNTFVSGNCDVVIGIVNNTVYDPLQPELESFKEELDKYFKNHTSPDVDLGDISGINASVVNIQKEIDRLNEVAKNLNESLIDLQELGKYEQYIKGGGGSDIDPYKEFGSSYQLLNFLPLDFFPDLNALVDTATALYEEELTGREHCSPHHTAIRQALVCWDELTKLIAWMSSNITSEQVRTIIVNHVNDTWGLKVRQSLWFHLSCLTFGQHTVQEFLVSFGVWIRTPAPYRPPNAPILSTLPEHTVIC

SEQ ID NO: 6677 - protein, 1365 aa, Artificial Sequence
  SARS-CoV-2/2019-nCoV/USA-CruiseA-18/2020__MT159716.1 spike protein (1-1211) WhcAg construct
MFVFLVLLPLVSSQCVNLTTRTQLPPAYTNSFTRGVYYPDKVFRSSVLHSTQDLFLPFFSNVTWFHAIHVSGTNGTKRFDNPVLPFNDGVYFASTEKSNIIRGWIFGTTLDSKTQSLLIVNNATNVVIKVCEFQFCNDPFLGVYYHKNNKSWMESELRVYSSANNCTFEYVSQPFLMDLEGKQGNFKNLREFVFKNIDGYFKIYSKHTPINLVRDLPQGFSALEPLVDLPIGINITRFQTLLALHRSYLTPGDSSSGWTAGAAAYYVGYLQPRTFLLKYNENGTITDAVDCALDPLSETKCTLKSFTVEKGIYQTSNFRVQPTESIVRFPNITNLCPFGEVFNATRFASVYAWNRKRISNCVADYSVLYNSASFSTFKCYGVSPTKLNDLCFTNVYADSFVIRGDEVRQIAPGQTGKIADYNYKLPDDFTGCVIAWNSNNLDSKVGGNYNYLYRLFRKSNLKPFERDISTEIYQAGSTPCNGVEGFNCYFPLQSYGFQPTNGVGYQPYRVVVLSFELLHAPATVCGPKKSTNLVKNKCVNFNFNGLTGTGVLTESNKKFLPFQQFGRDIADTTDAVRDPQTLEILDITPCSFGGVSVITPGTNTSNQVAVLYQDVNCTEVPVAIHADQLTPTWRVYSTGSNVFQTRAGCLIGAEHVNNSYECDIPIGAGICASYQTQTNSPRRARSVASQSIIAYTMSLGAENSVAYSNNSIAIPTNFTISVTTEILPVSMTKTSVDCTMYICGDSTECSNLLLQYGSFCTQLNRALTGIAVEQDKNTQEVFAQVKQIYKTPPIKDFGGFNFSQILPDPSKPSKRSFIEDLLFNKVTLADAGFIKQYGDCLGDIAARDLICAQKFNGLTVLPPLLTDEMIAQYTSALLAGTITSGWTFGAGAALQIPFAMQMAYRFNGIGVTQNVLYENQKLIANQFNSAIGKIQDSLSSTASALGKLQDVVNQNAQALNTLVKQLSSNFGAISSVLNDILSRLDKVEAEVQIDRLITGRLQSLQTYVTQQLIRAAEIRASANLAATKMSECVLGQSKRVDFCGKGYHLMSFPQSAPHGVVFLHVTYVPAQEKNFTTAPAICHDGKAHFPREGVFVSNGTHWFVTQRNFYEPQIITTDNTFVSGNCDVVIGIVNNTVYDPLQPELDSFKEELDKYFKNHTSPDVDLGDISGINASVVNIQKEIDRLNEVAKNLNESLIDLQELGKYEQYIKGGGGSDIDPYKEFGSSYQLLNFLPLDFFPDLNALVDTATALYEEELTGREHCSPHHTAIRQALVCWDELTKLIAWMSSNITSEQVRTIIVNHVNDTWGLKVRQSLWFHLSCLTFGQHTVQEFLVSFGVWIRTPAPYRPPNAPILSTLPEHTVIC

SEQ ID NO: 6678 - protein, 1365 aa, Artificial Sequence
  SARS-CoV-2/SARS-CoV-2/Yunnan-01/human/2020/CHN__MT049951.1 spike protein (1-1211) WhcAg construct
MFVFLVLLPLVSSQCVNLTTRTQLPPANTNSFTRGVYYPDKVFRSSVLHSTQDLFLPFFSNVTWFHAIHVSGTNGTKRFDNPVLPFNDGVYFASTEKSNIIRGWIFGTTLDSKTQSLLIVNNATNVVIKVCEFQFCNDPFLGVYYHKNNKSWMESEFRVYSSANNCTFEYVSQPFLMDLEGKQGNFKNLREFVFKNIDGYFKIYSKHTPINLVRDLPQGFSALEPLVDLPIGINITRFQTLLALHRSYLTPGDSSSGWTAGAAAYYVGYLQPRTFLLKYNENGTITDAVDCALDPLSETKCTLKSFTVEKGIYQTSNFRVQPTESIVRFPNITNLCPFGEVFNATRFASVYAWNRKRISNCVADYSVLYNSASFSTFKCYGVSPTKLNDLCFTNVYADSFVIRGDEVRQIAPGQTGKIADYNYKLPDDFTGCVIAWNSNNLDSKVGGNYNYLYRLFRKSNLKPFERDISTEIYQAGSTPCNGVEGFNCYFPLQSYGFQPTNGVGYQPYRVVVLSFELLHAPATVCGPKKSTNLVKNKCVNFNFNGLTGTGVLTESNKKFLPFQQFGRDIADTTDAVRDPQTLEILDITPCSFGGVSVITPGTNTSNQVAVLYQDVNCTEVPVAIHADQLTPTWRVYSTGSNVFQTRAGCLIGAEHVNNSYECDIPIGAGICASYQTQTNSPRRARSVASQSIIAYTMSLGAENSVAYSNNSIAIPTNFTISVTTEILPVSMTKTSVDCTMYICGDSTECSNLLLQYGSFCTQLNRALTGIAVEQDKNTQEVFAQVKQIYKTPPIKDFGGFNFSQILPDPSKPSKRSFIEDLLFNKVTLADAGFIKQYGDCLGDIAARDLICAQKFNGLTVLPPLLTDEMIAQYTSALLAGTITSGWTFGAGAALQIPFAMQMAYRFNGIGVTQNVLYENQKLIANQFNSAIGKIQDSLSSTASALGKLQDVVNQNAQALNTLVKQLSSNFGAISSVLNDILSRLDKVEAEVQIDRLITGRLQSLQTYVTQQLIRAAEIRASANLAATKMSECVLGQSKRVDFCGKGYHLMSFPQSAPHGVVFLHVTYVPAQEKNFTTAPAICHDGKAHFPREGVFVSNGTHWFVTQRNFYEPQIITTDNTFVSGNCDVVIGIVNNTVYDPLQPELDSFKEELDKYFKNHTSPDVDLGDISGINASVVNIQKEIDRLNEVAKNLNESLIDLQELGKYEQYIKGGGGSDIDPYKEFGSSYQLLNFLPLDFFPDLNALVDTATALYEEELTGREHCSPHHTAIRQALVCWDELTKLIAWMSSNITSEQVRTIIVNHVNDTWGLKVRQSLWFHLSCLTFGQHTVQEFLVSFGVWIRTPAPYRPPNAPILSTLPEHTVIC

SEQ ID NO: 6679 - protein, 1365 aa, Artificial Sequence
  SARS-CoV-2/USA/WA-UW292/2020__EPI_ISL_418077 spike protein (1-1211) WhcAg construct
MFVFLVLLPLVSSQCVNLTTRTQLPPAYTNSFTRGVYYPDKVFRSSVLHSTQDLFLPFFSNVTWFHAIHVSGTNGTKRFDNPVLPFNDGVYFASTEKSNIIRGWIFGTTLDSKTQSLLIVNNATNVVIKVCEFQFCNDPFLGVYYHKNNKSWMESEFRVYSSANNCTFEYVSQPFLMDLEGKQGNFKNLREFVFKNIDGYFKIYSKHTPINLVRDLPQGFSALEPLVDLPIGINITRFQTLLALHRSYLTPGDSSSGWTAGAAAYYVGYLQPRTFLLKYNENGTITDAVDCALDPLSETKCTLKSFTVEKGIYQTSNFRVQPTESIVRFPNITNLCPFGEVFNATRFASVYAWNRKRISNCVADYSVLYNSASFSTFKCYGVSPTKLNDLCFTNVYADSFVIRGDEVRQIAPGQTGKIADYNYKLPDDFTGCVIAWNSNNLDSKVGGNYNYLYRLFRKSNLKPFERDISTEIYQASSTPCNGVEGFNCYFPLQSYGFQPTNGVGYQPYRVVVLSFELLHAPATVCGPKKSTNLVKNKCVNFNFNGLTGTGVLTESNKKFLPFQQFGRDIADTTDAVRDPQTLEILDITPCSFGGVSVITPGTNTSNQVAVLYQDVNCTEVPVAIHADQLTPTWRVYSTGSNVFQTRAGCLIGAEHVNNSYECDIPIGAGICASYQTQTNSPRRARSVASQSIIAYTMSLGAENSVAYSNNSIAIPTNFTISVTTEILPVSMTKTSVDCTMYICGDSTECSNLLLQYGSFCTQLNRALTGIAVEQDKNTQEVFAQVKQIYKTPPIKDFGGFNFSQILPDPSKPSKRSFIEDLLFNKVTLADAGFIKQYGDCLGDIAARDLICAQKFNGLTVLPPLLTDEMIAQYTSALLAGTITSGWTFGAGAALQIPFAMQMAYRFNGIGVTQNVLYENQKLIANQFNSAIGKIQDSLSSTASALGKLQDVVNQNAQALNTLVKQLSSNFGAISSVLNDILSRLDKVEAEVQIDRLITGRLQSLQTYVTQQLIRAAEIRASANLAATKMSECVLGQSKRVDFCGKGYHLMSFPQSAPHGVVFLHVTYVPAQEKNFTTAPAICHDGKAHFPREGVFVSNGTHWFVTQRNFYEPQIITTDNTFVSGNCDVVIGIVNNTVYDPLQPELDSFKEELDKYFKNHTSPDVDLGDISGINASVVNIQKEIDRLNEVAKNLNESLIDLQELGKYEQYIKGGGGSDIDPYKEFGSSYQLLNFLPLDFFPDLNALVDTATALYEEELTGREHCSPHHTAIRQALVCWDELTKLIAWMSSNITSEQVRTIIVNHVNDTWGLKVRQSLWFHLSCLTFGQHTVQEFLVSFGVWIRTPAPYRPPNAPILSTLPEHTVIC

SEQ ID NO: 6680 - protein, 1365 aa, Artificial Sequence
  SARS-CoV-2/Iceland/192/2020__EPI_ISL_417819 spike protein (1-1211) WhcAg construct
MFVFFVLLPLVSSQCVNLTTRTQLPPAYTNSFTRGVYYPDKVFRSSVLHSTQDLFLPFFSNVTWFHAIHVSGTNGTKRFDNPVLPFNDGVYFASTEKSNIIRGWIFGTTLDSKTQSLLIVNNATNVVIKVCEFQFCNDPFLGVYYHKNNKSWMESEFRVYSSANNCTFEYVSQPFLMDLEGKQGNFKNLREFVFKNIDGYFKIYSKHTPINLVRDLPQGFSALEPLVDLPIGINITRFQTLLALHRSYLTPGDSSSGWTAGAAAYYVGYLQPRTFLLKYNENGTITDAVDCALDPLSETKCTLKSFTVEKGIYQTSNFRVQPTESIVRFPNITNLCPFGEVFNATRFASVYAWNRKRISNCVADYSVLYNSASFSTFKCYGVSPTKLNDLCFTNVYADSFVIRGDEVRQIAPGQTGKIADYNYKLPDDFTGCVIAWNSNNLDSKVGGNYNYLYRLFRKSNLKPFERDISTEIYQAGSTPCNGVEGFNCYFPLQSYGFQPTNGVGYQPYRVVVLSFELLHAPATVCGPKKSTNLVKNKCVNFNFNGLTGTGVLTESNKKFLPFQQFGRDIADTTDAVRDPQTLEILDITPCSFGGVSVITPGTNTSNQVAVLYQGVNCTEVPVAIHADQLTPTWRVYSTGSNVFQTRAGCLIGAEHVNNSYECDIPIGAGICASYQTQTNSPRRARSVASQSIIAYTMSLGAENSVAYSNNSIAIPTNFTISVTTEILPVSMTKTSVDCTMYICGDSTECSNLLLQYGSFCTQLNRALTGIAVEQDKNTQEVFAQVKQIYKTPPIKDFGGFNFSQILPDPSKPSKRSFIEDLLFNKVTLADAGFIKQYGDCLGDIAARDLICAQKFNGLTVLPPLLTDEMIAQYTSALLAGTITSGWTFGAGAALQIPFAMQMAYRFNGIGVTQNVLYENQKLIANQFNSAIGKIQDSLSSTASALGKLQDVVNQNAQALNTLVKQLSSNFGAISSVLNDILSRLDKVEAEVQIDRLITGRLQSLQTYVTQQLIRAAEIRASANLAATKMSECVLGQSKRVDFCGKGYHLMSFPQSAPHGVVFLHVTYVPAQEKNFTTAPAICHDGKAHFPREGVFVSNGTHWFVTQRNFYEPQIITTDNTFVSGNCDVVIGIVNNTVYDPLQPELDSFKEELDKYFKNHTSPDVDLGDISGINASVVNIQKEIDRLNEVAKNLNESLIDLQELGKYEQYIKGGGGSDIDPYKEFGSSYQLLNFLPLDFFPDLNALVDTATALYEEELTGREHCSPHHTAIRQALVCWDELTKLIAWMSSNITSEQVRTIIVNHVNDTWGLKVRQSLWFHLSCLTFGQHTVQEFLVSFGVWIRTPAPYRPPNAPILSTLPEHTVIC

SEQ ID NO: 6681 - protein, 1365 aa, Artificial Sequence
  SARS-CoV-2/Belgium/ULG-6939/2020__EPI_ISL_417020 spike protein (1-1211) WhcAg construct
MFVFLVLLPLVSSQCVNLTTRTQLPPAYTNSFTRGVYYPDKVFRSSVLHSTQDLFLPFFSNVTWFHAIHVSGTNGTKRFDNPVLPFNDGVYFASTEKSNIIRGWIFGTTLDSKTQSLLIVNNATNVVIKVCEFQFCNDPFLGVYYHKNNKSWMESEFRVYSSANNCTFEYVSQPFLMDLEGKQGNFKNLREFVFKNIDGYFKIYSKHTPINLVRDLPQGFSALEPLVDLPIGINITRFQTLLALHRSYLTPGDSSSGWTAGAAAYYVGYLQPRTFLLKYNENGTITDAVDCALDPLSETKCTLKSFTVEKGIYQTSNFRVQPTESIVRFPNITNLCPFGEVFNATRFASVYAWNRKRISNCVADYSVLYNSASFSTFKCYGVSPTKLNDLCFTNVYADSFVIRGDEVRQIAPGQTGKIADYNYKLPDDFTGCVIAWNSNNLDSKVGGNYNYLYRLFRKSNLKPFERDISTEIYQAGSTPCNGVEGFNCYFPLQSYGFQPTNGVGYQPYRVVVLSFELLHAPATVCGPKKSTNLVKNKCVNFNFNGLTGTGVLTESNKKFLPFQQFGRDIADTTDAVRDPQTLEILDITPCSFGGVSVITPGTNTSNQVAVLYQGVNCTEVPVAIHADQLTPTWRVYSTGSNVFQTRAGCLIGAEHVNNSYECDIPIGAGICASYQTQTNSPRRARSVASQSIIAYTMSLGAENSVVYSNNSIAIPTNFTISVTTEILPVSMTKTSVDCTMYICGDSTECSNLLLQYGSFCTQLNRALTGIAVEQDKNTQEVFAQVKQIYKTPPIKDFGGFNFSQILPDPSKPSKRSFIEDLLFNKVTLADAGFIKQYGDCLGDIAARDLICAQKFNGLTVLPPLLTDEMIAQYTSALLAGTITSGWTFGAGAALQIPFAMQMAYRFNGIGVTQNVLYENQKLIANQFNSAIGKIQDSLSSTASALGKLQDVVNQNAQALNTLVKQLSSNFGAISSVLNDILSRLDKVEAEVQIDRLITGRLQSLQTYVTQQLIRAAEIRASANLAATKMSECVLGQSKRVDFCGKGYHLMSFPQSAPHGVVFLHVTYVPAQEKNFTTAPAICHDGKAHFPREGVFVSNGTHWFVTQRNFYEPQIITTDNTFVSGNCDVVIGIVNNTVYDPLQPELDSFKEELDKYFKNHTSPDVDLGDISGINASVVNIQKEIDRLNEVAKNLNESLIDLQELGKYEQYIKGGGGSDIDPYKEFGSSYQLLNFLPLDFFPDLNALVDTATALYEEELTGREHCSPHHTAIRQALVCWDELTKLIAWMSSNITSEQVRTIIVNHVNDTWGLKVRQSLWFHLSCLTFGQHTVQEFLVSFGVWIRTPAPYRPPNAPILSTLPEHTVIC

SEQ ID NO: 6682 - protein, 1365 aa, Artificial Sequence
  SARS-CoV-2/France/HF2496/2020__EPI_ISL_418231 spike protein (1-1211) WhcAg construct
MFVFLVLLPLVSSQCVNLTTRTQLPPAYTNSFTRGVYYPDKVFRSSVLHSTQDLFLPFFSNVTWFHAIHVSGTNGTKRFDNPVLPFNDGVYFASTEKSNIIRGWIFGTTLDSKTQSLLIVNNATNVVIKVCEFQFCNDPFLGVYYHKNNKSWMESEFRVYSSANNCTFEYVSQPFLMDLEGKQGNFKNLREFVFKNIDGYFKIYSKHTPINLVRDLPQGFSALEPLVDLPIGINITRFQTLLALHRSYLTPGDSSSGWTAGAAAYYVGYLQPRTFLLKYNENGTITDAVDCALDPLSETKCTLKSFTVEKGIYQTSNFRVQPTESIVRFPNITNLCPFGEVFNATRFASVYAWNRKRISNCVADYSVLYNSASFSTFKCYGVSPTKLNDLCFTNVYADSFVIRGDEVRQIAPGQTGKIADYNYKLPDDFTGCVIAWNSNNLDSKVGGNYNYLYRLFRKSNLKPFERDISTEIYQAGSTPCNGVEGFNCYFPLQSYGFQPTNGVGYQPYRVVVLSFELLHAPATVCGPKKSTNLVKNKCVNFNFNGLTGTGVLTESNKKFLPFQQFGRDIADTTDAVRDPQTLEILDITPCSFGGVSVITPGTNTSNQVAVLYQGVNCTEVPVAIHADQLTPTWRVYSTGSNVFQTRAGCLIGAEHVNNSYECDIPIGAGICASYQTQTNSPRRARSVASQSIIAYTMSLGAENSVAYSNNSIAIPTNFTISVTTEILPVSMTKTSVDCTMYICGDSTECSNLLLQYGSFCTQLNRALTGIAVEQDKNTQEVFAQVKQIYKTPPIKDFGGFNFSQILPDPSKPSKRSFIEDLLFNKVTLADAGFIKQYGDCLGDIVARDLICAQKFNGLTVLPPLLTDEMIAQYTSALLAGTITSGWTFGAGAALQIPFAMQMAYRFNGIGVTQNVLYENQKLIANQFNSAIGKIQDSLSSTASALGKLQDVVNQNAQALNTLVKQLSSNFGAISSVLNDILSRLDKVEAEVQIDRLITGRLQSLQTYVTQQLIRAAEIRASANLAATKMSECVLGQSKRVDFCGKGYHLMSFPQSAPHGVVFLHVTYVPAQEKNFTTAPAICHDGKAHFPREGVFVSNGTHWFVTQRNFYEPQIITTDNTFVSGNCDVVIGIVNNTVYDPLQPELDSFKEELDKYFKNHTSPDVDLGDISGINASVVNIQKEIDRLNEVAKNLNESLIDLQELGKYEQYIKGGGGSDIDPYKEFGSSYQLLNFLPLDFFPDLNALVDTATALYEEELTGREHCSPHHTAIRQALVCWDELTKLIAWMSSNITSEQVRTIIVNHVNDTWGLKVRQSLWFHLSCLTFGQHTVQEFLVSFGVWIRTPAPYRPPNAPILSTLPEHTVIC

SEQ ID NO: 6683 - protein, 1365 aa, Artificial Sequence
  SARS-CoV-2/USA/WA-UW291/2020__EPI_ISL_418076 spike protein (1-1211) WhcAg construct
MFVFLVLLPLVSSQCVNLTTRTQLPPAYTNSFTRGVYYPDKVFRSSVLHSTQDLFLPFFSNVTWFHAIHVSGTNGTKRFDNPVLPFNDGVYFASTEKSNIIRGWIFGTTLDSKTQSLLIVNNATNVVIKVCEFQFCNDPFLGVYYHKNNKSWMESEFRVYSSANNCTFEYVSQPFLMDLEGKQGNFKNLREFVFKNIDGYFKIYSKHTPINLVRDLPQGFSALEPLVDLPIGINITRFQTLLALHRSYLTPGDSSSGWTAGAAAYYVGYLQPRTFLLKYNENGTITDAVDCALDPLSETKCTLKSFTVEKGIYQTSNFRVQPTESIVRFPNITNLCPFGEVFNATRFASVYAWNRKRISNCVADYSVLYNSASFSTFKCYGVSPTKLNDLCFTNVYADSFVIRGDEVRQIAPGQTGKIADYNYKLPDDFTGCVIAWNSNNLDSKVGGNYNYLYRLFRKSNLKPFERDISTEIYQAGSTPCNGVEGFNCYFPLQSYGFQPTNGVGYQPYRVVVLSFELLHAPATVCGPKKSTNLVKNKCVNFNFNGLTGTGVLTESNKKFLPFQQFGRDIADTTDAVRDPQTLEILDITPCSFGGVSVITPGTNTSNQVAVLYQGVNCTEVPVAIHADQLTPTWRVYSTGSNVFQTRAGCLIGAEHVNNSYECDIPIGAGICASYQTQTNSPRRARSVASQSIIAYTMSLGAENSVAYSNNSIAIPTNFTISVTTEILPVSMTKTSVDCTMYICGDSTECSNLLLQYGSFCTQLNRALTGIAVEQDKNTQEVFAQVKQIYKTPPIKDFGGFNFSQILPDPSKPSKRSFIEDLLFNKVTLADAGFIKQYGDCLGDIAARDLICAQKFNGLTVLPPLLTDEMIAQYTSALLAGTITSGWTFGAGAALQIPFAMQMAYRFNGIGVTQNVLYENQKLIANQFNSAIGKIQYSLSSTASALGKLQDVVNQNAQALNTLVKQLSSNFGAISSVLNDILSRLDKVEAEVQIDRLITGRLQSLQTYVTQQLIRAAEIRASANLAATKMSECVLGQSKRVDFCGKGYHLMSFPQSAPHGVVFLHVTYVPAQEKNFTTAPAICHDGKAHFPREGVFVSNGTHWFVTQRNFYEPQIITTDNTFVSGNCDVVIGIVNNTVYDPLQPELDSFKEELDKYFKNHTSPDVDLGDISGINASVVNIQKEIDRLNEVAKNLNESLIDLQELGKYEQYIKGGGGSDIDPYKEFGSSYQLLNFLPLDFFPDLNALVDTATALYEEELTGREHCSPHHTAIRQALVCWDELTKLIAWMSSNITSEQVRTIIVNHVNDTWGLKVRQSLWFHLSCLTFGQHTVQEFLVSFGVWIRTPAPYRPPNAPILSTLPEHTVIC

SEQ ID NO: 6684 - protein, 1365 aa, Artificial Sequence; identical to SEQ ID NO: 6647
  SARS-CoV-2/Portugal/PT0034/2020__EPI_ISL_418019 spike protein (1-1211) WhcAg construct

SEQ ID NO: 6685 - protein, 1365 aa, Artificial Sequence
  SARS-CoV-2/Iceland/202/2020__EPI_ISL_417750 spike protein (1-1211) WhcAg construct
MFVFLVLLPLVSSQCVNLTTRTQLPPAYTNSFTRGVYYPDKVFRSSVLHSTQDLFLPFFSNVTWFHAIHVSGTNGTKRFDNPVLPFNDGVYFASTEKSNIIRGWIFGTTLDSKTQSLLIVNNATNVVIKVCEFQFCNDPFLGVYYHKNNKSWMESEFRVYSSANNCTFEYVSQPFLMDLEGKQGNFKNLREFVFKNIDGYFKIYSKHTPINLVRDLPQGFSALEPLVDLPIGINITRFQTLLALHRSYLTPGDSSSGWTAGAAAYYVGYLQPRTFLLKYNENGTITDAVDCALDPLSETKCTLKSFTVEKGIYQTSNFRVQPTESIVRFPNITNLCPFGEVFNATRFASVYAWNRKRISNCVADYSVLYNSASFSTFKCYGVSPTKLNDLCFTNVYADSFVIRGDEVRQIAPGQTGKIADYNYKLPDDFTGCVIAWNSNNLDSKVGGNYNYLYRLFRKSNLKPFERDISTEIYQAGSTPCNGVEGFNCYFPLQSYGFQPTNGVGYQPYRVVVLSFELLHAPATVCGPKKSTNLVKNKCVNFNFNGLTGTGVLTESNKKFLPFQQFGRDIADTTDAVRDPQTLEILDITPCSFGGVSVITPGTNTSNQVAVLYQDVNCTEVPVAIHADQLTPTWRVYSTGSNVFQTRAGCLIGAEHVNNSYECDIPIGAGICASYQTQTNSPRRARSVASQSIIAYTMSLGAENSVAYSNNSIAIPTNFTISVTTEILPVSMTKTSVDCTMYICGDSTECSNLLLQYGSFCTQLNRALTGIAVEQDKNTQEVFAQVKQIYKTPPIKDFGGFNFSQILPDPSKPSKRSFIEDLLFNKVTLADAGFIKQYGDCLGDIAARDLICAQKFNGLTVLPPLLTDEMIAQYTSALLAGTITSGWTFGAGAALQIPFAMQMAYRFNGIGVTQNVLYENQKLIANQFNSAIGKIQDSLSSTASALGKLQDVVNQNAQALNTLVKQLSSNFGAISSVLNDILSRLDKVEAEVQIDRLITGRLQSLQTYVTQQLIRAAEIRASANLAATKMSECVLGQSKRVDFCGKGYHLMSFPQSAPHGVVFLHVTYVPAQEKNFTTAPAICHDGKAHFPREGVFVSNGTHWFVTQRNFYEPQIITTDNTFVSGNCDVVIGIVNNTVYDPLQPELDSFKEELDKYFKNHTSPDVDLGDIPGINASVVNIQKEIDRLNEVAKNLNESLIDLQELGKYEQYIKGGGGSDIDPYKEFGSSYQLLNFLPLDFFPDLNALVDTATALYEEELTGREHCSPHHTAIRQALVCWDELTKLIAWMSSNITSEQVRTIIVNHVNDTWGLKVRQSLWFHLSCLTFGQHTVQEFLVSFGVWIRTPAPYRPPNAPILSTLPEHTVIC

SEQ ID NO: 6686 - protein, 1365 aa, Artificial Sequence
  SARS-CoV-2/USA/WA-UW261/2020__EPI_ISL_418046 spike protein (1-1211) WhcAg construct
MFVFLVLLPLVSSQCVNLTTRTQLPPAYTNSFTRGVYYPDKVFRSSVLHSTQDLFLPFFSNVTWFHAIHVSGTNGTKRFDNPVLPFNDGVYFASTEKSNIIRGWIFGTTLDSKTQSLLIVNNATNVVIKVCEFQFCNDPFLGVYYHKNNKSWMESEFRVYSSANNCTFEYVSQPFLMDLEGKQGNFKNLREFVFKNIDGYFKIYSKHTPINLVRDLPQGFSALEPLVDLPIGINITRFQTLLALHRSYLTPGDSSSGWTAGAAAYYVGYLQPRTFLLKYNENGTITDAVDCALDPLSETKCTLKSFTVEKGIYQTSNFRVQPTESIVRFPNITNLCPFGEVFNATRFTSVYAWNRKRISNCVADYSVLYNSASFSTFKCYGVSPTKLNDLCFTNVYADSFVIRGDEVRQIAPGQTGKIADYNYKLPDDFTGCVIAWNSNNLDSKVGGNYNYLYRLFRKSNLKPFERDISTEIYQAGSTPCNGVEGFNCYFPLQSYGFQPTNGVGYQPYRVVVLSFELLHAPATVCGPKKSTNLVKNKCVNFNFNGLTGTGVLTESNKKFLPFQQFGRDIADTTDAVRDPQTLEILDITPCSFGGVSVITPGTNTSNQVAVLYQDVNCTEVPVAIHADQLTPTWRVYSTGSNVFQTRAGCLIGAEHVNNSYECDIPIGAGICASYQTQTNSPRRARSVASQSIIAYTMSLGAENSVAYSNNSIAIPTNFTISVTTEILPVSMTKTSVDCTMYICGDSTECSNLLLQYGSFCTQLNRALTGIAVEQDKNTQEVFAQVKQIYKTPPIKDFGGFNFSQILPDPSKPSKRSFIEDLLFNKVTLADAGFIKQYGDCLGDIAARDLICAQKFNGLTVLPPLLTDEMIAQYTSALLAGTITSGWTFGAGAALQIPFAMQMAYRFNGIGVTQNVLYENQKLIANQFNSAIGKIQDSLSSTASALGKLQDVVNQNAQALNTLVKQLSSNFGAISSVLNDILSRLDKVEAEVQIDRLITGRLQSLQTYVTQQLIRAAEIRASANLAATKMSECVLGQSKRVDFCGKGYHLMSFPQSAPHGVVFLHVTYVPAQEKNFTTAPAICHDGKAHFPREGVFVSNGTHWFVTQRNFYEPQIITTDNTFVSGNCDVVIGIVNNTVYDPLQPELDSFKEELDKYFKNHTSPDVDLGDISGINASVVNIQKEIDRLNEVAKNLNESLIDLQELGKYEQYIKGGGGSDIDPYKEFGSSYQLLNFLPLDFFPDLNALVDTATALYEEELTGREHCSPHHTAIRQALVCWDELTKLIAWMSSNITSEQVRTIIVNHVNDTWGLKVRQSLWFHLSCLTFGQHTVQEFLVSFGVWIRTPAPYRPPNAPILSTLPEHTVIC

SEQ ID NO: 6687 - protein, 1365 aa, Artificial Sequence
  SARS-CoV-2/Portugal/PT0035/2020__EPI_ISL_418020 spike protein (1-1211) WhcAg construct
MFVFLVLLPLVSSQCVNLTTRTQLPPAYTNSFTRGVYYPDKVFRSSVLHSTQDLFLPFFSNVTWFHAIHVSGTNGTKRFDNPVLPFNDGVYFASTEKSNIIRGWIFGTTLDSKTQSLLIVNNATNVVIKVCEFQFCNDPFLGVYYHKNNKSWMESEFRVYSSANNCTFEYVSQPFLMDLEGKQGNFKNLREFVFKNIDGYFKIYSKHTPINLVRDLPQGFSALEPLVDLPIGINITRFQTLLALHRSYLTPGDSSSGWTAGAAAYYVGYLQPRTFLLKYNENGTITDAVDCALDPLSETKCTLKSFTVEKGIYQTSNFRVQPTESIVRFPNITNLCPFGEVFNATRFASVYAWNRKRISNCVADYSVLYNSASFSTFKCYGVSPTKLNDLCFTNVYADSFVIRGDEVRQIAPGQTGKIADYNYKLPDDFTGCVIAWNSNNLDSKVGGNYNYLYRLFRKSNLKPFERDISTEIYQAGSTPCNGVEGFNCYFPLQSYGFQPTNGVGYQPYRVVVLSFELLHAPATVCGPKKSTNLVKNKCVNFNFNGLTGTGVLTESNKKFLPFQQFGRDIADTTDAVRDPQTLEILDITPCSFGGVSVITPGTNTSNQVAVLYQDVNCTEVPVAIHADQLTPTWRVYSTGSNVFQTRAGCLIGAEHVNNSYECDIPIGAGICASYQTQTNSPRRARSVASQSIIAYTMSLGAENSVAYSNNSIAIPTNFTISVTTEILPVSMTKTSVDCTMYICGDSTECSNLLLQYGSFCTQLNRALTGIAVEQDKNTQEVFAQVKQIYKTPPIKDFGGFNFSQILPDPSKPSKRSFIEDLLFNKVTLADAGFIKQYGDCLGDISARDLICAQKFNGLTVLPPLLTDEMIAQYTSALLAGTITSGWTFGAGAALQIPFAMQMAYRFNGIGVTQNVLYENQKLIANQFNSAIGKIQDSLSSTASALGKLQDVVNQNAQALNTLVKQLSSNFGAISSVLNDILSRLDKVEAEVQIDRLITGRLQSLQTYVTQQLIRAAEIRASANLAATKMSECVLGQSKRVDFCGKGYHLMSFPQSAPHGVVFLHVTYVPAQEKNFTTAPAICHDGKAHFPREGVFVSNGTHWFVTQRNFYEPQIITTDNTFVSGNCDVVIGIVNNTVYDPLQPELDSFKEELDKYFKNHTSPDVDLGDISGINASVVNIQKEIDRLNEVAKNLNESLIDLQELGKYEQYIKGGGGSDIDPYKEFGSSYQLLNFLPLDFFPDLNALVDTATALYEEELTGREHCSPHHTAIRQALVCWDELTKLIAWMSSNITSEQVRTIIVNHVNDTWGLKVRQSLWFHLSCLTFGQHTVQEFLVSFGVWIRTPAPYRPPNAPILSTLPEHTVIC

SEQ ID NO: 6688 - protein, 1365 aa, Artificial Sequence
  SARS-CoV-2/USA/NY-NYUMC7/2020__EPI_ISL_418192 spike protein (1-1211) WhcAg construct
MFVFLVLLPLVSSQCVNLTTRTQLPPAYTNSFTRGVYYPDKVFRSSVLHSTQDLFLPFFSNVTWFHAIHVSGTNGTKRFDNPVLPFNDGVYFASTEKSNIIRGWIFGTTLDSKTQSLLIVNNATNVVIKVCEFQFCNDPFLGVYHHKNNKSWMESEFRVYSSANNCTFEYVSQPFLMDLEGKQGNFKNLREFVFKNIDGYFKIYSKHTPINLVRDLPQGFSALEPLVDLPIGINITRFQTLLALHRSYLTPGDSSSGWTAGAAAYYVGYLQPRTFLLKYNENGTITDAVDCALDPLSETKCTLKSFTVEKGIYQTSNFRVQPTESIVRFPNITNLCPFGEVFNATRFASVYAWNRKRISNCVADYSVLYNSASFSTFKCYGVSPTKLNDLCFTNVYADSFVIRGDEVRQIAPGQTGKIADYNYKLPDDFTGCVIAWNSNNLDSKVGGNYNYLYRLFRKSNLKPFERDISTEIYQAGSTPCNGVEGFNCYFPLQSYGFQPTNGVGYQPYRVVVLSFELLHAPATVCGPKKSTNLVKNKCVNFNFNGLTGTGVLTESNKKFLPFQQFGRDIADTTDAVRDPQTLEILDITPCSFGGVSVITPGTNTSNQVAVLYQGVNCTEVPVAIHADQLTPTWRVYSTGSNVFQTRAGCLIGAEHVNNSYECDIPIGAGICASYQTQTNSPRRARSVASQSIIAYTMSLGAENSVAYSNNSIAIPTNFTISVTTEILPVSMTKTSVDCTMYICGDSTECSNLLLQYGSFCTQLNRALTGIAVEQDKNTQEVFAQVKQIYKTPPIKDFGGFNFSQILPDPSKPSKRSFIEDLLFNKVTLADAGFIKQYGDCLGDIAARDLICAQKFNGLTVLPPLLTDEMIAQYTSALLAGTITSGWTFGAGAALQIPFAMQMAYRFNGIGVTQNVLYENQKLIANQFNSAIGKIQDSLSSTASALGKLQDVVNQNAQALNTLVKQLSSNFGAISSVLNDILSRLDKVEAEVQIDRLITGRLQSLQTYVTQQLIRAAEIRASANLAATKMSECVLGQSKRVDFCGKGYHLMSFPQSAPHGVVFLHVTYVPAQEKNFTTAPAICHDGKAHFPREGVFVSNGTHWFVTQRNFYEPQIITTDNTFVSGNCDVVIGIVNNTVYDPLQPELDSFKEELDKYFKNHTSPDVDLGDISGINASVVNIQKEIDRLNEVAKNLNESLIDLQELGKYEQYIKGGGGSDIDPYKEFGSSYQLLNFLPLDFFPDLNALVDTATALYEEELTGREHCSPHHTAIRQALVCWDELTKLIAWMSSNITSEQVRTIIVNHVNDTWGLKVRQSLWFHLSCLTFGQHTVQEFLVSFGVWIRTPAPYRPPNAPILSTLPEHTVIC

SEQ ID NO: 6689 - protein, 1365 aa, Artificial Sequence
  SARS-CoV-2/Iceland/189/2020__EPI_ISL_417709 spike protein (1-1211) WhcAg construct
MFVFLVLLPLVSSQCVNLTTRTQLPPAYTNSFTRGVYYPDKVFRSSVLHSTQDLFLPFFSNVTWFHAIHVSGTNGTKRFDNPVLPFNDGVYFASTEKSNIIRGWIFGTTLDSKTQSLLIVNNATNVVIKVCEFQFCNDPFLGVYYHKNNKSWMESEFRVYSSANNCTFEYVSQPFLMDLEGKQGNFKNLREFVFKNIDGYFKIYSKHTPINLVRDLPQGFSALEPLVDLPIGINITRFQTLLALHRSYLTPGDSSSGWTAGAAAYYVGYLQPRTFLLKYNENGTITDAVDCALDPLSETKCTLKSFTVEKGIYQTSNFRVQPTESIVRFPNITNLCPFGEVFNATRFASVYAWNRKRISNCVADYSVLYNSASFSTFKCYGVSPTKLNDLCFTNVYADSFVIRGDEVRQIAPGQTGKIADYNYKLPDDFTGCVIAWNSNNLDSKVGGNYNYLYRLFRKSNLKPFERDISTEIYQAGSTPCNGVEGFNCYFPLQSYGFQPTNGVGYQPYRVVVLSFELLHAPATVCGPKKSTNLVKNKCVNFNFNGLTGTGVLTESNKKFLPFQQFGRDIADTTDAVRDPQTLEILDITPCSFGGVSVITPGTNTSNQVAVLYQGVNCTEVPVAIHADQLTPTWRVYSTGSNVFQTRAGCLIGAEHVNNSYECDIPIGAGICASYQTQTNSPRRARSVASQSIIAYTMSLGAENSVAYSNNSIAIPTNFTISVTTEILPVSMTKTSVDCTMYICGDSTECSNLLLQYGSFCTQLNRALTGIAVEQDKNTQEVFAQVKQIYKTPPIKDFGGFNFSQILPDPSKPSKRSFIEDLLFNKVTLADAGFTKQYGDCLGDIAARDLICAQKFNGLTVLPPLLTDEMIAQYTSALLAGTITSGWTFGAGAALQIPFAMQMAYRFNGIGVTQNVLYENQKLIANQFNSAIGKIQDSLSSTASALGKLQDVVNQNAQALNTLVKQLSSNFGAISSVLNDILSRLDKVEAEVQIDRLITGRLQSLQTYVTQQLIRAAEIRASANLAATKMSECVLGQSKRVDFCGKGYHLMSFPQSAPHGVVFLHVTYVPAQEKNFTTAPAICHDGKAHFPREGVFVSNGTHWFVTQRNFYEPQIITTDNTFVSGNCDVVIGIVNNTVYDPLQPELDSFKEELDKYFKNHTSPDVDLGDISGINASVVNIQKEIDRLNEVAKNLNESLIDLQELGKYEQYIKGGGGSDIDPYKEFGSSYQLLNFLPLDFFPDLNALVDTATALYEEELTGREHCSPHHTAIRQALVCWDELTKLIAWMSSNITSEQVRTIIVNHVNDTWGLKVRQSLWFHLSCLTFGQHTVQEFLVSFGVWIRTPAPYRPPNAPILSTLPEHTVIC

SEQ ID NO: 6690 - protein, 1365 aa, Artificial Sequence
  SARS-CoV-2/Australia/NSW56/2020__EPI_ISL_417408 spike protein (1-1211) WhcAg construct
MFVFLVLLPLVSSQCVNLTTRTQLPPAYTNSFTRGVYYPDKVFRSSVLHSTQDLFLPFFSNVTWFHAIHVSGTNGTKRFDNPVLPFNDGVYFASTEKSNIIRGWIFGTTLDSKTQSLLIVNNATNVVIKVCEFQFCNDPFLGVYYHKNNKSWMESEFRVYSSANNCTFEYVSQPFLMDLEGKQGNFKNLREFVFKNIDGYFKIYSKHTPINLVRDLPQGFSALEPLVDLPIGINITRFQTLLALHRSYLTPGDSSSGWTAGAAAYYVGYLQPRTFLLKYNENGTITDAVDCALDPLSETKCTLKSFTVEKGIYQTSNFRVQPTESIVRFPNITNLCPFGEVFNATRFASVYAWNRKRISNCVADYSVLYNSASFSTFKCYGVSPTKLNDLCFTNVYADSFVIRGDEVRQIAPGQTGKIADYNYKLPDDFTGCVIAWNSNNLDSKVGGNYNYLYRLFRKSNLKPFERDISTEIYQAGSTPCNGVEGFNCYFPLQSYGFQPTNGVGYQPYRVVVLSFELLHAPATVCGPKKSTNLVKNKCVNFNFNGLTGTGVLTESNKKFLPFQQFGRDIADTTDAVRDPQTLEILDITPCSFGGVSVITPGTNTSNQVAVLYQDVNCTEVPVAIHADQLTPTWRVYSTGSNVFQTRAGCLIGAEHVNNSYECDIPIGAGICASYQTQTNSPRRARSVASQSIIAYTMSLGAENSVAYSNNSIAIPTNFTISVTTEILPVSMTKTSVDCTMYICGDSTECSNLLLQYGSFCTQLNRALTGIAVEQDKNTQEVFAQVKQIYKTPPIKDFGGFNFSQILPDSSKPSKRSFIEDLLFNKVTLADAGFIKQYGDCLGDIAARDLICAQKFNGLTVLPPLLTDEMIAQYTSALLAGTITSGWTFGAGAALQIPFAMQMAYRFNGIGVTQNVLYENQKLIANQFNSAIGKIQDSLSSTASALGKLQDVVNQNAQALNTLVKQLSSNFGAISSVLNDILSRLDKVEAEVQIDRLITGRLQSLQTYVTQQLIRAAEIRASANLAATKMSECVLGQSKRVDFCGKGYHLMSFPQSAPHGVVFLHVTYVPAQEKNFTTAPAICHDGKAHFPREGVFVSNGTHWFVTQRNFYEPQIITTDNTFVSGNCDVVIGIVNNTVYDPLQPELDSFKEELDKYFKNHTSPDVDLGDISGINASVVNIQKEIDRLNEVAKNLNESLIDLQELGKYEQYIKGGGGSDIDPYKEFGSSYQLLNFLPLDFFPDLNALVDTATALYEEELTGREHCSPHHTAIRQALVCWDELTKLIAWMSSNITSEQVRTIIVNHVNDTWGLKVRQSLWFHLSCLTFGQHTVQEFLVSFGVWIRTPAPYRPPNAPILSTLPEHTVIC

SEQ ID NO: 6691 - protein, 1365 aa, Artificial Sequence
  SARS-CoV-2/Iceland/280/2020__EPI_ISL_417608 spike protein (1-1211) WhcAg construct
MFVFLVLLPLVSSQCVNLTTRTQLPPAYTNSFTRGVYYPDKVFRSSVLHSTQDLFLPFFSNVTWFHAIHVSGTNGTKRFDNPVLPFNDGVYFASTEKSNIIRGWIFGTTLDSKTQSLLIVNNATNVVIKVCEFQFCNDPFLGVYYHKNNKSWMESEFRVYSSANNCTFEYVSQPFLMDLEGKQGNFKNLREFVFKNIDGYFKIYSKHTPINLVRDLPQGFSALEPLVDLPIGINITRFQTLLALHRSYLTPGDSSSGWTAGAAAYYVGYLQPRTFLLKYNENGTITDAVDCALDPLSETKCTLKSFTVEKGIYQTSNFRVQPTESIVRFPNITNLCPFGEVFNATRFASVYAWNRKRISNCVADYSVLYNSASFSTFKCYGVSPTKLNDLCFTNVYADSFVIRGDEVRQIAPGQTGKIADYNYKLPDDFTGCVIAWNSNNLDSKVGGNYNYLYRLFRKSNLKPFERDISTEIYQAGSTPCNGVEGFNCYFPLQSYGFQPTNGVGYQPYRVVVLSFELLHAPATVCGPKKSTNLVKNKCVNFNFNGLTGTGVLTESNKKFLPFQQFGRDIADTTDAVRDPQTLEILDITPCSFGGVSVITPGTNTSNQVAVLYQGVNCTEVPVAIHADQLTPTWRVYSTGSNVFQTRAGCLIGAEHVNNSYECDIPIGAGICASYHTQTNSPRRARSVASQSIIAYTMSLGAENSVAYSNNSIAIPTNFTISVTTEILPVSMTKTSVDCTMYICGDSTECSNLLLQYGSFCTQLNRALTGIAVEQDKNTQEVFAQVKQIYKTPPIKDFGGFNFSQILPDPSKPSKRSFIEDLLFNKVTLADAGFIKQYGDCLGDIAARDLICAQKFNGLTVLPPLLTDEMIAQYTSALLAGTITSGWTFGAGAALQIPFAMQMAYRFNGIGVTQNVLYENQKLIANQFNSAIGKIQDSLSSTASALGKLQDVVNQNAQALNTLVKQLSSNFGAISSVLNDILSRLDKVEAEVQIDRLITGRLQSLQTYVTQQLIRAAEIRASANLAATKMSECVLGQSKRVDFCGKGYHLMSFPQSAPHGVVFLHVTYVPAQEKNFTTAPAICHDGKAHFPREGVFVSNGTHWFVTQRNFYEPQIITTDNTFVSGNCDVVIGIVNNTVYDPLQPELDSFKEELDKYFKNHTSPDVDLGDISGINASVVNIQKEIDRLNEVAKNLNESLIDLQELGKYEQYIKGGGGSDIDPYKEFGSSYQLLNFLPLDFFPDLNALVDTATALYEEELTGREHCSPHHTAIRQALVCWDELTKLIAWMSSNITSEQVRTIIVNHVNDTWGLKVRQSLWFHLSCLTFGQHTVQEFLVSFGVWIRTPAPYRPPNAPILSTLPEHTVIC

SEQ ID NO: 6692 - protein, 1365 aa, Artificial Sequence; identical to SEQ ID NO: 6647
  SARS-CoV-2/Iceland/247/2020__EPI_ISL_417575 spike protein (1-1211) WhcAg construct

SEQ ID NO: 6693 - protein, 1365 aa, Artificial Sequence
  SARS-CoV-2/Iceland/238/2020__EPI_ISL_417566 spike protein (1-1211) WhcAg construct
MFVFLVLLPLVSSQCVNLTTRTQLPPAYTNSFTRGVYYPDKVFRSSVLHSTQDLFLPFFSNVTWFHAIHVSGTNGTKRFDNPVLPFNDGVYFASTEKSNIIRGWIFGTTLDSKTQSLLIVNNATNVVIKVCEFQFCNDPFLGVYYHKNNKSWMESEFRVYSSANNCTFEYVSQPFLMDLEGKQGNFKNLREFVFKNIDGYFKIYSKHTPINLVRDLPQGFSALEPLVDLPIGINITRFQTLLALHRSYLTPGDSSSGWTAGAAAYYVGYLQPRTFLLKYNENGTITDAVDCALDPLSETKCTLKSFTVEKGIYQTSNFRVQPTESIVRFPNITNLCPFGEVFNATRFASVYAWNRKRISNCVADYSVLYNSASFSTFKCYGVSPTKLNDLCFTNVYADSFVIRGDEVRQIAPGQTGKIADYNYKLPDDFTGCVIAWNSNNLDSKVGGNYNYLYRLFRKSNLKPFERDISTEIYQAGSTPCNGVEGFNCYFPLQSYGFQPTNGVGYQPYRVVVLSFELLHAPATVCGPKKSTNLVKNKCVNFNFNGLTGTGVLTESNKKFLPFQQFGRDIADTTDAVRDPQTLEILDITPCSFGGVSVITPGTNTSNQVAVLYQGVNCTEVPVAIHADQLTPTWRVYSTGSNVFQTRAGCLIGAEHVNNSYECDIPIGAGICASYQTQTNSPRRARSVASQSIIAYTMSLGAENSVAYSNNSIAIPTNFTISVTTEILPVSMTKTSVDCTMYICGDSTECSNLLLQYGSFCTQLNRALTGIAVEQDKNTQEVFAQVKQIYKTPPIKDFGGFNFSQILPDPSKPSKRSFIEDLLFNKVTLADVGFIKQYGDCLGDIAARDLICAQKFNGLTVLPPLLTDEMIAQYTSALLAGTITSGWTFGAGAALQIPFAMQMAYRFNGIGVTQNVLYENQKLIANQFNSAIGKIQDSLSSTASALGKLQDVVNQNAQALNTLVKQLSSNFGAISSVLNDILSRLDKVEAEVQIDRLITGRLQSLQTYVTQQLIRAAEIRASANLAATKMSECVLGQSKRVDFCGKGYHLMSFPQSAPHGVVFLHVTYVPAQEKNFTTAPAICHDGKAHFPREGVFVSNGTHWFVTQRNFYEPQIITTDNTFVSGNCDVVIGIVNNTVYDPLQPELDSFKEELDKYFKNHTSPDVDLGDISGINASVVNIQKEIDRLNEVAKNLNESLIDLQELGKYEQYIKGGGGSDIDPYKEFGSSYQLLNFLPLDFFPDLNALVDTATALYEEELTGREHCSPHHTAIRQALVCWDELTKLIAWMSSNITSEQVRTIIVNHVNDTWGLKVRQSLWFHLSCLTFGQHTVQEFLVSFGVWIRTPAPYRPPNAPILSTLPEHTVIC

SEQ ID NO: 6694 - protein, 1365 aa, Artificial Sequence
  SARS-CoV-2/Greece/16/2020__EPI_ISL_418265 spike protein (1-1211) WhcAg construct
MFVFLVLLPLVSSQCVNLTTRTQLPPAYTNSFTRGVYYPDKVFRSSVLHSTQDLFLPFFSNVTWFHAIHVSGTNGTKRFDNPVLPFNDGVYFASTEKSNIIRGWIFGTTLDSKTQSLLIVNNATNVVIKVCEFQFCNDPFLGVYYHKNNKSWMESEFRVYSSANNCTFEYVSQPFLMDLEGKQGNFKNLREFVFKNVDGYFKIYSKHTPINLVRDLPQGFSALEPLVDLPIGINITRFQTLLALHRSYLTPGDSSSGWTAGAAAYYVGYLQPRTFLLKYNENGTITDAVDCALDPLSETKCTLKSFTVEKGIYQTSNFRVQPTESIVRFPNITNLCPFGEVFNATRFASVYAWNRKRISNCVADYSVLYNSASFSTFKCYGVSPTKLNDLCFTNVYADSFVIRGDEVRQIAPGQTGKIADYNYKLPDDFTGCVIAWNSNNLDSKVGGNYNYLYRLFRKSNLKPFERDISTEIYQAGSTPCNGVEGFNCYFPLQSYGFQPTNGVGYQPYRVVVLSFELLHAPATVCGPKKSTNLVKNKCVNFNFNGLTGTGVLTESNKKFLPFQQFGRDIADTTDAVRDPQTLEILDITPCSFGGVSVITPGTNTSNQVAVLYQDVNCTEVPVAIHADQLTPTWRVYSTGSNVFQTRAGCLIGAEHVNNSYECDIPIGAGICASYQTQTNSPRRARSVASQSIIAYTMSLGAENSVAYSNNSIAIPTNFTISVTTEILPVSMTKTSVDCTMYICGDSTECSNLLLQYGSFCTQLNRALTGIAVEQDKNTQEVFAQVKQIYKTPPIKDFGGFNFSQILPDPSKPSKRSFIEDLLFNKVTLADAGFIKQYGDCLGDIAARDLICAQKFNGLTVLPPLLTDEMIAQYTSALLAGTITSGWTFGAGAALQIPFAMQMAYRFNGIGVTQNVLYENQKLIANQFNSAIGKIQDSLSSTASALGKLQDVVNQNAQALNTLVKQLSSNFGAISSVLNDILSRLDKVEAEVQIDRLITGRLQSLQTYVTQQLIRAAEIRASANLAATKMSECVLGQSKRVDFCGKGYHLMSFPQSAPHGVVFLHVTYVPAQEKNFTTAPAICHDGKAHFPREGVFVSNGTHWFVTQRNFYEPQIITTDNTFVSGNCDVVIGIVNNTVYDPLQPELDSFKEELDKYFKNHTSPDVDLGDISGINASVVNIQKEIDRLNEVAKNLNESLIDLQELGKYEQYIKGGGGSDIDPYKEFGSSYQLLNFLPLDFFPDLNALVDTATALYEEELTGREHCSPHHTAIRQALVCWDELTKLIAWMSSNITSEQVRTIIVNHVNDTWGLKVRQSLWFHLSCLTFGQHTVQEFLVSFGVWIRTPAPYRPPNAPILSTLPEHTVIC

SEQ ID NO: 6695 - protein, 1365 aa, Artificial Sequence
  SARS-CoV-2/Iceland/319/2020__EPI_ISL_417648 spike protein (1-1211) WhcAg construct
MFVFLVLLPLVSSQCVNLTTRTQLPPAYTNSFTRGVYYPDKVFRSSVLHSTQDLFLPFFSNVTWFHAIHVSGTNGTKRFDNPVLPFNDGVYFASTEKSNIIRGWIFGTTLDSKTQSLLIVNNATNVVIKVCEFQFCNDPFLGVYYHKNNKSWMESEFRVYSSANNCTFEYVSQPFLIDLEGKQGNFKNLREFVFKNIDGYFKIYSKHTPINLVRDLPQGFSALEPLVDLPIGINITRFQTLLALHRSYLTPGDSSSGWTAGAAAYYVGYLQPRTFLLKYNENGTITDAVDCALDPLSETKCTLKSFTVEKGIYQTSNFRVQPTESIVRFPNITNLCPFGEVFNATRFASVYAWNRKRISNCVADYSVLYNSASFSTFKCYGVSPTKLNDLCFTNVYADSFVIRGDEVRQIAPGQTGKIADYNYKLPDDFTGCVIAWNSNNLDSKVGGNYNYLYRLFRKSNLKPFERDISTEIYQAGSTPCNGVEGFNCYFPLQSYGFQPTNGVGYQPYRVVVLSFELLHAPATVCGPKKSTNLVKNKCVNFNFNGLTGTGVLTESNKKFLPFQQFGRDIADTTDAVRDPQTLEILDITPCSFGGVSVITPGTNTSNQVAVLYQGVNCTEVPVAIHADQLTPTWRVYSTGSNVFQTRAGCLIGAEHVNNSYECDIPIGAGICASYQTQTNSPRRARSVASQSIIAYTMSLGAENSVAYSNNSIAIPTNFTISVTTEILPVSMTKTSVDCTMYICGDSTECSNLLLQYGSFCTQLNRALTGIAVEQDKNTQEVFAQVKQIYKTPPIKDFGGFNFSQILPDPSKPSKRSFIEDLLFNKVTLADAGFIKQYGDCLGDIAARDLICAQKFNGLTVLPPLLTDEMIAQYTSALLAGTITSGWTFGAGAALQIPFAMQMAYRFNGIGVTQNVLYENQKLIANQFNSAIGKIQDSLSSTASALGKLQDVVNQNAQALNTLVKQLSSNFGAISSVLNDILSRLDKVEAEVQIDRLITGRLQSLQTYVTQQLIRAAEIRASANLAATKMSECVLGQSKRVDFCGKGYHLMSFPQSAPHGVVFLHVTYVPAQEKNFTTAPAICHDGKAHFPREGVFVSNGTHWFVTQRNFYEPQIITTDNTFVSGNCDVVIGIVNNTVYDPLQPELDSFKEELDKYFKNHTSPDVDLGDISGINASVVNIQKEIDRLNEVAKNLNESLIDLQELGKYEQYIKGGGGSDIDPYKEFGSSYQLLNFLPLDFFPDLNALVDTATALYEEELTGREHCSPHHTAIRQALVCWDELTKLIAWMSSNITSEQVRTIIVNHVNDTWGLKVRQSLWFHLSCLTFGQHTVQEFLVSFGVWIRTPAPYRPPNAPILSTLPEHTVIC

SEQ ID NO: 6696 - protein, 1365 aa, Artificial Sequence
  SARS-CoV-2/Congo/94/2020__EPI_ISL_417947 spike protein (1-1211) WhcAg construct
MFVFLVLLPLVSSQCVNLTTRTQLPPAYTNSFTRGVYYPDKVFRSSVLHSTQDLFLPFFSNVTWFHAIHVSGTNGTKRFDNPVLPFNDGVYFASTEKSNIIRGWIFGTTLDSKTQSLLIVNNATNVVIKVCEFQFCNDPFLGVYYHKNNKSWMESEFRVYSSANNCTFEYVSQPFLMDLEGKQGNFKNLREFVFKNIDGYFKIYSKHTPINLVRDLPQGFSALEPLVDLPIGINITRFQTLLALHRSYLTPGDSSSGWTAGAAAYYVGYLQPRTFLLKYNENGTITDAVDCALDPLSETKCTLKSFTVEKGIYQTSNFRVQPTESIVRFPNITNLCPFGEVFNATRFASVYAWNRKRISNCVADYSVLYNSASFSTFKCYGVSPTKLNDLCFTNVYADSFVIRGDEVRQIAPGQTGKIADYNYKLPDDFTGCVIAWNSNNLDSKVGGNYNYLYRLFRKSNLKPFERDISTEIYQAGSTPCNGVEGFNCYFPLQSYGFQPTNGVGYQPYRVVVLSFELLHAPATVCGPKKSTNLVKNKCVNFNFNGLTGTGVLTESNKKFLPFQQFGRDIADTTDAVRDPQTLEILDITPCSFGGVSVITPGTNTSNQVAVLYQGVNCTEVPVAIHADQLTPTWRVYSTGSNVFQTRAGCLIGAEHVNNSYECDIPIGAGICASYQTQTNSPRRARSVASQSIIAYTMSLGAENSVAYSNNSIAIPTNFTISVTTEILPVSMTKTSVDCTMYICGDSTECSNLLLQYGSFCTQLNRALTGIAVEQDKNTQEVFAQVKQIYKTPPIKDFGGFNFSQILPDPSKPSKRSFIEDILFNKVTLADAGFIKQYGDCLGDIAARDLICAQKFNGLTVLPPLLTDEMIAQYTSALLAGTITSGWTFGAGAALQIPFAMQMAYRFNGIGVTQNVLYENQKLIANQFNSAIGKIQDSLSSTASALGKLQDVVNQNAQALNTLVKQLSSNFGAISSVLNDILSRLDKVEAEVQIDRLITGRLQSLQTYVTQQLIRAAEIRASANLAATKMSECVLGQSKRVDFCGKGYHLMSFPQSAPHGVVFLHVTYVPAQEKNFTTAPAICHDGKAHFPREGVFVSNGTHWFVTQRNFYEPQIITTDNTFVSGNCDVVIGIVNNTVYDPLQPELDSFKEELDKYFKNHTSPDVDLGDISGINASVVNIQKEIDRLNEVAKNLNESLIDLQELGKYEQYIKGGGGSDIDPYKEFGSSYQLLNFLPLDFFPDLNALVDTATALYEEELTGREHCSPHHTAIRQALVCWDELTKLIAWMSSNITSEQVRTIIVNHVNDTWGLKVRQSLWFHLSCLTFGQHTVQEFLVSFGVWIRTPAPYRPPNAPILSTLPEHTVIC

SEQ ID NO: 6697 - protein, 1365 aa, Artificial Sequence
  SARS-CoV-2/Congo/158/2020__EPI_ISL_417950 spike protein (1-1211) WhcAg construct
MFVFLVLLPLVSSQCVNLTTRTQLPPAYTNSFTRGVYYPDKVFRSSVLHSTQDLFLPFFSNVTWFHAIHVSGTNGTKRFDNPVLPFNDGVYFASTEKSNIIRGWIFGTTLDSKTQSLLIVNNATNVVIKVCEFQFCNDPFLGVYYHKNNKSWMESEFRVYSSANNCTFEYVSQPFLMDLEGKQGNFKNLREFVFKNIDGYFKIYSKHTPINLVRDLPQGFSALEPLVDLPIGINITRFQTLLALHRSYLTPGDSSSGWTAGAAAYYVGYLQPRTFLLKYNENGTITDAVDCALDPLSETKCTLKSFTVEKGIYQTSNFRVQPTESIVRFPNITNLCPFGEVFNATRFASVYAWNRKRISNCVADYSVLYNSASFSTFKCYGVSPTKLNDLCFTNVYADSFVIRGDEVRQIAPGQTGKIADYNYKLPDDFTGCVIAWNSNNLDSKVGGNYNYLYRLFRKSNLKPFERDISTEIYQAGSTPCNGVEGFNCYFPLQSYGFQPTNGVGYQPYRVVVLSFELLHAPATVCGPKKSTNLVKNKCVNFNFNGLTGTGVLTESNKKFLPFQQFGRDIADTTDAVRDPQTLEILDITPCSFGGVSVITPGTNTSNQVAVLYQDVNCTEVPVAIHADQLTPTWRVYSTGSNVFQTRAGCLIGAEHVNNSYECDIPIGAGICASYQTQTNSPRRARSVASQSIIAYTMSLGAENSVAYSNNSIAIPTNFTISVTTEILPVSMTKTSVDCTMYICGDSTECSNLLLQYGSFCTQLNRALTGIAVEQDKNTQEVFAQVKQIYKTPPIKDFGGFNFSQILPDPSKPSKRSFIEDLLFNKVTLADAGFIKQYGDCLGDIAARDLICAQKFNGLTVLPPLLTDEMIAQYTSALLAGTITSGWTFGAGAALQIPFAMQMAYRFNGIGVTQNVLYENQKLIANQFNSAIGKIQDSLSSTASALGKLQDVVNQNAQALNTLVKQLSSNFGAISSVLNDILSRLDKVEAEVQIDRLITGRLQSLQTYVTQQLIRAAEIRASANLAATKMSECVLGQSKRVDFCGKGYHLMSFPQSAPHGVVFLHVTYVPAQEKNFTTAPAICHDGKAHFPREGVFVSNGTHWFVTQRNFYEPQIITTDNTFLSGNCDVVIGIVNNTVYDPLQPELDSFKEELDKYFKNHTSPDVDLGDISGINASVVNIQKEIDRLNEVAKNLNESLIDLQELGKYEQYIKGGGGSDIDPYKEFGSSYQLLNFLPLDFFPDLNALVDTATALYEEELTGREHCSPHHTAIRQALVCWDELTKLIAWMSSNITSEQVRTIIVNHVNDTWGLKVRQSLWFHLSCLTFGQHTVQEFLVSFGVWIRTPAPYRPPNAPILSTLPEHTVIC

SEQ ID NO: 6698 - protein, 1365 aa, Artificial Sequence
  SARS-CoV-2/USA/UT-00034/2020__EPI_ISL_417977 spike protein (1-1211) WhcAg construct
MFVFLVLLPLVSSQCVNLTTRTQLPPAYTNSFTRGVYYPDKVFRSSVLHSTQDLFLPFFSNVTWFHAIHVSGTNGTKRFDNPVLPFNDGVYFASTEKSNIIRGWIFGTTLDSKTQSLLIVNNATNVVIKVCEFQFCNDPFLGVYYYKNNKSWMESEFRVYSSANNCTFEYVSQPFLMDLEGKQGNFKNLREFVFKNIDGYFKIYSKHTPINLVRDLPQGFSALEPLVDLPIGINITRFQTLLALHRSYLTPGDSSSGWTAGAAAYYVGYLQPRTFLLKYNENGTITDAVDCALDPLSETKCTLKSFTVEKGIYQTSNFRVQPTESIVRFPNITNLCPFGEVFNATRFASVYAWNRKRISNCVADYSVLYNSASFSTFKCYGVSPTKLNDLCFTNVYADSFVIRGDEVRQIAPGQTGKIADYNYKLPDDFTGCVIAWNSNNLDSKVGGNYNYLYRLFRKSNLKPFERDISTEIYQAGSTPCNGVEGFNCYFPLQSYGFQPTNGVGYQPYRVVVLSFELLHAPATVCGPKKSTNLVKNKCVNFNFNGLTGTGVLTESNKKFLPFQQFGRDIADTTDAVRDPQTLEILDITPCSFGGVSVITPGTNTSNQVAVLYQGVNCTEVPVAIHADQLTPTWRVYSTGSNVFQTRAGCLIGAEHVNNSYECDIPIGAGICASYQTQTNSPRRARSVASQSIIAYTMSLGAENSVAYSNNSIAIPTNFTISVTTEILPVSMTKTSVDCTMYICGDSTECSNLLLQYGSFCTQLNRALTGIAVEQDKNTQEVFAQVKQIYKTPPIKDFGGFNFSQILPDPSKPSKRSFIEDLLFNKVTLADAGFIKQYGDCLGDIAARDLICAQKFNGLTVLPPLLTDEMIAQYTSALLAGTITSGWTFGAGAALQIPFAMQMAYRFNGIGVTQNVLYENQKLIANQFNSAIGKIQDSLSSTASALGKLQDVVNQNAQALNTLVKQLSSNFGAISSVLNDILSRLDKVEAEVQIDRLITGRLQSLQTYVTQQLIRAAEIRASANLAATKMSECVLGQSKRVDFCGKGYHLMSFPQSAPHGVVFLHVTYVPAQEKNFTTAPAICHDGKAHFPREGVFVSNGTHWFVTQRNFYEPQIITTDNTFVSGNCDVVIGIVNNTVYDPLQPELDSFKEELDKYFKNHTSPDVDLGDISGINASVVNIQKEIDRLNEVAKNLNESLIDLQELGKYEQYIKGGGGSDIDPYKEFGSSYQLLNFLPLDFFPDLNALVDTATALYEEELTGREHCSPHHTAIRQALVCWDELTKLIAWMSSNITSEQVRTIIVNHVNDTWGLKVRQSLWFHLSCLTFGQHTVQEFLVSFGVWIRTPAPYRPPNAPILSTLPEHTVIC

SEQ ID NO: 6699 - protein, 1365 aa, Artificial Sequence
  SARS-CoV-2/USA/UT-00033/2020__EPI_ISL_417976 spike protein (1-1211) WhcAg construct
MFVFLVLLPLVSSQCVNLTTRTQLPPAYTNSFTRGVYYPDKVFRSSVLHSTQDLFLPFFSNVTWFHAIHVSGTNGTKRFDNPVLPFNDGVYFASTEKSNIIRGWIFGTTLDSKTQSLLIVNNATNVVIKVCEFQFCNDPFLGVYYHKNNKSWMESEFRVYSSANNCTFEYVSQPFLMDLEGKQGNFKNLREFVFKNIDGYFKIYSKHTPINLVRDLPQGFSALEPLVDLPIGINITRFQTLLALHRSYLTPGDSSSGLTAGAAAYYVGYLQPRTFLLKYNENGTITDAVDCALDPLSETKCTLKSFTVEKGIYQTSNFRVQPTESIVRFPNITNLCPFGEVFNATRFASVYAWNRKRISNCVADYSVLYNSASFSTFKCYGVSPTKLNDLCFTNVYADSFVIRGDEVRQIAPGQTGKIADYNYKLPDDFTGCVIAWNSNNLDSKVGGNYNYLYRLFRKSNLKPFERDISTEIYQAGSTPCNGVEGFNCYFPLQSYGFQPTNGVGYQPYRVVVLSFELLHAPATVCGPKKSTNLVKNKCVNFNFNGLTGTGVLTESNKKFLPFQQFGRDIADTTDAVRDPQTLEILDITPCSFGGVSVITPGTNTSNQVAVLYQGVNCTEVPVAIHADQLTPTWRVYSTGSNVFQTRAGCLIGAEHVNNSYECDIPIGAGICASYQTQTNSPRRARSVASQSIIAYTMSLGAENSVAYSNNSIAIPTNFTISVTTEILPVSMTKTSVDCTMYICGDSTECSNLLLQYGSFCTQLNRALTGIAVEQDKNTQEVFAQVKQIYKTPPIKDFGGFNFSQILPDPSKPSKRSFIEDLLFNKVTLADAGFIKQYGDCLGDIAARDLICAQKFNGLTVLPPLLTDEMIAQYTSALLAGTITSGWTFGAGAALQIPFAMQMAYRFNGIGVTQNVLYENQKLIANQFNSAIGKIQDSLSSTASALGKLQDVVNQNAQALNTLVKQLSSNFGAISSVLNDILSRLDKVEAEVQIDRLITGRLQSLQTYVTQQLIRAAEIRASANLAATKMSECVLGQSKRVDFCGKGYHLMSFPQSAPHGVVFLHVTYVPAQEKNFTTAPAICHDGKAHFPREGVFVSNGTHWFVTQRNFYEPQIITTDNTFVSGNCDVVIGIVNNTVYDPLQPELDSFKEELDKYFKNHTSPDVDLGDISGINASVVNIQKEIDRLNEVAKNLNESLIDLQELGKYEQYIKGGGGSDIDPYKEFGSSYQLLNFLPLDFFPDLNALVDTATALYEEELTGREHCSPHHTAIRQALVCWDELTKLIAWMSSNITSEQVRTIIVNHVNDTWGLKVRQSLWFHLSCLTFGQHTVQEFLVSFGVWIRTPAPYRPPNAPILSTLPEHTVIC

SEQ ID NO: 6700 - protein, 1365 aa, Artificial Sequence
  SARS-CoV-2/USA/WI-13/2020__EPI_ISL_417516 spike protein (1-1211) WhcAg construct
MFVFLVLLPLVSSQCVNLTTRTQLPPAYTNSFTRGVYYPDKVFRSSVLHSTQDLFLPFFSNVTWFHAIHVSGTNGTKRFDNPVLPFNDGVYFASTEKSNIIRGWIFGTTLDSKTQSLLIVNNATNVVIKVCEFQFCNDPFLGVYYHKNNKSWMESEFRVYSSANNCTFEYVSQPFLMDLEGKQGNFKNLREFVFKNIDGYFKIYSKHTPINLVRDLPQGFSALEPLVDLPIGINITRFQTLLALHRSYLTPGDSSSGWTAGAAAYYVGYLQPRTFLLKYNENGTITDAVDCALDPLSETKCTLKSFTVEKGIYQTSNFRVLPTESIVRFPNITNLCPFGEVFNATRFASVYAWNRKRISNCVADYSVLYNSASFSTFKCYGVSPTKLNDLCFTNVYADSFVIRGDEVRQIAPGQTGKIADYNYKLPDDFTGCVIAWNSNNLDSKVGGNYNYLYRLFRKSNLKPFERDISTEIYQAGSTPCNGVEGFNCYFPLQSYGFQPTNGVGYQPYRVVVLSFELLHAPATVCGPKKSTNLVKNKCVNFNFNGLTGTGVLTESNKKFLPFQQFGRDIADTTDAVRDPQTLEILDITPCSFGGVSVITPGTNTSNQVAVLYQGVNCTEVPVAIHADQLTPTWRVYSTGSNVFQTRAGCLIGAEHVNNSYECDIPIGAGICASYQTQTNSPRRARSVASQSIIAYTMSLGAENSVAYSNNSIAIPTNFTISVTTEILPVSMTKTSVDCTMYICGDSTECSNLLLQYGSFCTQLNRALTGIAVEQDKNTQEVFAQVKQIYKTPPIKDFGGFNFSQILPDPSKPSKRSFIEDLLFNKVTLADAGFIKQYGDCLGDIAARDLICAQKFNGLTVLPPLLTDEMIAQYTSALLAGTITSGWTFGAGAALQIPFAMQMAYRFNGIGVTQNVLYENQKLIANQFNSAIGKIQDSLSSTASALGKLQDVVNQNAQALNTLVKQLSSNFGAISSVLNDILSRLDKVEAEVQIDRLITGRLQSLQTYVTQQLIRAAEIRASANLAATKMSECVLGQSKRVDFCGKGYHLMSFPQSAPHGVVFLHVTYVPAQEKNFTTAPAICHDGKAHFPREGVFVSNGTHWFVTQRNFYEPQIITTDNTFVSGNCDVVIGIVNNTVYDPLQPELDSFKEELDKYFKNHTSPDVDLGDISGINASVVNIQKEIDRLNEVAKNLNESLIDLQELGKYEQYIKGGGGSDIDPYKEFGSSYQLLNFLPLDFFPDLNALVDTATALYEEELTGREHCSPHHTAIRQALVCWDELTKLIAWMSSNITSEQVRTIIVNHVNDTWGLKVRQSLWFHLSCLTFGQHTVQEFLVSFGVWIRTPAPYRPPNAPILSTLPEHTVIC

SEQ ID NO: 6701 - protein, 1364 aa, Artificial Sequence
  SARS-CoV-2/India/1-27/2020__EPI_ISL_413522 spike protein (1-1210) WhcAg construct
MFVFLVLLPLVSSQCVNLTTRTQLPPAYTNSFTRGVYYPDKVFRSSVLHSTQDLFLPFFSNVTWFHAIHVSGTNGTKRFDNPVLPFNDGVYFASTEKSNIIRGWIFGTTLDSKTQSLLIVNNATNVVIKVCEFQFCNDPFLGVYHKNNKSWMESEFRVYSSANNCTFEYVSQPFLMDLEGKQGNFKNLREFVFKNIDGYFKIYSKHTPINLVRDLPQGFSALEPLVDLPIGINITRFQTLLALHRSYLTPGDSSSGWTAGAAAYYVGYLQPRTFLLKYNENGTITDAVDCALDPLSETKCTLKSFTVEKGIYQTSNFRVQPTESIVRFPNITNLCPFGEVFNATRFASVYAWNRKRISNCVADYSVLYNSASFSTFKCYGVSPTKLNDLCFTNVYADSFVIRGDEVIQIAPGQTGKIADYNYKLPDDFTGCVIAWNSNNLDSKVGGNYNYLYRLFRKSNLKPFERDISTEIYQAGSTPCNGVEGFNCYFPLQSYGFQPTNGVGYQPYRVVVLSFELLHAPATVCGPKKSTNLVKNKCVNFNFNGLTGTGVLTESNKKFLPFQQFGRDIADTTDAVRDPQTLEILDITPCSFGGVSVITPGTNTSNQVAVLYQDVNCTEVPVAIHADQLTPTWRVYSTGSNVFQTRAGCLIGAEHVNNSYECDIPIGAGICASYQTQTNSPRRARSVASQSIIAYTMSLGAENSVAYSNNSIAIPTNFTISVTTEILPVSMTKTSVDCTMYICGDSTECSNLLLQYGSFCTQLNRALTGIAVEQDKNTQEVFAQVKQIYKTPPIKDFGGFNFSQILPDPSKPSKRSFIEDLLFNKVTLADAGFIKQYGDCLGDIAARDLICAQKFNGLTVLPPLLTDEMIAQYTSALLAGTITSGWTFGAGAALQIPFAMQMAYRFNGIGVTQNVLYENQKLIANQFNSAIGKIQDSLSSTASALGKLQDVVNQNAQALNTLVKQLSSNFGAISSVLNDILSRLDKVEAEVQIDRLITGRLQSLQTYVTQQLIRAAEIRASANLAATKMSECVLGQSKRVDFCGKGYHLMSFPQSAPHGVVFLHVTYVPAQEKNFTTAPAICHDGKAHFPREGVFVSNGTHWFVTQRNFYEPQIITTDNTFVSGNCDVVIGIVNNTVYDPLQPELDSFKEELDKYFKNHTSPDVDLGDISGINASVVNIQKEIDRLNEVAKNLNESLIDLQELGKYEQYIKGGGGSDIDPYKEFGSSYQLLNFLPLDFFPDLNALVDTATALYEEELTGREHCSPHHTAIRQALVCWDELTKLIAWMSSNITSEQVRTIIVNHVNDTWGLKVRQSLWFHLSCLTFGQHTVQEFLVSFGVWIRTPAPYRPPNAPILSTLPEHTVIC

SEQ ID NO: 6702 - protein, 1359 aa, Artificial Sequence
  SARS-CoV-2/pangolin/Guangxi/P4L/2017__EPI_ISL_410538 spike protein (1-1205) WhcAg construct
MFVFLFVLPLVSSQCVNLTTRTGIPPGYTNSSTRGVYYPDKVFRSSILHLTQDLFLPFFSNVTWFNTINYQGGFKKFDNPVLPFNDGVYFASTEKSNIIRGWIFGTTLDARTQSLLIVNNATNVVIKVCEFQFCTDPFLGVYYHNNNKTWVENEFRVYSSANNCTFEYISQPFLMDLEGKQGNFKNLREFVFKNVDGYFKIYSKHTPIDLVRDLPRGFAALEPLVDLPIGINITRFQTLLALHRSYLTPGNLESGWTTGAAAYYVGYLQQRTFLLSYNQNGTITDAVDCSLDPLSETKCTLKSLTVEKGIYQTSNFRVQPTISIVRFPNITNLCPFGEVFNASKFASVYAWNRKRISNCVADYSVLYNSTSFSTFKCYGVSPTKLNDLCFTNVYADSFVVKGDEVRQIAPGQTGVIADYNYKLPDDFTGCVIAWNSVKQDALTGGNYGYLYRLFRKSKLKPFERDISTEIYQAGSTPCNGQVGLNCYYPLERYGFHPTTGVNYQPFRVVVLSFELLNGPATVCGPKLSTTLVKDKCVNFNFNGLTGTGVLTTSKKQFLPFQQFGRDISDTTDAVRDPQTLEILDITPCSFGGVSVITPGTNTSNQVAVLYQDVNCTEVPMAIHAEQLTPAWRVYSAGANVFQTRAGCLVGAEHVNNSYECDIPVGAGICASYHSMSSLRSVNQRSIIAYTMSLGAENSVAYSNNSIAIPTNFTISVTTEILPVSMTKTSVDCTMYICGDSIECSNLLLQYGSFCTQLNRALTGIAVEQDKNTQEVFAQVKQIYKTPPIKDFGGFNFSQILPDPSKPSKRSFIEDLLFNKVTLADAGFIKQYGDCLGDIAARDLICAQKFNGLTVLPPLLTDEMIAQYTSALLAGTITSGWTFGAGAALQIPFAMQMAYRFNGIGVTQNVLYENQKLIANQFNSAIGKIQDSLSSTASALGKLQDVVNQNAQALNTLVKQLSSNFGAISSVLNDILSRLDKVEAEVQIDRLITGRLQSLQTYVTQQLIRAAEIRASANLAATKMSECVLGQSKRVDFCGKGYHLMSFPQSAPHGVVFLHVTYVPAQEKNFTTAPAICHEGKAHFPREGVFVSNGTHWFITQRNFYEPQIITTDNTFVSGSCDVVIGIVNNTVYDPLQPELDSFKEELDKYFKNHTSPDVDLGDISGINASVVNIQKEIDRLNEVAKNLNESPIDLQELGKYEQYIKGGGGSDIDPYKEFGSSYQLLNFLPLDFFPDLNALVDTATALYEEELTGREHCSPHHTAIRQALVCWDELTKLIAWMSSNITSEQVRTIIVNHVNDTWGLKVRQSLWFHLSCLTFGQHTVQEFLVSFGVWIRTPAPYRPPNAPILSTLPEHTVIC

SEQ ID NO: 6703 - protein, 1359 aa, Artificial Sequence
  SARS-CoV-2/pangolin/Guangxi/P5L/2017__EPI_ISL_410540 spike protein (1-1205) WhcAg construct
MFVFLFVLPLVSSQCVNLTTRTGIPPGYTNSSTRGVYYPDKVFRSSILHLTQDLFLPFFSNVTWFNTINYQGGFKKFDNPVLPFNDGVYFASTEKSNIIRGWIFGTTLDARTQSLLIVNNATNVVIKVCEFQFCTDPFLGVYYHNNNKTWVENEFRVYSSANNCTFEYISQPFLMDLEGKQGNFKNLREFVFKNVDGYFKIYSKHTPIDLVRDLPRGFAALEPLVDLPIGINITRFQTLLALHRSYLTPGKLESGWTTGAAAYYVGYLQQRTFLLSYNQNGTITDAVDCSLDPLSETKCTLKSLTVEKGIYQTSNFRVQPTISIVRFPNITNLCPFGEVFNASKFASVYAWNRKRISNCVADYSVLYNSTSFSTFKCYGVSPTKLNDLCFTNVYADSFVVKGDEVRQIAPGQTGVIADYNYKLPDDFTGCVIAWNSVKQDALTGGNYGYLYRLFRKSKLKPFERDISTEIYQAGSTPCNGQVGLNCYYPLERYGFHPTTGVNYQPFRVVVLSFELLNGPATVCGPKLSTTLVKDKCVNFNFNGLTGTGVLTTSKKQFLPFQQFGRDISDTTDAVRDPQTLEILDITPCSFGGVSVITPGTNTSNQVAVLYQDVNCTEVPMAIHAEQLTPAWRVYSAGANVFQTRAGCLVGAEHVNNSYECDIPVGAGICASYHSMSSFRSVNQRSIIAYTMSLGAENSVAYSNNSIAIPTNFTISVTTEILPVSMTKTSVDCTMYICGDSIECSNLLLQYGSFCTQLNRALTGIAVEQDKNTQEVFAQVKQIYKTPPIKDFGGFNFSQILPDPSKPSKRSFIEDLLFNKVTLADAGFIKQYGDCLGDIAARDLICAQKFNGLTVLPPLLTDEMIAQYTSALLAGTITSGWTFGAGAALQIPFAMQMAYRFNGIGVTQNVLYENQKLIANQFNSAIGKIQDSLSSTASALGKLQDVVNQNAQALNTLVKQLSSNFGAISSVLNDILSRLDKVEAEVQIDRLITGRLQSLQTYVTQQLIRAAEIRASANLAATKMSECVLGQSKRVDFCGKGYHLMSFPQSAPHGVVFLHVTYVPAQEKNFTTAPAICHEGKAHFPREGVFVSNGTHWFITQRNFYEPQIITTDNTFVSGSCDVVIGIVNNTVYDPLQPELDSFKEELDKYFKNHTSPDVDLGDISGINASVVNIQKEIDRLNEVAKNLNESLIDLQELGKYEQYIKGGGGSDIDPYKEFGSSYQLLNFLPLDFFPDLNALVDTATALYEEELTGREHCSPHHTAIRQALVCWDELTKLIAWMSSNITSEQVRTIIVNHVNDTWGLKVRQSLWFHLSCLTFGQHTVQEFLVSFGVWIRTPAPYRPPNAPILSTLPEHTVIC

SEQ ID NO: 6704 - protein, 1359 aa, Artificial Sequence
  SARS-CoV-2/pangolin/Guangxi/P5E/2017__EPI_ISL_410541 spike protein (1-1205) WhcAg construct
MFVFLFVLPLVSSQCVNLTTRTGIPPGYTNSSTRGVYYPDKVFRSSILHLTQDLFLPFFSNVTWFNTITYQGGSKKFDNPVLPFNDGVYFASTEKSNIIRGWIFGTTLDARTQSLLIVNNATNVVIKVCEFQFCTDPFLGVYYHNNNKTWVENEFRVYSSANNCTFEYISQPFLMDLEGKQGNFKNLREFVFKNVDGYFKIYSKHTPIDLVRDLPRGFAALEPLVDLPIGINITRFQTLLALHRSYLTPGKLESGWTTGAAAYYVGYLQQRTFLLSYNQNGTITDAVDCSLDPLSETKCTLKSLTVEKGIYQTSNFRVQPTISIVRFPNITNLCPFGEVFNASKFASVYAWNRKRISNCVADYSVLYNSTSFSTFKCYGVSPTKLNDLCFTNVYADSFVVKGDEVRQIAPGQTGVIADYNYKLPDDFTGCVIAWNSVKQDALTGDNYGYLYRLFRKSKLKPFERDISTEIYQAGSTPCNGQVGLNCYYPLERYGFHPTTGVNYQPFRVVVLSFELLNGPATVCGPKLSTTLVKDKCVNFNFNGLTGTGVLTTSKKQFLPFQQFGRDISDTTDAVRDPQTLEILDITPCSFGGVSVITPGTNTSNQVAVLYQDVNCTEVPMAIHAEQLTPAWRVYSAGANVFQTRAGCLVGAEHVNNSYECDIPVGAGICASYHSMSSFRSVNQRSIIAYTMSLGAENSVAYSNNSIAIPTNFTISVTTEILPVSMTKTSVDCTMYICGDSIECSNLLLQYGSFCTQLNRALTGIAVEQDKNTQEVFAQVKQIYKTPPIKDFGGFNFSQILPDPSKPSKRSFIEDLLFNKVTLADAGFIKQYGDCLGDIAARDLICAQKFNGLTVLPPLLTDEMIAQYTSALLAGTITSGWTFGAGAALQIPFAMQMAYRFNGIGVTQNVLYENQKLIANQFNSAIGKIQDSLSSTASALGKLQDVVNQNAQALNTLVKQLSSNFGAISSVLNDILSRLDKVEAEVQIDRLITGRLQSLQTYVTQQLIRAAEIRASANLAATKMSECVLGQSKRVDFCGKGYHLMSFPQSAPHGVVFLHVTYVPAQEKNFTTAPAICHEGKAHFPREGVFVSNGTHWFITQRNFYEPQIITTDNTFVSGSCDVVIGIVNNTVYDPLQPELDSFKEELDKYFKNHTSPDVDLGDISGINASVVNIQKEIDRLNEVAKNLNESLIDLQELGKYEQYIKGGGGSDIDPYKEFGSSYQLLNFLPLDFFPDLNALVDTATALYEEELTGREHCSPHHTAIRQALVCWDELTKLIAWMSSNITSEQVRTIIVNHVNDTWGLKVRQSLWFHLSCLTFGQHTVQEFLVSFGVWIRTPAPYRPPNAPILSTLPEHTVIC

SEQ ID NO: 6705 - protein, 1357 aa, Artificial Sequence
  SARS-CoV-2/pangolin/Guangxi/P1E/2017__EPI_ISL_410539 spike protein (1-1203) WhcAg construct
MFVFLFVLPLVSSQCVNLTTRTGIQPGYTNSSTRGVYYPDKVFRSSILHLTQDLFLPFFSNVTWFNTINYQGGFKKFDNPVLPFNDGVYFASTEKSNIIRGWIFGTTLDARTQSLLIVNNATNVVIKVCEFQFCTDPFLGVYYHNNNKTWVENEFRVYSSANNCTFEYISQPFLMDLEGKQGNFKNLREFVFKNVDGYFKIYSKHTPIDLVRDLPRGFAALEPLVDLPIGINITRFQTLLALHRSYLTPGKLESGWTTGAAAYYVGYLQQRTFLLSYNQNGTITDAVDCSLDPLSETKCTLKSLTVEKGIYQTSNFRVQPTISIVRFPNITNLCPFGEVFNASKFASVYAWNRKRISNCVADYSVLYNSTSFSTFKCYGVSPTKLNDLCFTNVYADSFVVKGDEVRQIAPGQTGVIADYNYKLPDDFTGCVIAWNSVKQDALTGGNYLYRLFRKSKLKPFERDISTEIYQAGSTPCNGQVGLNCYYPLERYGFHPTTGVNYQPFRVVVLSFELLNGPATVCGPKLSTTLVKDKCVNFNFNGLTGTGVLTTSKKQFLPFQQFGRDISDTTDAVRDPQTLEILDITPCSFGGVSVITPGTNTSNQVAVLYQDVNCTEVPMAIHAEQLTPAWRVYSAGANVFQTRAGCLVGAEHVNNSYECDIPVGAGICASYHSMSSLRSVNQRSIIAYTMSLGAENSVAYSNNSIAIPTNFTISVTTEILPVSMTKTSVDCTMYICGDSIECSNLLLQYGSFCTQLNRALTGIAVEQDKNTQEVFAQVKQIYKTPPIKDFGGFNFSQILPDPSKPSKRSFIEDLLFNKVTLADAGFIKQYGDCLGDIAARDLICAQKFNGLTVLPPLLTDEMIAQYTSALLAGTITSGWTFGAGAALQIPFAMQMAYRFNGIGVTQNVLYENQKLIANQFNSAIGKIQDSLSSTASALGKLQDVVNQNAQALNTLVKQLSSNFGAISSVLNDILSRLDKVEAEVQIDRLITGRLQSLQTYVTQQLIRAAEIRASANLAATKMSECVLGQSKRVDFCGKGYHLMSFPQSAPHGVVFLHVTYVPAQEKNFTTAPAICHEGKAHFPREGVFVSNGTHWFITQRNFYEPQIITTDNTFVSGSCDVVIGIVNNTVYDPLQPELDSFKEELDKYFKNHTSPDVDLGDISGINASVVNIQKEIDRLNEVAKNLNESLIDLQELGKYEQYIKGGGGSDIDPYKEFGSSYQLLNFLPLDFFPDLNALVDTATALYEEELTGREHCSPHHTAIRQALVCWDELTKLIAWMSSNITSEQVRTIIVNHVNDTWGLKVRQSLWFHLSCLTFGQHTVQEFLVSFGVWIRTPAPYRPPNAPILSTLPEHTVIC

SEQ ID NO: 6706 - protein, 1365 aa, Artificial Sequence
  SARS-CoV-2/Wuhan/WIV05/2019__EPI_ISL_402128 spike protein (1-1211)(K986P_V987P) WhcAg construct
MFVFLVLLPLVSSQCVNLTTRTQLPPAYTNSFTRGVYYPDKVFRSSVLHSTQDLFLPFFSNVTWFHAIHVSGTNGTKRFDNPVLPFNDGVYFASTEKSNIIRGWIFGTTLDSKTQSLLIVNNATNVVIKVCEFQFCNDPFLGVYYHKNNKSWMESEFRVYSSANNCTFEYVSQPFLMDLEGKQGNFKNLREFVFKNIDGYFKIYSKHTPINLVRDLPQGFSALEPLVDLPIGINITRFQTLLALHRSYLTPGDSSSGWTAGAAAYYVGYLQPRTFLLKYNENGTITDAVDCALDPLSETKCTLKSFTVEKGIYQTSNFRVQPTESIVRFPNITNLCPFGEVFNATRFASVYAWNRKRISNCVADYSVLYNSASFSTFKCYGVSPTKLNDLCFTNVYADSFVIRGDEVRQIAPGQTGKIADYNYKLPDDFTGCVIAWNSNNLDSKVGGNYNYLYRLFRKSNLKPFERDISTEIYQAGSTPCNGVEGFNCYFPLQSYGFQPTNGVGYQPYRVVVLSFELLHAPATVCGPKKSTNLVKNKCVNFNFNGLTGTGVLTESNKKFLPFQQFGRDIADTTDAVRDPQTLEILDITPCSFGGVSVITPGTNTSNQVAVLYQDVNCTEVPVAIHADQLTPTWRVYSTGSNVFQTRAGCLIGAEHVNNSYECDIPIGAGICASYQTQTNSPRRARSVASQSIIAYTMSLGAENSVAYSNNSIAIPTNFTISVTTEILPVSMTKTSVDCTMYICGDSTECSNLLLQYGSFCTQLNRALTGIAVEQDKNTQEVFAQVKQIYKTPPIKDFGGFNFSQILPDPSKPSKRSFIEDLLFNKVTLADAGFIKQYGDCLGDIAARDLICAQKFNGLTVLPPLLTDEMIAQYTSALLAGTITSGWTFGAGAALQIPFAMQMAYRFNGIGVTQNVLYENQKLIANQFNSAIGKIQDSLSSTASALGKLQDVVNQNAQALNTLVKQLSSNFGAISSVLNDILSRLDPPEAEVQIDRLITGRLQSLQTYVTQQLIRAAEIRASANLAATKMSECVLGQSKRVDFCGKGYHLMSFPQSAPHGVVFLHVTYVPAQEKNFTTAPAICHDGKAHFPREGVFVSNGTHWFVTQRNFYEPQIITTDNTFVSGNCDVVIGIVNNTVYDPLQPELDSFKEELDKYFKNHTSPDVDLGDISGINASVVNIQKEIDRLNEVAKNLNESLIDLQELGKYEQYIKGGGGSDIDPYKEFGSSYQLLNFLPLDFFPDLNALVDTATALYEEELTGREHCSPHHTAIRQALVCWDELTKLIAWMSSNITSEQVRTIIVNHVNDTWGLKVRQSLWFHLSCLTFGQHTVQEFLVSFGVWIRTPAPYRPPNAPILSTLPEHTVIC

SEQ ID NO: 6707 - protein, 1361 aa, Artificial Sequence
  SARS-CoV-2/bat/Yunnan/RaTG13/2013__EPI_ISL_402131 spike protein (1-1207)(K982P_V983P) WhcAg construct
MFVFLVLLPLVSSQCVNLTTRTQLPPAYTNSSTRGVYYPDKVFRSSVLHLTQDLFLPFFSNVTWFHAIHVSGTNGIKRFDNPVLPFNDGVYFASTEKSNIIRGWIFGTTLDSKTQSLLIVNNATNVVIKVCEFQFCNDPFLGVYYHKNNKSWMESEFRVYSSANNCTFEYVSQPFLMDLEGKQGNFKNLREFVFKNIDGYFKIYSKHTPINLVRDLPPGFSALEPLVDLPIGINITRFQTLLALHRSYLTPGDSSSGWTAGAAAYYVGYLQPRTFLLKYNENGTITDAVDCALDPLSETKCTLKSFTVEKGIYQTSNFRVQPTDSIVRFPNITNLCPFGEVFNATTFASVYAWNRKRISNCVADYSVLYNSTSFSTFKCYGVSPTKLNDLCFTNVYADSFVITGDEVRQIAPGQTGKIADYNYKLPDDFTGCVIAWNSKHIDAKEGGNFNYLYRLFRKANLKPFERDISTEIYQAGSKPCNGQTGLNCYYPLYRYGFYPTDGVGHQPYRVVVLSFELLNAPATVCGPKKSTNLVKNKCVNFNFNGLTGTGVLTESNKKFLPFQQFGRDIADTTDAVRDPQTLEILDITPCSFGGVSVITPGTNASNQVAVLYQDVNCTEVPVAIHADQLTPTWRVYSTGSNVFQTRAGCLIGAEHVNNSYECDIPIGAGICASYQTQTNSRSVASQSIIAYTMSLGAENSVAYSNNSIAIPTNFTISVTTEILPVSMTKTSVDCTMYICGDSTECSNLLLQYGSFCTQLNRALTGIAVEQDKNTQEVFAQVKQIYKTPPIKDFGGFNFSQILPDPSKPSKRSFIEDLLFNKVTLADAGFIKQYGDCLGDIAARDLICAQKFNGLTVLPPLLTDEMIAQYTSALLAGTITSGWTFGAGAALQIPFAMQMAYRFNGIGVTQNVLYENQKLIANQFNSAIGKIQDSLSSTASALGKLQDVVNQNAQALNTLVKQLSSNFGAISSVLNDILSRLDPPEAEVQIDRLITGRLQSLQTYVTQQLIRAAEIRASANLAATKMSECVLGQSKRVDFCGKGYHLMSFPQSAPHGVVFLHVTYVPAQEKNFTTAPAICHDGKAHFPREGVFVSNGTHWFVTQRNFYEPQIITTDNTFVSGSCDVVIGIVNNTVYDPLQPELDSFKEELDKYFKNHTSPDVDLGDISGINASVVNIQKEIDRLNEVAKNLNESLIDLQELGKYEQYIKGGGGSDIDPYKEFGSSYQLLNFLPLDFFPDLNALVDTATALYEEELTGREHCSPHHTAIRQALVCWDELTKLIAWMSSNITSEQVRTIIVNHVNDTWGLKVRQSLWFHLSCLTFGQHTVQEFLVSFGVWIRTPAPYRPPNAPILSTLPEHTVIC

SEQ ID NO: 6708 - protein, 1365 aa, Artificial Sequence
  SARS-CoV-2/Wuhan/HBCDC-HB-01/2019__EPI_ISL_402132 spike protein (1-1211)(K986P_V987P) WhcAg construct
MFVFLVLLPLVSSQCVNLTTRTQLPPAYTNSITRGVYYPDKVFRSSVLHSTQDLFLPFFSNVTWFHAIHVSGTNGTKRFDNPVLPFNDGVYFASTEKSNIIRGWIFGTTLDSKTQSLLIVNNATNVVIKVCEFQFCNDPFLGVYYHKNNKSWMESEFRVYSSANNCTFEYVSQPFLMDLEGKQGNFKNLREFVFKNIDGYFKIYSKHTPINLVRDLPQGFSALEPLVDLPIGINITRFQTLLALHRSYLTPGDSSSGWTAGAAAYYVGYLQPRTFLLKYNENGTITDAVDCALDPLSETKCTLKSFTVEKGIYQTSNFRVQPTESIVRFPNITNLCPFGEVFNATRFASVYAWNRKRISNCVADYSVLYNSASFSTFKCYGVSPTKLNDLCFTNVYADSFVIRGDEVRQIAPGQTGKIADYNYKLPDDFTGCVIAWNSNNLDSKVGGNYNYLYRLFRKSNLKPFERDISTEIYQAGSTPCNGVEGFNCYFPLQSYGFQPTNGVGYQPYRVVVLSFELLHAPATVCGPKKSTNLVKNKCVNFNFNGLTGTGVLTESNKKFLPFQQFGRDIADTTDAVRDPQTLEILDITPCSFGGVSVITPGTNTSNQVAVLYQDVNCTEVPVAIHADQLTPTWRVYSTGSNVFQTRAGCLIGAEHVNNSYECDIPIGAGICASYQTQTNSPRRARSVASQSIIAYTMSLGAENSVAYSNNSIAIPTNFTISVTTEILPVSMTKTSVDCTMYICGDSTECSNLLLQYGSFCTQLNRALTGIAVEQDKNTQEVFAQVKQIYKTPPIKDFGGFNFSQILPDPSKPSKRSFIEDLLFNKVTLADAGFIKQYGDCLGDIAARDLICAQKFNGLTVLPPLLTDEMIAQYTSALLAGTITSGWTFGAGAALQIPFAMQMAYRFNGIGVTQNVLYENQKLIANQFNSAIGKIQDSLSSTASALGKLQDVVNQNAQALNTLVKQLSSNFGAISSVLNDILSRLDPPEAEVQIDRLITGRLQSLQTYVTQQLIRAAEIRASANLAATKMSECVLGQSKRVDFCGKGYHLMSFPQSAPHGVVFLHVTYVPAQEKNFTTAPAICHDGKAHFPREGVFVSNGTHWFVTQRNFYEPQIITTDNTFVSGNCDVVIGIVNNTVYDPLQPELDSFKEELDKYFKNHTSPDVDLGDISGINASVVNIQKEIDRLNEVAKNLNESLIDLQELGKYEQYIKGGGGSDIDPYKEFGSSYQLLNFLPLDFFPDLNALVDTATALYEEELTGREHCSPHHTAIRQALVCWDELTKLIAWMSSNITSEQVRTIIVNHVNDTWGLKVRQSLWFHLSCLTFGQHTVQEFLVSFGVWIRTPAPYRPPNAPILSTLPEHTVIC

SEQ ID NO: 6709 - protein, 1365 aa, Artificial Sequence
  SARS-CoV-2/Guangdong/20SF028/2020__EPI_ISL_403936 spike protein (1-1211)(K986P_V987P) WhcAg construct
MFVFLVLLPLVSSQCVNLTTRTQLPPAYTNSFTRGVYYPDKVFRSSVLYSTQDLFLPFFSNVTWFHAIHVSGTNGTKRFDNPVLPFNDGVYFASTEKSNIIRGWIFGTTLDSKTQSLLIVNNATNVVIKVCEFQFCNDPFLGVYYHKNNKSWMESEFRVYSSANNCTFEYVSQPFLMDLEGKQGNFKNLREFVFKNIDGYFKIYSKHTPINLVRDLPQGFSALEPLVDLPIGINITRFQTLLALHRSYLTPGDSSSGWTAGAAAYYVGYLQPRTFLLKYNENGTITDAVDCALDPLSETKCTLKSFTVEKGIYQTSNFRVQPTESIVRFPNITNLCPFGEVFNATRFASVYAWNRKRISNCVADYSVLYNSASFSTFKCYGVSPTKLNDLCFTNVYADSFVIRGDEVRQIAPGQTGKIADYNYKLPDDFTGCVIAWNSNNLDSKVGGNYNYLYRLFRKSNLKPFERDISTEIYQAGSTPCNGVEGFNCYFPLQSYGFQPTNGVGYQPYRVVVLSFELLHAPATVCGPKKSTNLVKNKCVNFNFNGLTGTGVLTESNKKFLPFQQFGRDIADTTDAVRDPQTLEILDITPCSFGGVSVITPGTNTSNQVAVLYQDVNCTEVPVAIHADQLTPTWRVYSTGSNVFQTRAGCLIGAEHVNNSYECDIPIGAGICASYQTQTNSPRRARSVASQSIIAYTMSLGAENSVAYSNNSIAIPTNFTISVTTEILPVSMTKTSVDCTMYICGDSTECSNLLLQYGSFCTQLNRALTGIAVEQDKNTQEVFAQVKQIYKTPPIKDFGGFNFSQILPDPSKPSKRSFIEDLLFNKVTLADAGFIKQYGDCLGDIAARDLICAQKFNGLTVLPPLLTDEMIAQYTSALLAGTITSGWTFGAGAALQIPFAMQMAYRFNGIGVTQNVLYENQKLIANQFNSAIGKIQDSLSSTASALGKLQDVVNQNAQALNTLVKQLSSNFGAISSVLNDILSRLDPPEAEVQIDRLITGRLQSLQTYVTQQLIRAAEIRASANLAATKMSECVLGQSKRVDFCGKGYHLMSFPQSAPHGVVFLHVTYVPAQEKNFTTAPAICHDGKAHFPREGVFVSNGTHWFVTQRNFYEPQIITTDNTFVSGNCDVVIGIVNNTVYDPLQPELDSFKEELDKYFKNHTSPDVDLGDISGINASVVNIQKEIDRLNEVAKNLNESLIDLQELGKYEQYIKGGGGSDIDPYKEFGSSYQLLNFLPLDFFPDLNALVDTATALYEEELTGREHCSPHHTAIRQALVCWDELTKLIAWMSSNITSEQVRTIIVNHVNDTWGLKVRQSLWFHLSCLTFGQHTVQEFLVSFGVWIRTPAPYRPPNAPILSTLPEHTVIC

SEQ ID NO: 6710 - protein, 1365 aa, Artificial Sequence
  SARS-CoV-2/Shenzhen/SZTH-001/2020__EPI_ISL_406592 spike protein (1-1211)(K986P_V987P) WhcAg construct
MFVFLVLLPLVSSQCVNLTTRTQLPPAYTNSFTRGVYYPDKVFRSSVLHSTQDLFLPFFSNVTWFHAIHVSGTNGTKRFDNPVLPFNDGVYFASTEKSNIIRGWIFGTTLDSKTQSLLIVNNATNVVIKVCEFQFCNDPFLGVYYHKNNKSWMESEFRVYSSANNCTFEYVSQPFLMDLEGKQGNFKNLREFVFKNIDGYFKIYSKHTPINLVRDLPQGFSALEPLVDLPIGINITRFQTLLALHRSYLTPGDSSSGWTAGAAAYYVGYLQPRTFLLKYNENGTITDAVDCALDPLSETKCTLKSFTVEKGIYQTSNFRVQPTESIVRFPNITNLCPFGEVFNATRFASVYAWNRKRISNCVADYSVLYNSASFSTFKCYGVSPTKLNDLCFTNVYADSFVIRGDEVRQIAPGQTGKIADYNYKLPDDFTGCVIAWNSNNLDSKVGGNYNYLYRLFRKSNLKPFERDISTEIYQAGSTPCNGVEGFNCYFPLQSYGFQPTNGVGYQPYRVVVLSFELLHAPATVCGPKKSTNLVKNKCVNFNFNGLTGTGVLTESNKKFLPFQQFGRDIADTTDAVRDPQTLEILDITPCSFGGVSVITPGTNTSNQVAVLYQDVNCTEVPVAIHADQLTPTWRVYSTGSNVFQTRAGCLIGAEHVNNSYECDIPIGAGICASYQTQTNSPRRARSVASQSIIAYTMSLGAENSVAYSNNSIAIPTNFTISVTTEILPVSMTKTSVDCTMYICGDSTECSNLLLQYGSFCTQLNRALTGIAVEQDKNTQEVFAQVKQIYKTPPIKDFGGFNFSQILPDPSKPSKRSFIEDLLFNKVTLADAGFIKQYGDCLGDIAARDLICAQKFNGLTVLPPLLTDEMIAQYTSALLAGTITSGWTFGAGAALQIPFAMQMAYRFNGIGVTQNVLYENQKLIANQFNSAIGKIQDSLSSTASALGKLQDVVNQNAQALNTLVKQLSSNFGAISSVLNDILSRLDPPEAEVQIDRLITGRLQSLQTYVTQQLIRAAEIRASANLAATKMSECVLGQSKRVDFCGKGYHLMSFPQSAPHGVVFLHVTYVPAQEKNFTTAPAICHDGKAHFPREGVFVSNGTHWFVTQRNFYEPQIITTDNTFVSGNCDVLIGIVNNTVYDPLQPELDSFKEELDKYFKNHTSPDVDLGDISGINASVVNIQKEIDRLNEVAKNLNESLIDLQELGKYEQYIKGGGGSDIDPYKEFGSSYQLLNFLPLDFFPDLNALVDTATALYEEELTGREHCSPHHTAIRQALVCWDELTKLIAWMSSNITSEQVRTIIVNHVNDTWGLKVRQSLWFHLSCLTFGQHTVQEFLVSFGVWIRTPAPYRPPNAPILSTLPEHTVIC

SEQ ID NO: 6711 - protein, 1365 aa, Artificial Sequence
  SARS-CoV-2/Shenzhen/SZTH-004/2020__EPI_ISL_406595 spike protein (1-1211)(K986P_V987P) WhcAg construct
MFVFLVLLPLVSSQCVNLTTRTQLPPAYTNSFTRGVYYPDKVFRSSVLHSTQDLFLPFFSNVTWFHAIHVSGTNGTKRFDNPVLPFNDGVYFASTEKSNIIRGWIFGTTLDSKTQSLLIVNNATNVVIKVCEFQFCNDPFLGVYYHKNNKSWMESEFRVYSSANNCTFEYVSQPFLMDLEGKQGNFKNLREFVFKNIDGYFKIYSKHTPINLVRDLPQGFSALEPLVDLPIGINITRFQTLLALHRSYLTPGDSSSGWTAGAAAYYVGYLQPRTFLLKYNENGTITDAVDCALDPLSETKCTLKSFTVEKGIYQTSNFRVQPTESIVRFPNITNLCPFGEVFNATRFASVYAWDRKRISNCVAYYSVLYNSASFSTFKCYGVSPTKLNDLCFTNVYADSFVIRGDEVRQIAPGQTGKIADYNYKLPDDFTGCVIAWNSNNLDSKVGGNYNYLYRLFRKSNLKPFERDISTEIYQAGSTPCNGVEGFNCYFPLQSYGFQPTNGVGYQPYRVVVLSFELLHAPATVCGPKKSTNLVKNKCVNFNFNGLTGTGVLTESNKKFLPFQQFGRDIADTTDAVRDPQTLEILDITPCSFGGVSVITPGTNTSNQVAVLYQDVNCTEVPVAIHADQLTPTWRVYSTGSNVFQTRAGCLIGAEHVNNSYECDIPIGAGICASYQTQTNSPRRARSVASQSIIAYTMSLGAENSVAYSNNSIAIPTNFTISVTTEILPVSMTKTSVDCTMYICGDSTECSNLLLQYGSFCTQLNRALTGIAVEQDKNTQEVFAQVKQIYKTPPIKDFGGFNFSQILPDPSKPSKRSFIEDLLFNKVTLADAGFIKQYGDCLGDIAARDLICAQKFNGLTVLPPLLTDEMIAQYTSALLAGTITSGWTFGAGAALQIPFAMQMAYRFNGIGVTQNVLYENQKLIANQFNSAIGKIQDSLSSTASALGKLQDVVNQNAQALNTLVKQLSSNFGAISSVLNDILSRLDPPEAEVQIDRLITGRLQSLQTYVTQQLIRAAEIRASANLAATKMSECVLGQSKRVDFCGKGYHLMSFPQSAPHGVVFLHVTYVPAQEKNFTTAPAICHDGKAHFPREGVFVSNGTHWFVTQRNFYEPQIITTDNTFVSGNCDVVIGIVNNTVYDPLQPELDSFKEELDKYFKNHTSPDVDLGDISGINASVVNIQKEIDRLNEVAKNLNESLIDLQELGKYEQYIKGGGGSDIDPYKEFGSSYQLLNFLPLDFFPDLNALVDTATALYEEELTGREHCSPHHTAIRQALVCWDELTKLIAWMSSNITSEQVRTIIVNHVNDTWGLKVRQSLWFHLSCLTFGQHTVQEFLVSFGVWIRTPAPYRPPNAPILSTLPEHTVIC

SEQ ID NO: 6712 - protein, 1365 aa, Artificial Sequence
  SARS-CoV-2/France/IDF0372/2020__EPI_ISL_406596 spike protein (1-1211)(K986P_V987P) WhcAg construct
MFVFLVLLPLVSSQCVNLTTRTQLPPAYTNSFTRGVYYPDKVFRSSVLHSTQDLFLPFFSNVTWFHAIHVSGTNGTKRFDNPVLPFNDGVYFASTEKSNIIRGWIFGTTLDSKTQSLLIVNNATNVVIKVCEFQFCNDPFLGVYYHKNNKSWMESEFRVYSSANNCTFEYVSQPFLMDLEGKQGNFKNLREFVFKNIDGYFKIYSKHTPINLVRDLPQGFSALEPLVDLPIGINITRFQTLLALHRSYLTPGDSSSGWTAGAAAYYVGYLQPRTFLLKYNENGTITDAVDCALDPLSETKCTLKSFTVEKGIYQTSNFRVQPTESIVRFPNITNLCPFGEVFNATRFASVYAWNRKRISNCVADYSFLYNSASFSTFKCYGVSPTKLNDLCFTNVYADSFVIRGDEVRQIAPGQTGKIADYNYKLPDDFTGCVIAWNSNNLDSKVGGNYNYLYRLFRKSNLKPFERDISTEIYQAGSTPCNGVEGFNCYFPLQSYGFQPTNGVGYQPYRVVVLSFELLHAPATVCGPKKSTNLVKNKCVNFNFNGLTGTGVLTESNKKFLPFQQFGRDIADTTDAVRDPQTLEILDITPCSFGGVSVITPGTNTSNQVAVLYQDVNCTEVPVAIHADQLTPTWRVYSTGSNVFQTRAGCLIGAEHVNNSYECDIPIGAGICASYQTQTNSPRRARSVASQSIIAYTMSLGAENSVAYSNNSIAIPTNFTISVTTEILPVSMTKTSVDCTMYICGDSTECSNLLLQYGSFCTQLNRALTGIAVEQDKNTQEVFAQVKQIYKTPPIKDFGGFNFSQILPDPSKPSKRSFIEDLLFNKVTLADAGFIKQYGDCLGDIAARDLICAQKFNGLTVLPPLLTDEMIAQYTSALLAGTITSGWTFGAGAALQIPFAMQMAYRFNGIGVTQNVLYENQKLIANQFNSAIGKIQDSLSSTASALGKLQDVVNQNAQALNTLVKQLSSNFGAISSVLNDILSRLDPPEAEVQIDRLITGRLQSLQTYVTQQLIRAAEIRASANLAATKMSECVLGQSKRVDFCGKGYHLMSFPQSAPHGVVFLHVTYVPAQEKNFTTAPAICHDGKAHFPREGVFVSNGTHWFVTQRNFYEPQIITTDNTFVSGNCDVVIGIVNNTVYDPLQPELDSFKEELDKYFKNHTSPDVDLGDISGINASVVNIQKEIDRLNEVAKNLNESLIDLQELGKYEQYIKGGGGSDIDPYKEFGSSYQLLNFLPLDFFPDLNALVDTATALYEEELTGREHCSPHHTAIRQALVCWDELTKLIAWMSSNITSEQVRTIIVNHVNDTWGLKVRQSLWFHLSCLTFGQHTVQEFLVSFGVWIRTPAPYRPPNAPILSTLPEHTVIC
